(19) United States
(12) Patent Application Publication
(10) Pub. No.: US 2024/0068045 A1
(43) Pub. Date: Feb. 29, 2024

(54) METHODS AND COMPOSITIONS FOR DETECTING ESOPHAGEAL NEOPLASIAS AND/OR METAPLASIAS IN THE ESOPHAGUS

(71) Applicant: Case Western Reserve University, Cleveland, OH (US)

(72) Inventors: Sanford D. Markowitz, Pepper Pike, OH (US); Joseph E. Willis, Shaker Heights, OH (US); Helen Moinova, Beachwood, OH (US); Thomas LaFramboise, Shaker Heights, OH (US); Omar de la Cruz Cabrera, Chagrin Falls, OH (US); Amitabh Chak, University Heights, OH (US)

(21) Appl. No.: 18/381,926

(22) Filed: Oct. 19, 2023

Related U.S. Application Data
(63) Continuation of application No. 15/540,956, filed on Jun. 29, 2017.
(60) Provisional application No. 62/099,021, filed on Dec. 31, 2014.

(51) Int. Cl. C12Q 1/6886; C12Q 1/6806; C12Q 1/6837; C12Q 1/686

(52) U.S. Cl. CPC C12Q 1/6886; C12Q 1/6806; C12Q 1/6837; C12Q 1/686; C12Q 2600/106; C12Q 2600/112; C12Q 2600/154; C12Q 2600/156; C12Q 2600/16

(57) ABSTRACT

The disclosure provides methods for identifying genomic loci that are differentially methylated in neoplastic cancers, e.g., esophageal cancers. Identification of methylated genomic loci, and optionally in combination with the identification of somatic mutations in TP53, has numerous uses, including for example, to characterize disease risk, to predict responsiveness to therapy, to non-invasively diagnose subjects and to treat subjects determined to have gastrointestinal neoplasias.

### RELATED APPLICATIONS

[0001] This application is a continuation of U.S. application Ser. No. 15/540,956 (now pending), which is a national stage filing under 35 U.S.C. § 371 of International Application No. PCT/US2015/068131, filed Dec. 30, 2015 (now expired), which claims the benefit of the filing date under 35 U.S.C. 119(e) to U.S. provisional application Ser. No. 62/099,021, filed Dec. 31, 2014 (now expired). The disclosure of each of the foregoing application is hereby incorporated by reference in its entirety.

### FUNDING

[0002] This invention was made with government support under CA152756, CA163060, and CA150964 awarded by the National Institutes of Health. The United States Government has certain rights in the invention.

### SEQUENCE LISTING

[0003] The instant application contains a Sequence Listing which has been submitted electronically in XML file format and is hereby incorporated by reference in its entirety. Said XML copy, created on Oct. 24, 2023, is named 1848493-096-302_Sequence.XML and is 24,011,167 byes in size.

### BACKGROUND

[0004] Over 15,000 new cases of esophageal cancer were diagnosed in 2010, and there were nearly as many deaths from this cancer alone. As with other cancers, this rate can be decreased by improved methods for diagnosis. Although methods for detecting esophageal cancer exist, the methods are not ideal. Generally, a combination of endoscopy, isolation of cells (for example, via collection of cells/tissues from a fluid sample or from a tissue sample), and/or imaging technologies are used to identify cancerous cells and tumors. While upper endoscopy, usually performed by a gastroenterologist, can detect neoplasias of the esophagus, as well as of the stomach and duodenum, it is an uncomfortable and expensive procedure. Other detection procedures, such as barium esophogography are also available, but are associated with false positives, false negatives, and cost and discomfort issues.

[0005] Because of the disadvantages of existing methods for detecting or treating esophageal neoplasias/cancers, new methods are needed for esophageal neoplasia/cancer diagnosis and therapy.

### SUMMARY OF THE DISCLOSURE

[0006] In certain aspects, the present disclosure is based in part on the discovery of particular human genomic DNA regions (also referred to herein as informative loci or patches) in which the cytosines within CpG dinucleotides are differentially methylated in esophageal neoplasia compared to normal human tissues.

[0007] In one embodiment, the method comprises assaying for the presence of differentially methylated genomic loci in a tissue sample or a bodily fluid sample from a subject. The tissue sample may be obtained from biopsies of the gastrointestinal tract, including but not limited to the esophagus and stomach. Tissue samples may be obtained as a biopsy, or as a swab or brushing of the gastrointestinal tract (e.g., esophagus or stomach), or other organs believed to contain cancerous cells or tissues. Exemplary bodily fluids include blood, serum, plasma, saliva, spit, esophageal washing, a blood-derived fraction, or urine. In one embodiment, the method involves methylation-sensitive restriction enzyme(s). In another embodiment, the method involves methylation-sensitive PCR. In another embodiment, the method involves restriction enzyme/methylation-sensitive PCR. In yet another embodiment, the method comprises reacting DNA from the sample with a chemical compound that converts non-methylated cytosine bases (also called “conversion-sensitive” cytosines), but not methylated cytosine bases, to a different nucleotide base. In an embodiment, the chemical compound is sodium bisulfite, which converts unmethylated cytosine bases to uracil. The compound-converted DNA is then amplified using a methylation-sensitive polymerase chain reaction (MSP) employing primers that amplify the compound-converted DNA template if cytosine bases within CpG dinucleotides of the DNA from the sample are methylated. Production of a PCR product indicates that the subject has cancer or precancerous adenomas. In some embodiments, compound-converted DNA is amplified by bisulfite specific methylation indifferent PCR primers and methylation of the parental DNA template is inferred by DNA sequence analysis of the bisulfite converted and amplified product. Other methods for assaying for the presence of methylated DNA are known in the art. In certain embodiments, the method optionally comprises detecting the presence or absence of a somatic mutation in TP53.

[0008] In another embodiment, the present invention provides a detection method of prognosis of a neoplasia (or metaplasia) (e.g., upper gastrointestinal neoplasia, esophageal neoplasia) in a subject known to have or suspected of having neoplasia (or metaplasia). In some embodiments, the neoplasia is cancer. Such method comprises assaying for the presence of methylated informative loci in a tissue sample or bodily fluid from the subject. In certain cases, it is expected that detection of methylated informative loci in a tissue sample or bodily fluid from the subject is indicative of an advanced state of cancer (e.g., gastrointestinal cancer such as esophageal cancer). In other cases, detection of methylated informative loci in a tissue sample or sample from other bodily fluids may be indicative of a cancer that will respond to therapeutic agents that demethylate DNA or reactivate expression of genes located within methylated informative loci. In certain embodiments, the method optionally comprises detecting the presence or absence of somatic mutation(s) in TP53. In certain cases, detection of somatic mutation(s) in TP53 in a tissue sample or bodily fluid from the subject is indicative of an advanced state of cancer (e.g., gastrointestinal cancer such as esophageal cancer). In other cases, detection of somatic mutation(s) in TP53 in a tissue sample or sample from other bodily fluids may be indicative of a cancer that will respond to therapeutic agents that demethylate DNA or reactivate expression of genes located within methylated informative loci.

[0009] In another embodiment, the present invention provides a method of monitoring over time the status of neoplasia (e.g., gastrointestinal neoplasia such as esophageal neoplasia) in a subject. In some embodiments, the neoplasia is a cancer. In some embodiments, the neoplasia is a metaplasia such as Barrett's esophagus. In certain embodiments, the method optionally comprises detecting the presence or absence of somatic mutation(s) in TP53 in combination with detecting the methylation status of any of the informative loci disclosed herein. In certain cases, detection of the appearance of somatic mutation(s) in TP53 over time in a tissue sample or bodily fluid from the subject is indicative of neoplastic progression. In other cases, detection of a disappearance of a somatic mutation(s) in TP53 over time in a tissue sample or sample from other bodily fluids may be indicative of neoplastic regression.

[0010] In another embodiment, the present invention provides a method of evaluating therapy in a subject having cancer or suspected of having neoplasia (e.g., gastrointestinal neoplasia such as esophageal neoplasia). In some embodiments, the neoplasia is a cancer. In some embodiments, the neoplasia is a metaplasia such as Barrett's esophagus. In certain embodiments, the method optionally further comprises detecting the presence or absence of somatic mutation(s) in TP53.

[0011] The present invention also relates to oligonucleotide primer sequences for use in assays (e.g., methylation-sensitive PCR assays or HpaII assays) designed to detect the methylation status of the informative methylated genomic loci.

[0012] The present invention also provides a method of inhibiting or reducing growth of neoplasia cells (e.g., gastrointestinal neoplasia such as esophageal neoplasia). In some embodiments, the neoplasia is a cancer. In some embodiments, the neoplasia is a metaplasia such as Barrett's esophagus.

[0013] In some embodiments, the disclosure provides for a method of detecting the presence of an esophageal neoplasia or metaplasia in the esophagus in a human subject, comprising: a) obtaining a human sample; and b) assaying the sample for the presence of methylation within a nucleotide sequence spanning one or more of any of the chromosomal loci having a sequence that is at least 90% identical to the sequence of any one or more of: SEQ ID NOs: 1-856, 2569-3424, 5137-5926; 7507-7558, 7663-7714, 7819-7866, 7963-7990, 8047-8074, 8131-8156, 8209-8222, 8251-8264, 8293-8306, 8335-8348, 8405-8409, or 8420-8424, or complements or fragments thereof; wherein methylation of the nucleotide sequence is indicative of an esophageal neoplasia or metaplasia in the esophagus. In some embodiments, the disclosure provides for a method of detecting an esophageal neoplasia or metaplasia in the esophagus, comprising: a) obtaining a human sample; and b) assaying said sample for the presence of DNA methylation by assay in a bisulfite converted DNA for retention of a cytosine base at any of the Y positions present in one or more of the nucleotide sequences having at least 90% identical to the sequence of any one or more of SEQ ID NOs: 857-1284, 1713-2140, 3425-3852, 4281-4708, 5927-6321, 6717-7111, 7559-7584, 7611-7636, 7715-7740, 7767-7792, 7867-7890, 7915-7938, 7991-8004, 8019-8032, 8075-8088, 8103-8116, 8157-8169, 8183-8195, 8223-8236, 8265-8278, 8307-8320, 8349-8362, 8410-8414 or 8425-8429; wherein methylation of the nucleotide sequence is indicative of metaplasia in the esophagus or esophageal neoplasia. In some embodiments, the sample is assayed for the presence of methylation at any of the Y positions present in one or more of the nucleotide sequences having at least 90% identity to the sequence of any one or more of SEQ ID NOs: 7991-8004, 8019-8032, 8075-8088, 8103-8116, 8157-8169, 8183-8195, 8223-8236, 8265-8278, 8307-8320, 8349-8362, 8410-8414 or 8425-8429. In some embodiments, the disclosure provides for method of detecting an esophageal neoplasia, comprising: a) obtaining a human sample; and b) assaying the sample for the presence of methylation within a nucleotide sequence spanning one or more of any of the chromosomal loci having a sequence that is at least 90% identical to the sequence of any one or more of: SEQ ID NOs: 8447-8818, 9563-9934, 10679-10972, 11561-11662, 11867-11968, 12173-12266, 12455-12466, 12491-12502, 12527-12538, 12563-12568, 12581-12586, 12599-12604, 12617-12622, 12647-12649 or 12656-12658, or complements or fragments thereof. In some embodiments, the disclosure provides for a method of detecting an esophageal neoplasia, comprising: a) obtaining a human sample; and b) assaying the sample for the presence of DNA methylation by assay in a bisulfite converted DNA for retention of a cytosine base at any of the Y positions present in one or more of the nucleotide sequences having at least 90% identical to the sequence of any one or more of SEQ ID NOs: 8819-9004, 9191-9376, 9935-10120, 10307-10492, 10973-11119, 11267-11413, 11663-11713, 11765-11815, 11969-12019, 12071-12121, 12267-12313, 12361-12407, 12467-12472, 12479-12484, 12503-12508, 12515-12520, 12539-12544, 12551-12556, 12569-12574, 12587-12592, 12605-12610, 12623-12628, 12650-12652, or 12659-12661; wherein methylation of the nucleotide sequence is indicative of metaplasia in the esophagus. In some embodiments, the sample is assayed for the presence of DNA methylation by assay in a bisulfite converted DNA for retention of a cytosine base at any of the Y positions present in one or more of the nucleotide sequences having at least 90% identity to the sequence of any one or more of SEQ ID NOs: 11663-11713, 11765-11815, 11969-12019, 12071-12121, 12267-12313, 12361-12407, 12467-12472, 12479-12484, 12503-12508, 12515-12520, 12539-12544, 12551-12556, 12569-12574, 12587-12592, 12605-12610, 12623-12628, 12650-12652, or 12659-12661. In some embodiments, the subject has been assayed for having a somatic mutation in TP53. In some embodiments, the esophageal neoplasia or metaplasia in the esophagus is selected from the group consisting of Barrett's esophagus (BE), and/or, Barrett's esophagus with low grade dysplasia, Barrett's esophagus with high grade dysplasia (HGD), and/or esophageal adenocarcinoma (EAC). In some embodiments, the sample is obtained from a subject suspected of having or is known to have an esophageal neoplasia or metaplasia in the esophagus. In some embodiments, the assay is methylation-specific PCR. In some embodiments, the methods disclosed herein further comprise: a) treating DNA from the sample with a compound that converts a non-methylated cytosine base in the DNA to a different base; b) amplifying a region of the compound converted nucleotide sequence with a forward primer and a reverse primer; and c) analyzing the methylation patterns of the nucleotide sequences. In some embodiments, the methods disclosed herein further comprise: a) treating DNA from the sample with a compound that converts a non-methylated cytosine base in the DNA to a different base; b) amplifying a region of the compound converted nucleotide sequence with a forward primer and a reverse primer; and c) detecting the presence and/or amount of the amplified product. In some embodiments, the compound used to treat DNA is a bisulfite compound. In some embodiments, the assay comprises using a methylation-sensitive restriction enzyme. In some embodiments, the methylation-sensitive restriction enzyme is selected from HpaII, SmaI, SacII, EagI, BstUI, and BssHII. In some embodiments, the sample is a bodily fluid selected from the group consisting of blood, saliva, spit, an esophageal washing, serum, plasma, a blood-derived fraction, stool, urine, and a colonic effluent. In some embodiments, the sample is derived from a tissue. In some embodiments, the sample is a biopsy. In some embodiments, the sample is a brushing.

[0014] In some embodiments, the disclosure provides for a method of monitoring over time an esophageal neoplasia or metaplasia in the esophagus comprising: a) detecting the presence of methylation within a nucleotide sequence spanning one or more of any of the chromosomal loci having a sequence that is at least 90% identical to the sequence of any one or more of: SEQ ID NOs: 1-856, 2569-3424, 5137-5926; 7507-7558, 7663-7714, 7819-7866, 7963-7990, 8047-8074, 8131-8156, 8209-8222, 8251-8264, 8293-8306, 8335-8348, 8405-8409, or 8420-8424, or complements or fragments thereof, or complements or fragments thereof; from a sample from a subject for a first time; and b) detecting the level of methylation of the nucleotide sequence in a sample from the same subject at a later time. In some embodiments, the disclosure provides for a method of monitoring over time an esophageal neoplasia or metaplasia in the esophagus comprising: a) detecting the methylation status of DNA by assay in a bisulfite converted DNA for retention of a cytosine base at one or more of the Y positions present in one or more of the nucleotide sequences having at least 90% identity to the sequence of any one or more of: SEQ ID NOs: 857-1284, 1713-2140, 3425-3852, 4281-4708, 5927-6321, 6717-7111, 7559-7584, 7611-7636, 7715-7740, 7767-7792, 7867-7890, 7915-7938, 7991-8004, 8019-8032, 8075-8088, 8103-8116, 8157-8169, 8183-8195, 8223-8236, 8265-8278, 8307-8320, 8349-8362, 8410-8414 or 8425-8429 from a sample from a subject for a first time; and b) detecting the methylation status of the nucleotide sequence in a sample from the same subject at a later time; wherein absence of methylation in the nucleotide sequence taken at a later time and the presence of methylation in the nucleotide sequence taken at the first time is indicative of neoplasia or metaplasia regression; and wherein presence of methylation in the nucleotide sequence taken at a later time and the absence of methylation in the nucleotide sequence taken at the first time is indicative of neoplasia or metaplasia progression. In some embodiments, the disclosure provides for a method of monitoring over time an esophageal neoplasia comprising: a) detecting the presence of methylation within a nucleotide sequence spanning one or more of any of the chromosomal loci having a sequence that is at least 90% identical to the sequence of any one or more of: SEQ ID NOs: 8447-8818, 9563-9934, 10679-10972, 11561-11662, 11867-11968, 12173-12266, 12455-12466, 12491-12502, 12527-12538, 12563-12568, 12581-12586, 12599-12604, 12617-12622, 12647-12649 or 12656-12658, or complements or fragments thereof, from a sample from a subject for a first time; and b) detecting the level of methylation of the nucleotide sequence in a sample from the same subject at a later time. In some embodiments, the disclosure provides for a method of monitoring over time an esophageal neoplasia comprising: a) detecting the methylation status of a DNA molecule by assay in a bisulfite converted DNA for retention of a cytosine base of one or more of the Y positions present in one or more of the nucleotide sequences having at least 90% identity to the sequence of any one or more of: SEQ ID NOs: 8819-9004, 9191-9376, 9935-10120, 10307-10492, 10973-11119, 11267-11413, 11663-11713, 11765-11815, 11969-12019, 12071-12121, 12267-12313, 12361-12407, 12467-12472, 12479-12484, 12503-12508, 12515-12520, 12539-12544, 12551-12556, 12569-12574, 12587-12592, 12605-12610, 12623-12628, 12650-12652, or 12659-12661 from a sample from a subject for a first time; and b) detecting the methylation status of the nucleotide sequence in a sample from the same subject at a later time; wherein absence of methylation in the nucleotide sequence taken at a later time and the presence of methylation in the nucleotide sequence taken at the first time is indicative of neoplasia regression; and wherein presence of methylation in the nucleotide sequence taken at a later time and the absence of methylation in the nucleotide sequence taken at the first time is indicative of neoplasia progression. In some embodiments, the sample is a bodily fluid selected from the group consisting of blood, saliva, spit or an esophageal washing. In some embodiments, the sample is derived from tissue.

[0015] In some embodiments, the disclosure provides for a method of treating a subject having a metaplasia in the esophagus or neoplasia, comprising the step of treating the subject with chemotherapy, radiation therapy and/or with the resection of the neoplasia or metaplasia; and/or with ablation of the neoplasia or metaplasia; wherein the subject has been determined to have methylation in a sequence that is at least 90% identical to the sequence of any one or more of: SEQ ID NOs: 1-856, 2569-3424, 5137-5926; 7507-7558, 7663-7714, 7819-7866,7963-7990, 8047-8074, 8131-8156, 8209-8222, 8251-8264, 8293-8306, 8335-8348, 8405-8409, or 8420-8424, or complements or fragments thereof. In some embodiments, the disclosure provides for a method of treating a subject having a metaplasia in the esophagus or neoplasia, comprising the step of treating the subject with chemotherapy, radiation therapy and/or with the resection of the neoplasia or metaplasia; and/or with ablation of the neoplasia or metplasia; wherein the subject has been determined to have DNA methylation by assay in a bisulfite converted DNA for retention of a cytosine base of one or more of the Y positions present in one or more of the nucleotide sequences having at least 90% identity to the sequence of any one or more of: SEQ ID NOs: 857-1284, 1713-2140, 3425-3852, 4281-4708, 5927-6321, 6717-7111, 7559-7584, 7611-7636, 7715-7740, 7767-7792, 7867-7890, 7915-7938, 7991-8004, 8019-8032, 8075-8088, 8103-8116, 8157-8169, 8183-8195, 8223-8236, 8265-8278, 8307-8320, 8349-8362, 8410-8414 or 8425-8429. In some embodiments, the disclosure provides for a method of treating a subject having an esophageal neoplasia, comprising the step of treating the subject with chemotherapy, radiation therapy, ablation, and/or with neoplasia resection; wherein the subject has been determined to have methylation methylation within a nucleotide sequence spanning one or more of any of the chromosomal loci having a sequence that is at least 90% identical to the sequence of any one or more of: SEQ ID NOs: 8447-8818, 9563-9934, 10679-10972, 11561-11662, 11867-11968, 12173-12266, 12455-12466, 12491-12502, 12527-12538, 12563-12568, 12581-12586, 12599-12604, 12617-12622, 12647-12649 or 12656-12658, or complements or fragments thereof. In some embodiments, the disclosure provides for a method of treating a subject having an esophageal neoplasia, comprising the step of treating the subject with chemotherapy, radiation therapy, ablation, and/or with neoplasia resection; wherein the subject has been determined to have methylation of a DNA molecule by assay in a bisulfite converted DNA for retention of a cytosine base of one or more of the Y positions present in one or more of the nucleotide sequences having at least 90% identity to the sequence of any one or more of: SEQ ID NOs: 8819-9004, 9191-9376, 9935-10120, 10307-10492, 10973-11119, 11267-11413, 11663-11713, 11765-11815, 11969-12019, 12071-12121, 12267-12313, 12361-12407, 12467-12472, 12479-12484, 12503-12508, 12515-12520, 12539-12544, 12551-12556, 12569-12574, 12587-12592, 12605-12610, 12623-12628, 12650-12652, or 12659-12661. In some embodiments, the subject has been assayed for having a somatic mutation in TP53.

[0016] In some embodiments, the disclosure provides for a bisulfite converted sequence having at least 90% identity to any one or more of SEQ ID NOs: 857-2568, 3425-5136, 5927-7506, 7559-7662, 7715-7818, 7867-7962, 7991-8046, 8075-8130, 8157-8208, 8223-8250, 8265-8292, 8307-8334, 8349-8376, 8410-8419, 8425-8434, and/or fragments thereof, and/or the reverse complements thereof including all unique fragments of these sequences and their reverse complements. In some embodiments, the disclosure provides for a panel of bisulfite converted sequences selected from the sequences having at least 90% identity to any one or more of SEQ ID NOs: 857-2568, 3425-5136, 5927-7506, 7559-7662, 7715-7818, 7867-7962, 7991-8046, 8075-8130, 8157-8208, 8223-8250, 8265-8292, 8307-8334, 8349-8376, 8410-8419, 8425-8434, and/or fragments thereof, and/or the reverse complements thereof including all unique fragments of these sequences and their reverse complements. In some embodiments, the panel corresponds to any combination of the sequences having any of SEQ ID NOs: 8307-8334, 8349-8376, 8410-8419 or 8425-8434. In some embodiments, the disclosure provides for an oligonucleotide primer that hybridizes to any of the sequences having at least 90% identity to any one or more of SEQ ID NOs: 857-2568, 3425-5136, 5927-7506, 7559-7662, 7715-7818, 7867-7962, 7991-8046, 8075-8130, 8157-8208, 8223-8250, 8265-8292, 8307-8334, 8349-8376, 8410-8419, 8425-8434. In some embodiments, the primer is any of the primers having at least 90% identity to any one or more of SEQ ID NOs: 8377-8404 or 8435-8444, or fragments or complements thereof. In some embodiments, the primers are combined as forward and reverse primers for PCR amplification of any of the bisulfite converted sequences having at least 90% identity to any one or more of SEQ ID NOs: 857-2568, 3425-5136, 5927-7506, 7559-7662, 7715-7818, 7867-7962, 7991-8046, 8075-8130, 8157-8208, 8223-8250, 8265-8292, 8307-8334, 8349-8376, 8410-8419, 8425-8434, and/or fragments thereof, and/or the reverse complements thereof including all unique fragments of these sequences and their reverse complements. In some embodiments, one of the primers in the primer pairs has a nucleotide sequence that is at least 90% identity to any one or more of SEQ ID NOs: 8377-8404 or 8435-8444, or fragments or complements thereof. In some embodiments, the disclosure provides for a panel of primer pairs selected from any of the primer pairs disclosed herein. In some embodiments, the panel corresponds to a combination of primer pairs for amplifying any of the combinations of SEQ ID NOs: 8307-8334, 8349-8376, 8410-8419 or 8425-8434.

[0017] In some embodiments, the disclosure provides for a bisulfite converted sequence having at least 90% identity to any one or more of SEQ ID NOs: 8819-9562, 9935-10678, 10973-11560; 11663-11866, 11969-12172, 12267-12454; 12467-12490, 12503-12526, 12539-12562, 12569-12580, 12587-12598, 12605-12616, 12623-12634, 12650-12655, and 12659-12664, and the reverse complements thereof, including all unique fragments of these sequences and their reverse complements. In some embodiments, the disclosure provides for a panel of bisulfite converted sequences selected from any of these sequences. In some embodiments, the disclosure provides for an oligonucleotide primer that hybridizes to any of these sequences. In some embodiments, the panel corresponds to any combination of any of the sequences of SEQ ID NOs: 12605-12616, 12623-12634, 12650-12655, or 12659-12664. In some embodiments, the disclosure provides for primers having at least 90% identity to any one or more of SEQ ID NOs: 12635-12646, and 12665-12670, or fragments or complements thereof. In some embodiments, the primers are combined as forward and reverse primers for PCR amplification of any of the bisulfite converted sequences having at least 90% identity to any one or more of SEQ ID NOs: 8819-9562, 9935-10678, 10973-11560; 11663-11866, 11969-12172, 12267-12454; 12467-12490, 12503-12526, 12539-12562, 12569-12580, 12587-12598, 12605-12616, 12623-12634, 12650-12655, and 12659-12664, and the reverse complements thereof, including all unique fragments of these sequences and their reverse complements. In some embodiments, one of the primers in the primer pairs has a nucleotide sequence that is at least 90% identity to any one or more of SEQ ID NOs: 12635-12646, and 12665-12670, or fragments or complements thereof. In some embodiments, the disclosure provides for a panel of primer pairs selected from any of the primer pairs disclosed herein. In some embodiments, the panel corresponds to the combination of primer pairs for amplifying any combination of any of the sequences of SEQ ID NOs: 12605-12616, 12623-12634, 12650-12655, or 12659-12664.

[0018] In some embodiments, the disclosure provides for a method of selecting an individual to undergo a diagnostic procedure to determine the presence of Barrett's esophagus, of Barrett's esophagus with low grade dysplasia, of Barrett's esophagus with high grade dysplasia, or of esophageal adenocarcinoma, by obtaining a biological sample from an individual, and determining the presence in DNA from that sample of DNA methylation present in any of the sequences having at least 90% identity to any one or more of SEQ ID NOs: 1-856, 2569-3424, 5137-5926; 7507-7558, 7663-7714, 7819-7866, 7963-7990, 8047-8074, 8131-8156, 8209-8222, 8251-8264, 8293-8306, 8335-8348, 8405-8409, or 8420-8424, and/or fragments thereof, and/or the reverse complements thereof. In some embodiments, the method further comprises determining the presence of a somatic mutation in TP53. In some embodiments, DNA methylation is detected by cutting one of the DNA sequences with a methylation sensitive restriction enzyme. In some embodiments, DNA methylation is detected by bisulfite converting DNA from the sample and detecting the presence of any of the bisulfite converted DNA sequences having at least 90% identity to any one or more of SEQ ID NOs: 857-2568, 3425-5136, 5927-7506, 7559-7662, 7715-7818, 7867-7962, 7991-8046, 8075-8130, 8157-8208, 8223-8250, 8265-8292, 8307-8334, 8349-8376, 8410-8419, 8425-8434, and/or fragments thereof, and/or the reverse complements thereof including all unique fragments of these sequences and their reverse complements. In some embodiments, the bisulfite converted sequences are detected using any of: DNA sequencing, next generation sequencing, methylation specific PCR, methylation specific PCR combined with a fluorogenic hybridization probe, and real time methylation specific PCR. In some embodiments, the bisulfite converted sequences are detected using PCR amplification employing a PCR primer or primer pair comprising the nucleotide sequence of any of SEQ ID NOs: 8377-8404 or 8435-8444. In some embodiments, the method further comprises the step of determining the nucleotide sequence of the bisulfite converted sequences. In some embodiments, the percent of the target sequence that is methylated in any of the individual target sequences is greater than 1%, or greater than 5%, or greater than 10%. In some embodiments, the biological sample is a tissue sample, including a sample of the esophagus. In some embodiments, the tissue sample is a biopsy or a brushing, including a biopsy or a brushing of the esophagus. In some embodiments, the biological sample is a body fluid. In some embodiments, the body fluid is blood, saliva, spit or an esophageal washing.

[0019] In some embodiments, the disclosure provides for a method of selecting an individual to undergo a diagnostic procedure to determine presence of Barrett's esophagus with low grade dysplasia, of Barrett's esophagus with high grade dysplasia or of esophageal adenocarcinoma; or to undergo a treatment for Barrett's esophagus with low grade dysplasia, Barrett's esophagus with high grade dysplasia or for esophageal adenocarcinoma; or to undergo enhanced surveillance for the development of Barrett's esophagus with low grade dysplasia, of Barrett's esophagus with high grade dysplasia or of esophageal adenocarcinoma, by obtaining a biological sample from an individual, and determining the presence in DNA from that sample of methylation present in any of the sequences having at least 90% identity to any one or more of SEQ ID NOs: 8447-8818, 9563-9934, 10679-10972, 11561-11662, 11867-11968, 12173-12266, 12455-12466, 12491-12502, 12527-12538, 12563-12568, 12581-12586, 12599-12604, 12617-12622, 12647-12649 or 12656-12658. In some embodiments, the disclosure provides for a method of treating a subject having Barrett's esophagus with low grade dysplasia, Barrett's esophagus with high grade dysplasia or esophageal adenocarcinoma, comprising the step of treating the subject with chemotherapy, radiation therapy, and/or with resection of an esophageal lesion or with ablation of an esophageal lesion, wherein the subject has been determined to have methylation at any of the sequences having at least 90% identity to any one or more of SEQ ID NOs: 8447-8818, 9563-9934, 10679-10826, 11561-11662, 11867-11968, 12173-12266, 12455-12466, 12491-12502, 12527-12538, 12563-12568, 12581-12586, 12599-12604, 12617-12622, 12647-12649 or 12656-12658. In some embodiments, the disclosure provides for a method of selecting an individual to undergo enhanced surveillance for the development of Barrett's esophagus with high grade dysplasia or of esophageal adenocarcinoma, wherein the subject has been determined to have methylation at any of the sequences having at least 90% identity to any one or more of SEQ ID NOs: 8447-8818, 9563-9934, 10679-10826, 11561-11662, 11867-11968, 12173-12266, 12455-12466, 12491-12502, 12527-12538, 12563-12568, 12581-12586, 12599-12604, 12617-12622, 12647-12649 or 12656-12658. In some embodiments, the methods disclosed herein further comprises determining the presence of a somatic mutation in TP53. In some embodiments, DNA methylation is detected by cutting one of the DNA sequences with a methylation sensitive restriction enzyme. In some embodiments, DNA methylation is detected by bisulfite converting DNA from the sample and detecting the presence of any of the bisulfite converted DNA sequences having at least 90% identity to any one or more of SEQ ID NOs: 8819-9562, 9935-10678, 10973-11560; 11663-11866, 11969-12172, 12267-12454; 12467-12490, 12503-12526, 12539-12562, 12569-12580, 12587-12598, 12605-12616, 12623-12634, 12650-12655, and 12659-12664, and the reverse complements thereof, including all unique fragments of these sequences and their reverse complements or panels comprising any combination of those sequences, or detecting the presence of unconverted cytosine residues at any of the Y bases in any of those sequences or panels. In some embodiments, the bisulfite converted sequences or the presence of unconverted cytosine residues at any of the Y bases of these sequence or panels are detected using any of: DNA sequencing, next generation sequencing, methylation specific PCR, methylation specific PCR combined with a fluorogenic hybridization probe, and real time methylation specific PCR. In some embodiments, the bisulfite converted sequences or the presence of unconverted cytosine residues in the bisulfite converted sequences are detected using PCR amplification employing any of the PCR primers or primer pairs disclosed herein. In some embodiments, the percent of the target sequence that is methylated in any of the individual target sequences is greater than 1%, or greater than 5%, or greater than 10%. In some embodiments, the biological sample is a tissue sample, including a sample of the esophagus. In some embodiments, the tissue sample is a biopsy or a brushing, including a biopsy or brushing of the esophagus. In some embodiments, the biological sample is a body fluid. In some embodiments, the body fluid is blood, saliva, spit or an esophageal washing. In some embodiments, the individual is known to have Barrett's esophagus. In some embodiments, the individual is known to have Barrett's esophagus with low grade dysplasia.

[0020] In some embodiments, the disclosure provides for a method of determining the response of an individual with esophageal cancer to therapy by detection in a body fluid of methylation in any of the DNA sequences having at least 90% identity to any one or more of SEQ ID NOs: 1-856, 2569-3424, 5137-5926; 7507-7558, 7663-7714, 7819-7866, 7963-7990, 8047-8074, 8131-8156, 8209-8222, 8251-8264, 8293-8306, 8335-8348, 8405-8409, 8420-8424, 8447-8818, 9563-9934, 10679-10826, 11561-11662, 11867-11968, 12173-12266, 12455-12466, 12491-12502, 12527-12538, 12563-12568, 12581-12586, 12599-12604, 12617-12622, 12647-12649 or 12656-12658 and/or fragments thereof, and/or the reverse complements thereof; wherein increasing levels of methylation over time are indicative of disease progression and a need for a change in therapy, and wherein absence of increase in levels of methylation over time or decrease in levels of methylation over time are indicative that a change in therapy is not required. In some embodiments, any of the methods disclosed herein further comprise detecting the presence of a somatic mutation in TP53. In some embodiments, the DNA methylation is detected by bisulfite converting DNA from a body fluid and detecting the presence of any of the bisulfite converted DNA sequences disclosed herein.

[0021] In some embodiments, the disclosure provides for a method of monitoring over time an esophageal neoplasia comprising: a) detecting in a sample from a subject for a first time (i) the methylation status of one or more of the DNA sequences having at least 90% identity to any one or more of SEQ ID NOs: 1-856, 2569-3424, 5137-5926; 7507-7558, 7663-7714, 7819-7866, 7963-7990, 8047-8074, 8131-8156, 8209-8222, 8251-8264, 8293-8306, 8335-8348, 8405-8409, 8420-8424, 8447-8818, 9563-9934, 10679-10826, 11561-11662, 11867-11968, 12173-12266, 12455-12466, 12491-12502, 12527-12538, 12563-12568, 12581-12586, 12599-12604, 12617-12622, 12647-12649 or 12656-12658 from that sample; and (ii) the somatic mutation status of TP53 from that sample; and b) detecting in a sample from the same subject at a later time (i) the methylation status of one or more of the DNA sequences having at least 90% identity to any one or more of SEQ ID NOs: 1-856, 2569-3424, 5137-5926; 7507-7558, 7663-7714, 7819-7866, 7963-7990, 8047-8074, 8131-8156, 8209-8222, 8251-8264, 8293-8306, 8335-8348, 8405-8409, 8420-8424, 8447-8818,9563-9934, 10679-10826, 11561-11662, 11867-11968, 12173-12266, 12455-12466, 12491-12502, 12527-12538, 12563-12568, 12581-12586, 12599-12604, 12617-12622, 12647-12649 or 12656-12658; and (ii) the somatic mutation status of TP53 from the same subject at a later time. In some embodiments, the neoplasia regression is indicated by: (i) the sample taken at the first time having methylation in any of Up15-1, Up35-1, Up35-2, Up3, Up27, or Up10, or having a somatic mutation in TP53; and (ii) the sample at a later time lacking methylation in Up15-1, Up35-1, Up35-2, Up3, Up27, Up10, and lacking a somatic mutation in TP53. In some embodiments, the neoplasia progression is indicated by: (i) the sample taken at the first time lacking methylation in Up15-1, Up35-1, Up35-2, Up3, Up27, and Up10, and lacking a somatic mutation in TP53; and (ii) the sample taken at a later time having methylation in any of Up15-1, Up35-1, Up35-2, Up3, Up27, Up10, or having a somatic mutation in TP53. In some embodiments, the biological sample is a tissue sample, including a sample of the esophagus. In some embodiments, the tissue sample is a biopsy or a brushing, including a biopsy or a brushing of the esophagus. In some embodiments, the biological sample is a body fluid. In some embodiments, the body fluid is blood, saliva, spit or an esophageal washing.

[0022] In some embodiments, the disclosure provides for a method of detecting the presence of an esophageal neoplasia in a human subject, comprising: a) obtaining a human sample; and b) detecting the methylation status of one or more of the DNA sequences having at least 90% identity to any one or more of SEQ ID NOs: 1-856, 2569-3424, 5137-5926; 7507-7558, 7663-7714, 7819-7866, 7963-7990, 8047-8074, 8131-8156, 8209-8222, 8251-8264, 8293-8306, 8335-8348, 8405-8409, 8420-8424, 8447-8818, 9563-9934, 10679-10826, 11561-11662, 11867-11968, 12173-12266, 12455-12466, 12491-12502, 12527-12538, 12563-12568, 12581-12586, 12599-12604, 12617-12622, 12647-12649 or 12656-12658 from that sample. In some embodiments, the method further comprises the step of detecting the somatic mutation status of TP53 from that sample. In some embodiments, the TP53 somatic mutation is detected at a later time than the detection of the methylation status of any of the DNA sequences having at least 90% identity to any one or more of SEQ ID NOs: 1-856, 2569-3424, 5137-5926; 7507-7558, 7663-7714, 7819-7866, 7963-7990, 8047-8074, 8131-8156, 8209-8222, 8251-8264, 8293-8306, 8335-8348, 8405-8409, 8420-8424, 8447-8818, 9563-9934, 10679-10826, 11561-11662, 11867-11968, 12173-12266, 12455-12466, 12491-12502, 12527-12538, 12563-12568, 12581-12586, 12599-12604, 12617-12622, 12647-12649 or 12656-12658. In some embodiments, a) the presence of methylation at any of SEQ ID NOs: 1-856, 2569-3424, 5137-5926; 7507-7558, 7663-7714, 7819-7866, 7963-7990, 8047-8074, 8131-8156, 8209-8222, 8251-8264, 8293-8306, 8335-8348, 8405-8409, 8420-8424; and b) the absence of methylation at any one of the combination of Up15-1, Up35-1, Up35-2, Up3, Up27, and Up10; and c) the absence of a somatic mutation in TP53 is indicative of non-dysplastic Barret's esophagus. In some embodiments, a) the presence of methylation at any of SEQ ID NOs: 1-856, 2569-3424, 5137-5926; 7507-7558, 7663-7714, 7819-7866, 7963-7990, 8047-8074, 8131-8156, 8209-8222, 8251-8264, 8293-8306, 8335-8348, 8405-8409, 8420-8424; and b) the absence of methylation in all members of an assay panel selected from any or all of Up15-1, Up35-1, Up35-2, Up3, Up27, and Up10; and c) the absence of a somatic mutation in TP53 is indicative of non-dysplastic Barret's esophagus. In some embodiments, a) the presence of methylation at any of SEQ ID NOs: 1-856, 2569-3424, 5137-5926; 7507-7558, 7663-7714, 7819-7866, 7963-7990, 8047-8074, 8131-8156, 8209-8222, 8251-8264, 8293-8306, 8335-8348, 8405-8409, 8420-8424; and b) the absence of methylation at Up-3 and Up35-2; and c) the absence of a somatic mutation in TP53 is indicative of non-dysplastic Barret's esophagus. In some embodiments, the presence of methylation at any one of Up15-1, Up35-1, Up35-2, Up3, Up27, and Up10; or the presence of a somatic mutation in TP53 is indicative of esophageal adenocarcinoma, of Barrett's esophagus with low grade dysplasia, or of Barrett's esophagus with high grade dysplasia. In some embodiments, the presence of methylation at any one of Up15-1, Up35-1, Up35-2, Up3, Up27, or Up10, is indicative of esophageal adenocarcinoma, of Barrett's esophagus with low grade dysplasia, or of Barrett's esophagus with high grade dysplasia. In some embodiments, the biological sample is a tissue sample, including a sample of the esophagus. In some embodiments, the tissue sample is a biopsy or a brushing, including a biopsy or a brushing of the esophagus. In some embodiments, the biological sample is a body fluid. In some embodiments, the body fluid is blood, saliva, spit or an esophageal washing.

[0023] In some embodiments, the disclosure provides for a bisulfite-converted nucleotide sequence comprising the bisulfite-converted nucleotide sequence of any one of the following: Up3, Up10, Up15-1, Up15-2, Up20-1, Up20-2, Up20-2, Up27, Up35-1, Up35-2, SqBE2, SqBE5, SqBE7, SqBE9, SqBE10, SqBE11-1, SqBE11-2, SqBE13, SqBE14-2, SqBE15, SqBE16-1, SqBE16-2, SqBE17-1, SqBE18, SqBE22-1, SqBE22-2 or SqBE23. In some embodiments, the bisulfite-converted nucleotide sequence of claim 98, wherein the sequence comprises the bisulfite-converted nucleotide sequence of any one of the following: Up3, Up10, Up15-1, Up15-2, Up20-1, Up20-2, Up20-2, Up27, Up35-1, or Up35-2. In some embodiments, the bisulfite-converted nucleotide sequence of claim 98, wherein the sequence comprises the bisulfite-converted nucleotide sequence of any one of the following: SqBE2, SqBE5, SqBE7, SqBE9, SqBE10, SqBE11-1, SqBE11-2, SqBE13, SqBE14-2, SqBE15, SqBE16-1, SqBE16-2, SqBE17-1, SqBE18, SqBE22-1, SqBE22-2 or SqBE23.

[0024] In some embodiments, the disclosure provides for a bisulfite-converted nucleotide sequence comprising a sequence having at least 80%, 85%, 90%, 91%, 92%, 93%, 94%, 95%, 96%, 97%, 98%, 99% or 100% identity to any of the following sequences: SEQ ID NOs: 8307-8313, 8315-8327, 8329-8334, 8349-8355, 8357-8369, 8371-8376, 8410, 8411, 8412, 8414, 8415, 8416, 8417, 8419, 8425, 8426, 8427, 8429, 8430, 8431, 8432, 8434, 12605-12616, 12623-12634, 12650-12655, or 12659-12664. In some embodiments, the sequence comprises a sequence having at least 80%, 85%, 90%, 91%, 92%, 93%, 94%, 95%, 96%, 97%, 98%, 99% or 100% identity to any of the following sequences: SEQ ID NOs: 8307-8313, 8315-8327, 8329-8334, 8349-8355, 8357-8369, 8371-8376, 8410, 8411, 8412, 8414, 8415, 8416, 8417, 8419, 8425, 8426, 8427, 8429, 8430, 8431, or 8432, 8434. In some embodiments, the sequence comprises a sequence having at least 80%, 85%, 90%, 91%, 92%, 93%, 94%, 95%, 96%, 97%, 98%, 99% or 100% identity to any of the following sequences: SEQ ID NOs: 12605-12616, 12623-12634, 12650-12655, or 12659-12664. In some embodiments, the sequence comprises a sequence having at least 80%, 85%, 90%, 91%, 92%, 93%, 94%, 95%, 96%, 97%, 98%, 99% or 100% identity to any of the following sequences: 12652, 12655, 12661, and 12664.

### BRIEF DESCRIPTION OF THE FIGURES

[0025] FIG. 1 shows the sensitivity (percentage of samples detected), the specificity (percentage of samples not detected), the total number of samples studied, and the total number of positive samples from the panel of markers studied in Example 3. Three panels of markers were selected for study.

### DETAILED DESCRIPTION OF THE INVENTION

### I. Definitions

[0026] For convenience, certain terms employed in the specification, examples, and appended claims are collected here. Unless defined otherwise, all technical and scientific terms used herein have the same meaning as commonly understood by one of ordinary skill in the art to which this invention belongs.

[0027] Although methods and materials similar or equivalent to those described herein can be used in the practice or testing of the present invention, suitable methods and materials are described below. The materials, methods and examples are illustrative only, and are not intended to be limiting. All publications, patents and other documents mentioned herein are incorporated by reference in their entirety.

[0028] Each embodiment of the invention described herein may be taken alone or in combination with one or more other embodiments of the invention.

[0029] Throughout this specification, the word “comprise” or variations such as “comprises” or “comprising” will be understood to imply the inclusion of a stated integer or groups of integers but not the exclusion of any other integer or group of integers.

[0030] The articles “a” and “an” are used herein to refer to one or to more than one (i.e., to at least one) of the grammatical object of the article. By way of example, “an element” means one element or more than one element.

[0031] The terms “adenoma” is used herein to describe any precancerous neoplasia or benign tumor of epithelial tissue, for example, a precancerous neoplasia of the gastrointestinal tract, pancreas, and/or the bladder.

[0032] The term “blood-derived fraction” herein refers to a component or components of whole blood. Whole blood comprises a liquid portion (i.e., plasma) and a solid portion (i.e., blood cells). The liquid and solid portions of blood are each comprised of multiple components; e.g., different proteins in plasma or different cell types in the solid portion. One of these components or a mixture of any of these components is a blood-derived fraction as long as such fraction is missing one or more components found in whole blood.

[0033] The term “esphophagus” is intended to encompass the upper portion of the digestive system spanning from the back of the oral cavity, passing downwards through the rear part of the mediastinum, through the diaphragm and into the stomach.

[0034] The term “esophageal cancer” is used herein to refer to any cancerous neoplasia of the esophagus.

[0035] “Barrett's esophagus” as used herein refers to an abnormal change (metaplasia) in the cells of the lower portion of the esophagus. Barrett's is characterized the finding of intestinal metaplasia in the esophagus.

[0036] A “brushing” of the esophagus, as referred to herein, may be obtained using any of the means known in the art. In some embodiments, a brushing is obtained by contacting the esophagus with a brush, a sponge, a balloon, or with any other device or substance that contacts the esophagus and obtains an esophageal sample.

[0037] “Cells,” “host cells” or “recombinant host cells” are terms used interchangeably herein. It is understood that such terms refer not only to the particular subject cell but to the progeny or potential progeny of such a cell. Because certain modifications may occur in succeeding generations due to either mutation or environmental influences, such progeny may not, in fact, be identical to the parent cell, but are still included within the scope of the term as used herein.

[0038] The terms “compound”, “test compound,” “agent”, and “molecule” are used herein interchangeably and are meant to include, but are not limited to, peptides, nucleic acids, carbohydrates, small organic molecules, natural product extract libraries, and any other molecules (including, but not limited to, chemicals, metals, and organometallic compounds).

[0039] The term “compound-converted DNA” herein refers to DNA that has been treated or reacted with a chemical compound that converts unmethylated C bases in DNA to a different nucleotide base. For example, one such compound is sodium bisulfite, which converts unmethylated C to U. If DNA that contains conversion-sensitive cytosine is treated with sodium bisulfite, the compound-converted DNA will contain U in place of C. If the DNA which is treated with sodium bisulfite contains only methylcytosine, the compound-converted DNA will not contain uracil in place of the methylcytosine.

[0040] The term “de-methylating agent” as used herein refers agents that restore activity and/or gene expression of target genes silenced by methylation upon treatment with the agent. Examples of such agents include without limitation 5-azacytidine and 5-aza-2′-deoxycytidine.

[0041] The term “detection” is used herein to refer to any process of observing a marker, or a change in a marker (such as for example the change in the methylation state of the marker), in a biological sample, whether or not the marker or the change in the marker is actually detected. In other words, the act of probing a sample for a marker or a change in the marker, is a “detection” even if the marker is determined to be not present or below the level of sensitivity. Detection may be a quantitative, semi-quantitative or non-quantitative observation.

[0042] The term “differentially methylated nucleotide sequence” refers to a region of a genomic loci that is found to be methylated in a in cancer tissues or cell lines, but not methylated in the normal tissues or cell lines.

[0043] The term “neoplasia” as used herein refers to an abnormal growth of tissue. As used herein, the term “neoplasia” may be used to refer to cancerous and non-cancerous tumors, as well as to Barrett's esophagus (which may also be referred to herein as a metaplasia) and Barrett's esophagus with dysplasia. In some embodiments, the Barrett's esophagus with dysplasia is Barrett's esophagus with high grade dysplasia. In some embodiments, the Barrett's esophagus with dysplasia is Barrett's esophagus with low grade dysplasia. In some embodiments, the neoplasia is a cancer (e.g., esophageal adenocarcinoma).

[0044] “Gastrointestinal neoplasia” refers to neoplasia of the upper and lower gastrointestinal tract. As commonly understood in the art, the upper gastrointestinal tract includes the esophagus, stomach, and duodenum; the lower gastrointestinal tract includes the remainder of the small intestine and all of the large intestine.

[0045] The terms “healthy”, “normal,” and “non-neoplastic” are used interchangeably herein to refer to a subject or particular cell or tissue that is devoid (at least to the limit of detection) of a disease condition, such as a neoplasia.

[0046] “Homology” or “identity” or “similarity” refers to sequence similarity between two peptides or between two nucleic acid molecules. Homology and identity can each be determined by comparing a position in each sequence which may be aligned for purposes of comparison. When an equivalent position in the compared sequences is occupied by the same base or amino acid, then the molecules are identical at that position; when the equivalent site occupied by the same or a similar amino acid residue (e.g., similar in steric and/or electronic nature), then the molecules can be referred to as homologous (similar) at that position. Expression as a percentage of homology/similarity or identity refers to a function of the number of identical or similar amino acids at positions shared by the compared sequences. A sequence which is “unrelated or “non-homologous” shares, in some embodiments, less than 40% identity, and in particular embodiments, less than 25% identity with a sequence of the present invention. In comparing two sequences, the absence of residues (amino acids or nucleic acids) or presence of extra residues also decreases the identity and homology/similarity.

[0047] The term “homology” describes a mathematically based comparison of sequence similarities which is used to identify genes or proteins with similar functions or motifs. The nucleic acid and protein sequences of the present invention may be used as a “query sequence” to perform a search against public databases to, for example, identify other family members, related sequences or homologs. Such searches can be performed using the NBLAST and XBLAST programs (version 2.0) of Altschul, et al. (1990) J Mol. Biol. 215:403-10. BLAST nucleotide searches can be performed with the NBLAST program, score=100, wordlength=12 to obtain nucleotide sequences homologous to nucleic acid molecules of the invention. BLAST protein searches can be performed with the XBLAST program, score=50, wordlength=3 to obtain amino acid sequences homologous to protein molecules of the invention. To obtain gapped alignments for comparison purposes, Gapped BLAST can be utilized as described in Altschul et al., (1997) Nucleic Acids Res. 25(17):3389-3402. When utilizing BLAST and Gapped BLAST programs, the default parameters of the respective programs (e.g., XBLAST and BLAST) can be used. See www.ncbi.nlm.nih.gov.

[0048] As used herein, “identity” means the percentage of identical nucleotide or amino acid residues at corresponding positions in two or more sequences when the sequences are aligned to maximize sequence matching, i.e., taking into account gaps and insertions. Identity can be readily calculated by known methods, including but not limited to those described in (Computational Molecular Biology, Lesk, A. M., ed., Oxford University Press, New York, 1988; Biocomputing: Informatics and Genome Projects, Smith, D. W., ed., Academic Press, New York, 1993; Computer Analysis of Sequence Data, Part I, Griffin, A. M., and Griffin, H. G., eds., Humana Press, New Jersey, 1994; Sequence Analysis in Molecular Biology, von Heinje, G., Academic Press, 1987; and Sequence Analysis Primer, Gribskov, M. and Devereux, J., eds., M Stockton Press, New York, 1991; and Carillo, H., and Lipman, D., SIAM J. Applied Math., 48: 1073, 1988). Methods to determine identity are designed to give the largest match between the sequences tested. Moreover, methods to determine identity are codified in publicly available computer programs. Computer program methods to determine identity between two sequences include, but are not limited to, the GCG program package (Devereux, J., et al., Nucleic Acids Research 12(1): 387 (1984)), BLASTP, BLASTN, and FASTA (Altschul, S. F. et al., J. Molec. Biol. 215: 403-410 (1990) and Altschul et al. Nuc. Acids Res. 25: 3389-3402 (1997)). The BLAST X program is publicly available from NCBI and other sources (BLAST Manual, Altschul, S., et al., NCBI NLM NIH Bethesda, Md. 20894; Altschul, S., et al., J. Mol. Biol. 215: 403-410 (1990)). The well known Smith Waterman algorithm may also be used to determine identity.

[0049] The term “including” is used herein to mean, and is used interchangeably with, the phrase “including but not limited to.”

[0050] The term “isolated” as used herein with respect to nucleic acids, such as DNA or RNA, refers to molecules in a form which does not occur in nature. Moreover, an “isolated nucleic acid” is meant to include nucleic acid fragments which are not naturally occurring as fragments and would not be found in the natural state.

[0051] The term “methylation-specific PCR” (“MSP”) herein refers to a polymerase chain reaction in which amplification of the compound-converted template sequence is performed. Two sets of primers are designed for use in MSP. Each set of primers comprises a forward primer and a reverse primer. One set of primers, called methylation-specific primers (see below), will amplify the compound-converted template sequence if C bases in CpG dinucleotides within the DNA are methylated. Another set of primers, called unmethylation-specific primers or primers for unmethylated sequences and the like (see below), will amplify the compound-converted template sequences if C bases in CpG dinucleotides within the DNA are not methylated.

[0052] As used herein, the term “nucleic acid” refers to polynucleotides such as deoxyribonucleic acid (DNA), and, where appropriate, ribonucleic acid (RNA). The term should also be understood to include, as equivalents, analogs of either RNA or DNA made from nucleotide analogs, and, as applicable to the embodiment being described, single-stranded (such as sense or antisense) and double-stranded polynucleotides.

[0053] “Operably linked” when describing the relationship between two DNA regions simply means that they are functionally related to each other. For example, a promoter or other transcriptional regulatory sequence is operably linked to a coding sequence if it controls the transcription of the coding sequence.

[0054] The term “or” is used herein to mean, and is used interchangeably with, the term “and/or”, unless context clearly indicates otherwise.

[0055] The terms “proteins” and “polypeptides” are used interchangeably herein.

[0056] A “sample” includes any material that is obtained or prepared for detection of a molecular marker or a change in a molecular marker such as for example the methylation state, or any material that is contacted with a detection reagent or detection device for the purpose of detecting a molecular marker or a change in the molecular marker.

[0057] As used herein, “obtaining a sample” includes directly retrieving a sample from a subject to be assayed, or directly retrieving a sample from a subject to be stored and assayed at a later time. Alternatively, a sample may be obtained via a second party. That is, a sample may be obtained via, e.g., shipment, from another individual who has retrieved the sample, or otherwise obtained the sample.

[0058] A “subject” is any organism of interest, generally a mammalian subject, such as a mouse, and in particular embodiments, a human subject.

[0059] As used herein, the term “specifically hybridizes” refers to the ability of a nucleic acid probe/primer of the invention to hybridize to at least 12, 15, 20, 25, 30, 35, 40, 45, 50 or 100 consecutive nucleotides of a target sequence, or a sequence complementary thereto, or naturally occurring mutants thereof, such that it has, in some embodiments, less than 15%, less than 10%, or less than 5% background hybridization to a cellular nucleic acid (e.g., mRNA or genomic DNA) other than the target gene. A variety of hybridization conditions may be used to detect specific hybridization, and the stringency is determined primarily by the wash stage of the hybridization assay. Generally high temperatures and low salt concentrations give high stringency, while low temperatures and high salt concentrations give low stringency. Low stringency hybridization is achieved by washing in, for example, about 2.0×SSC at 50° C., and high stringency is achieved with about 0.2×SSC at 50° C. Further descriptions of stringency are provided below.

[0060] As applied to polypeptides, the term “substantial sequence identity” means that two peptide sequences, when optimally aligned such as by the programs GAP or BESTFIT using default gap, share at least 90 percent sequence identity, in some embodiments, at least 95 percent sequence identity, or at least 99 percent sequence identity or more. In some embodiments, residue positions which are not identical differ by conservative amino acid substitutions. For example, the substitution of amino acids having similar chemical properties such as charge or polarity is not likely to affect the properties of a protein. Examples include glutamine for asparagine or glutamic acid for aspartic acid.

[0061] An “informative loci” as used herein, refers to any of the nucleic acid sequences disclosed herein that may have altered (e.g., increased) methylation in a sample (e.g., an esophageal tissue sample) from a subject having Barrett's esophagus and/or an esophageal neoplasia as compared to the methylation patterns of the corresponding nucleic acid sequence in a sample from a healthy control subject.

[0062] The term “Up3” as used herein refers to a nucleotide sequence comprising a sequence at least 80%, 85%, 90%, 91%, 92%, 93%, 94%, 95%, 96%, 97%, 98%, 99% or 100% identity to the sequence of SEQ ID NO: 12563, 12581, 12599, 12617, or fragments or reverse complements thereof. In some embodiments, the Up3 sequence refers to a bisulfite converted nucleotide sequence comprising a sequence at least 80%, 85%, 90%, 91%, 92%, 93%, 94%, 95%, 96%, 97%, 98%, 99% or 100% identity to the sequence of SEQ ID NO: 12569, 12587, 12605 or 12623, or fragments or reverse complements thereof. In some embodiments, the Up3 sequence refers to a bisulfite converted product of a methylated nucleotide sequence comprising a sequence at least 80%, 85%, 90%, 91%, 92%, 93%, 94%, 95%, 96%, 97%, 98%, 99% or 100% identity to the sequence of SEQ ID NO: 12575, 12593, 12611 or 12629, or fragments or reverse complements thereof. In some embodiments, the Up3 sequence may be amplified using primers comprising the sequence of SEQ ID NOs: 12635 and/or 12641, or fragments or reverse complements thereof.

[0063] The term “Up10” as used herein refers to a nucleotide sequence comprising a sequence at least 80%, 85%, 90%, 91%, 92%, 93%, 94%, 95%, 96%, 97%, 98%, 99% or 100% identity to the sequence of SEQ ID NO: 12564, 12582, 12600 or 12618, or fragments or reverse complements thereof. In some embodiments, the Up10 sequence refers to a bisulfite converted nucleotide sequence comprising a sequence at least 80%, 85%, 90%, 91%, 92%, 93%, 94%, 95%, 96%, 97%, 98%, 99% or 100% identity to the sequence of SEQ ID NO: 12570, 12588, 12606 or 12624, or fragments or reverse complements thereof. In some embodiments, the Up10 sequence refers to a bisulfite converted product of a methylated nucleotide sequence comprising a sequence at least 80%, 85%, 90%, 91%, 92%, 93%, 94%, 95%, 96%, 97%, 98%, 99% or 100% identity to the sequence of SEQ ID NO: 12576, 12594, 12612 or 12630, or fragments or reverse complements thereof. In some embodiments, the Up10 sequence may be amplified using primers comprising the sequence of SEQ ID NOs: 12636 and/or 12642, or fragments or reverse complements thereof.

[0064] The term “Up15-1” as used herein refers to a nucleotide sequence comprising a sequence at least 80%, 85%, 90%, 91%, 92%, 93%, 94%, 95%, 96%, 97%, 98%, 99% or 100% identity to the sequence of SEQ ID NO: 12565, 12583, 12601 or 12619, or fragments or reverse complements thereof. In some embodiments, the Up15-1 sequence refers to a bisulfite converted nucleotide sequence comprising a sequence at least 80%, 85%, 90%, 91%, 92%, 93%, 94%, 95%, 96%, 97%, 98%, 99% or 100% identity to the sequence of SEQ ID NO: 12571, 12589, 12607 or 12625, or fragments or reverse complements thereof. In some embodiments, the Up15-1 sequence refers to a bisulfite converted product of a methylated nucleotide sequence comprising a sequence at least 80%, 85%, 90%, 91%, 92%, 93%, 94%, 95%, 96%, 97%, 98%, 99% or 100% identity to the sequence of SEQ ID NO: 12577, 12595, 12613 or 12631, or fragments or reverse complements thereof. In some embodiments, the Up15-1 sequence may be amplified using primers comprising the sequence of SEQ ID NOs: 12637 and/or 12643, or fragments or reverse complements thereof.

[0065] The term “Up15-2” as used herein refers to a nucleotide sequence comprising a sequence at least 80%, 85%, 90%, 91%, 92%, 93%, 94%, 95%, 96%, 97%, 98%, 99% or 100% identity to the sequence of SEQ ID NO: 12565, 12583, 12647 or 12656, or fragments or reverse complements thereof. In some embodiments, the Up15-2 sequence refers to a bisulfite converted nucleotide sequence comprising a sequence at least 80%, 85%, 90%, 91%, 92%, 93%, 94%, 95%, 96%, 97%, 98%, 99% or 100% identity to the sequence of SEQ ID NO: 12571, 12589, 12650 or 12659, or fragments or reverse complements thereof. In some embodiments, the Up15-2 sequence refers to a bisulfite converted product of a methylated nucleotide sequence comprising a sequence at least 80%, 85%, 90%, 91%, 92%, 93%, 94%, 95%, 96%, 97%, 98%, 99% or 100% identity to the sequence of SEQ ID NO: 12577, 12595, 12653 or 12662, or fragments or reverse complements thereof. In some embodiments, the Up15-2 sequence may be amplified using primers comprising the sequence of SEQ ID NOs: 12665 and/or 12668, or fragments or reverse complements thereof.

[0066] The term “Up20-1” as used herein refers to a nucleotide sequence comprising a sequence at least 80%, 85%, 90%, 91%, 92%, 93%, 94%, 95%, 96%, 97%, 98%, 99% or 100% identity to the sequence of SEQ ID NO: 12566, 12584, 12602 or 12620, or fragments or reverse complements thereof. In some embodiments, the Up20-1 sequence refers to a bisulfite converted nucleotide sequence comprising a sequence at least 80%, 85%, 90%, 91%, 92%, 93%, 94%, 95%, 96%, 97%, 98%, 99% or 100% identity to the sequence of SEQ ID NO: 12572, 12590, 12608 or 12626, or fragments or reverse complements thereof. In some embodiments, the Up20-1 sequence refers to a bisulfite converted product of a methylated nucleotide sequence comprising a sequence at least 80%, 85%, 90%, 91%, 92%, 93%, 94%, 95%, 96%, 97%, 98%, 99% or 100% identity to the sequence of SEQ ID NO: 12578, 12596, 12614 or 12632, or fragments or reverse complements thereof. In some embodiments, the Up20-1 sequence may be amplified using primers comprising the sequence of SEQ ID NOs: 12638 and/or 12644, or fragments or reverse complements thereof.

[0067] The term “Up20-2” as used herein refers to a nucleotide sequence comprising a sequence at least 80%, 85%, 90%, 91%, 92%, 93%, 94%, 95%, 96%, 97%, 98%, 99% or 100% identity to the sequence of SEQ ID NO: 12566, 12584, 12648 or 12657, or fragments or reverse complements thereof. In some embodiments, the Up20-2 sequence refers to a bisulfite converted nucleotide sequence comprising a sequence at least 80%, 85%, 90%, 91%, 92%, 93%, 94%, 95%, 96%, 97%, 98%, 99% or 100% identity to the sequence of SEQ ID NO: 12572, 12590, 12651 or 12660, or fragments or reverse complements thereof. In some embodiments, the Up20-2 sequence refers to a bisulfite converted product of a methylated nucleotide sequence comprising a sequence at least 80%, 85%, 90%, 91%, 92%, 93%, 94%, 95%, 96%, 97%, 98%, 99% or 100% identity to the sequence of SEQ ID NO: 12578, 12596, 12654 or 12663, or fragments or reverse complements thereof. In some embodiments, the Up20-2 sequence may be amplified using primers comprising the sequence of SEQ ID NOs: 12666 and/or 12669, or fragments or reverse complements thereof.

[0068] The term “Up27” as used herein refers to a nucleotide sequence comprising a sequence at least 80%, 85%, 90%, 91%, 92%, 93%, 94%, 95%, 96%, 97%, 98%, 99% or 100% identity to the sequence of SEQ ID NO: 12567, 12585, 12603 or 12621, or fragments or reverse complements thereof. In some embodiments, the Up27 sequence refers to a bisulfite converted nucleotide sequence comprising a sequence at least 80%, 85%, 90%, 91%, 92%, 93%, 94%, 95%, 96%, 97%, 98%, 99% or 100% identity to the sequence of SEQ ID NO: 12573, 12591, 12609 or 12627, or fragments or reverse complements thereof. In some embodiments, the Up27 sequence refers to a bisulfite converted product of a methylated nucleotide sequence comprising a sequence at least 80%, 85%, 90%, 91%, 92%, 93%, 94%, 95%, 96%, 97%, 98%, 99% or 100% identity to the sequence of SEQ ID NO: 12579, 12597, 12615 or 12633, or fragments or reverse complements thereof. In some embodiments, the Up27 sequence may be amplified using primers comprising the sequence of SEQ ID NOs: 12639 and/or 12645, or fragments or reverse complements thereof.

[0069] The term “Up35-1” as used herein refers to a nucleotide sequence comprising a sequence at least 80%, 85%, 90%, 91%, 92%, 93%, 94%, 95%, 96%, 97%, 98%, 99% or 100% identity to the sequence of SEQ ID NO: 12568, 12586, 12604 or 12622, or fragments or reverse complements thereof. In some embodiments, the Up35-1 sequence refers to a bisulfite converted nucleotide sequence comprising a sequence at least 80%, 85%, 90%, 91%, 92%, 93%, 94%, 95%, 96%, 97%, 98%, 99% or 100% identity to the sequence of SEQ ID NO: 12574, 12592, 12610 or 12628, or fragments or reverse complements thereof. In some embodiments, the Up35-1 sequence refers to a bisulfite converted product of a methylated nucleotide sequence comprising a sequence at least 80%, 85%, 90%, 91%, 92%, 93%, 94%, 95%, 96%, 97%, 98%, 99% or 100% identity to the sequence of SEQ ID NO: 12580, 12598, 12616 or 12634, or fragments or reverse complements thereof. In some embodiments, the Up35-1 sequence may be amplified using primers comprising the sequence of SEQ ID NOs: 12640 and/or 12646, or fragments or reverse complements thereof.

[0070] The term “Up35-2” as used herein refers to a nucleotide sequence comprising a sequence at least 80%, 85%, 90%, 91%, 92%, 93%, 94%, 95%, 96%, 97%, 98%, 99% or 100% identity to the sequence of SEQ ID NO: 12568, 12586, 12649 or 12658, or fragments or reverse complements thereof. In some embodiments, the Up35-2 sequence refers to a bisulfite converted nucleotide sequence comprising a sequence at least 80%, 85%, 90%, 91%, 92%, 93%, 94%, 95%, 96%, 97%, 98%, 99% or 100% identity to the sequence of SEQ ID NO: 12574, 12592, 12652 or 12661, or fragments or reverse complements thereof. In some embodiments, the Up35-2 sequence refers to a bisulfite converted product of a methylated nucleotide sequence comprising a sequence at least 80%, 85%, 90%, 91%, 92%, 93%, 94%, 95%, 96%, 97%, 98%, 99% or 100% identity to the sequence of SEQ ID NO: 12580, 12598, 12655 or 12664, or fragments or reverse complements thereof. In some embodiments, the Up35-2 sequence may be amplified using primers comprising the sequence of SEQ ID NOs: 12667 and/or 12670, or fragments or reverse complements thereof.

[0071] The term “SqBE 2” as used herein refers to a nucleotide sequence comprising a sequence at least 80%, 85%, 90%, 91%, 92%, 93%, 94%, 95%, 96%, 97%, 98%, 99% or 100% identity to the sequence of SEQ ID NO: 8209, 8251, 8293 or 8335, or fragments or reverse complements thereof. In some embodiments, the SqBE 2 sequence refers to a bisulfite converted nucleotide sequence comprising a sequence at least 80%, 85%, 90%, 91%, 92%, 93%, 94%, 95%, 96%, 97%, 98%, 99% or 100% identity to the sequence of SEQ ID NO: 8223, 8265, 8307 or 8349, or fragments or reverse complements thereof. In some embodiments, the SqBE 2 sequence refers to a bisulfite converted product of a methylated nucleotide sequence comprising a sequence at least 80%, 85%, 90%, 91%, 92%, 93%, 94%, 95%, 96%, 97%, 98%, 99% or 100% identity to the sequence of SEQ ID NO: 8237, 8279, 8321 or 8363, or fragments or reverse complements thereof. In some embodiments, the SqBE 2 sequence may be amplified using primers comprising the sequence of SEQ ID NOs: 8377 and/or 8391, or fragments or reverse complements thereof.

[0072] The term “SqBE 5” as used herein refers to a nucleotide sequence comprising a sequence at least 80%, 85%, 90%, 91%, 92%, 93%, 94%, 95%, 96%, 97%, 98%, 99% or 100% identity to the sequence of SEQ ID NO: 8210, 8252, 8294 or 8336, or fragments or reverse complements thereof. In some embodiments, the SqBE 5 sequence refers to a bisulfite converted nucleotide sequence comprising a sequence at least 80%, 85%, 90%, 91%, 92%, 93%, 94%, 95%, 96%, 97%, 98%, 99% or 100% identity to the sequence of SEQ ID NO: 8224, 8266, 8308 or 8350, or fragments or reverse complements thereof. In some embodiments, the SqBE 5 sequence refers to a bisulfite converted product of a methylated nucleotide sequence comprising a sequence at least 80%, 85%, 90%, 91%, 92%, 93%, 94%, 95%, 96%, 97%, 98%, 99% or 100% identity to the sequence of SEQ ID NO: 8238, 8280, 8322 or 8364, or fragments or reverse complements thereof. In some embodiments, the SqBE 5 sequence may be amplified using primers comprising the sequence of SEQ ID NOs: 8378 and/or 8392, or fragments or reverse complements thereof.

[0073] The term “SqBE 7” as used herein refers to a nucleotide sequence comprising a sequence at least 80%, 85%, 90%, 91%, 92%, 93%, 94%, 95%, 96%, 97%, 98%, 99% or 100% identity to the sequence of SEQ ID NO: 8211, 8253, 8295 or 8337, or fragments or reverse complements thereof. In some embodiments, the SqBE 7 sequence refers to a bisulfite converted nucleotide sequence comprising a sequence at least 80%, 85%, 90%, 91%, 92%, 93%, 94%, 95%, 96%, 97%, 98%, 99% or 100% identity to the sequence of SEQ ID NO: 8225, 8267, 8309 or 8351, or fragments or reverse complements thereof. In some embodiments, the SqBE 7 sequence refers to a bisulfite converted product of a methylated nucleotide sequence comprising a sequence at least 80%, 85%, 90%, 91%, 92%, 93%, 94%, 95%, 96%, 97%, 98%, 99% or 100% identity to the sequence of SEQ ID NO: 8239, 8281, 8323 or 8365, or fragments or reverse complements thereof. In some embodiments, the SqBE 7 sequence may be amplified using primers comprising the sequence of SEQ ID NOs: 8379 and/or 8393, or fragments or reverse complements thereof.

[0074] The term “SqBE 9” as used herein refers to a nucleotide sequence comprising a sequence at least 80%, 85%, 90%, 91%, 92%, 93%, 94%, 95%, 96%, 97%, 98%, 99% or 100% identity to the sequence of SEQ ID NO: 8212, 8254, 8296 or 8338, or fragments or reverse complements thereof. In some embodiments, the SqBE 9 sequence refers to a bisulfite converted nucleotide sequence comprising a sequence at least 80%, 85%, 90%, 91%, 92%, 93%, 94%, 95%, 96%, 97%, 98%, 99% or 100% identity to the sequence of SEQ ID NO: 8226, 8268, 8310 or 8352, or fragments or reverse complements thereof. In some embodiments, the SqBE 9 sequence refers to a bisulfite converted product of a methylated nucleotide sequence comprising a sequence at least 80%, 85%, 90%, 91%, 92%, 93%, 94%, 95%, 96%, 97%, 98%, 99% or 100% identity to the sequence of SEQ ID NO: 8240, 8282, 8324 or 8366, or fragments or reverse complements thereof. In some embodiments, the SqBE 9 sequence may be amplified using primers comprising the sequence of SEQ ID NOs: 8380 and/or 8394, or fragments or reverse complements thereof.

[0075] The term “SqBE 10” as used herein refers to a nucleotide sequence comprising a sequence at least 80%, 85%, 90%, 91%, 92%, 93%, 94%, 95%, 96%, 97%, 98%, 99% or 100% identity to the sequence of SEQ ID NO: 8213, 8255, 8297 or 8339, or fragments or reverse complements thereof. In some embodiments, the SqBE 10 sequence refers to a bisulfite converted nucleotide sequence comprising a sequence at least 80%, 85%, 90%, 91%, 92%, 93%, 94%, 95%, 96%, 97%, 98%, 99% or 100% identity to the sequence of SEQ ID NO: 8227, 8269, 8311 or 8353, or fragments or reverse complements thereof. In some embodiments, the SqBE 10 sequence refers to a bisulfite converted product of a methylated nucleotide sequence comprising a sequence at least 80%, 85%, 90%, 91%, 92%, 93%, 94%, 95%, 96%, 97%, 98%, 99% or 100% identity to the sequence of SEQ ID NO: 8241, 8283, 8325 or 8367, or fragments or reverse complements thereof. In some embodiments, the SqBE 10 sequence may be amplified using primers comprising the sequence of SEQ ID NOs: 8381 and/or 8395, or fragments or reverse complements thereof.

[0076] The term “SqBE 11-1” as used herein refers to a nucleotide sequence comprising a sequence at least 80%, 85%, 90%, 91%, 92%, 93%, 94%, 95%, 96%, 97%, 98%, 99% or 100% identity to the sequence of SEQ ID NO: 8214, 8256, 8298 or 8340, or fragments or reverse complements thereof. In some embodiments, the SqBE 11-1 sequence refers to a bisulfite converted nucleotide sequence comprising a sequence at least 80%, 85%, 90%, 91%, 92%, 93%, 94%, 95%, 96%, 97%, 98%, 99% or 100% identity to the sequence of SEQ ID NO: 8228, 8270, 8312 or 8354, or fragments or reverse complements thereof. In some embodiments, the SqBE 11-1 sequence refers to a bisulfite converted product of a methylated nucleotide sequence comprising a sequence at least 80%, 85%, 90%, 91%, 92%, 93%, 94%, 95%, 96%, 97%, 98%, 99% or 100% identity to the sequence of SEQ ID NO: 8242, 8284, 8326 or 8368, or fragments or reverse complements thereof. In some embodiments, the SqBE 11-1 sequence may be amplified using primers comprising the sequence of SEQ ID NOs: 8382 and/or 8396, or fragments or reverse complements thereof.

[0077] The term “SqBE 11-2” as used herein refers to a nucleotide sequence comprising a sequence at least 80%, 85%, 90%, 91%, 92%, 93%, 94%, 95%, 96%, 97%, 98%, 99% or 100% identity to the sequence of SEQ ID NO: 8214, 8256, 8405 or 8420, or fragments or reverse complements thereof. In some embodiments, the SqBE 11-2 sequence refers to a bisulfite converted nucleotide sequence comprising a sequence at least 80%, 85%, 90%, 91%, 92%, 93%, 94%, 95%, 96%, 97%, 98%, 99% or 100% identity to the sequence of SEQ ID NO: 8228, 8270, 8410 or 8425, or fragments or reverse complements thereof. In some embodiments, the SqBE 11-2 sequence refers to a bisulfite converted product of a methylated nucleotide sequence comprising a sequence at least 80%, 85%, 90%, 91%, 92%, 93%, 94%, 95%, 96%, 97%, 98%, 99% or 100% identity to the sequence of SEQ ID NO: 8242, 8284, 8415 or 8430, or fragments or reverse complements thereof. In some embodiments, the SqBE 11-2 sequence may be amplified using primers comprising the sequence of SEQ ID NOs: 8435 and/or 8440, or fragments or reverse complements thereof.

[0078] The term “SqBE 13” as used herein refers to a nucleotide sequence comprising a sequence at least 80%, 85%, 90%, 91%, 92%, 93%, 94%, 95%, 96%, 97%, 98%, 99% or 100% identity to the sequence of SEQ ID NO: 8215, 8257, 8299 or 8341, or fragments or reverse complements thereof. In some embodiments, the SqBE 13 sequence refers to a bisulfite converted nucleotide sequence comprising a sequence at least 80%, 85%, 90%, 91%, 92%, 93%, 94%, 95%, 96%, 97%, 98%, 99% or 100% identity to the sequence of SEQ ID NO: 8229, 8271, 8313 or 8355, or fragments or reverse complements thereof. In some embodiments, the SqBE 13 sequence refers to a bisulfite converted product of a methylated nucleotide sequence comprising a sequence at least 80%, 85%, 90%, 91%, 92%, 93%, 94%, 95%, 96%, 97%, 98%, 99% or 100% identity to the sequence of SEQ ID NO: 8243, 8285, 8327 or 8369, or fragments or reverse complements thereof. In some embodiments, the SqBE 13 sequence may be amplified using primers comprising the sequence of SEQ ID NOs: 8383 and/or 8397, or fragments or reverse complements thereof.

[0079] The term “SqBE 14-2” as used herein refers to a nucleotide sequence comprising a sequence at least 80%, 85%, 90%, 91%, 92%, 93%, 94%, 95%, 96%, 97%, 98%, 99% or 100% identity to the sequence of SEQ ID NO: 8216, 8258, 8406 or 8421, or fragments or reverse complements thereof. In some embodiments, the SqBE 14-2 sequence refers to a bisulfite converted nucleotide sequence comprising a sequence at least 80%, 85%, 90%, 91%, 92%, 93%, 94%, 95%, 96%, 97%, 98%, 99% or 100% identity to the sequence of SEQ ID NO: 8230, 8272, 8411 or 8426, or fragments or reverse complements thereof. In some embodiments, the SqBE 14-2 sequence refers to a bisulfite converted product of a methylated nucleotide sequence comprising a sequence at least 80%, 85%, 90%, 91%, 92%, 93%, 94%, 95%, 96%, 97%, 98%, 99% or 100% identity to the sequence of SEQ ID NO: 8244, 8286, 8416 or 8431, or fragments or reverse complements thereof. In some embodiments, the SqBE 14-2 sequence may be amplified using primers comprising the sequence of SEQ ID NOs: 8436 and/or 8441, or fragments or reverse complements thereof.

[0080] The term “SqBE 15” as used herein refers to a nucleotide sequence comprising a sequence at least 80%, 85%, 90%, 91%, 92%, 93%, 94%, 95%, 96%, 97%, 98%, 99% or 100% identity to the sequence of SEQ ID NO: 8217, 8259, 8301 or 8343, or fragments or reverse complements thereof. In some embodiments, the SqBE 15 sequence refers to a bisulfite converted nucleotide sequence comprising a sequence at least 80%, 85%, 90%, 91%, 92%, 93%, 94%, 95%, 96%, 97%, 98%, 99% or 100% identity to the sequence of SEQ ID NO: 8231, 8273, 8315 or 8357, or fragments or reverse complements thereof. In some embodiments, the SqBE 15 sequence refers to a bisulfite converted product of a methylated nucleotide sequence comprising a sequence at least 80%, 85%, 90%, 91%, 92%, 93%, 94%, 95%, 96%, 97%, 98%, 99% or 100% identity to the sequence of SEQ ID NO: 8245, 8287, 8329 or 8371, or fragments or reverse complements thereof. In some embodiments, the SqBE 15 sequence may be amplified using primers comprising the sequence of SEQ ID NOs: 8385 and/or 8399, or fragments or reverse complements thereof.

[0081] The term “SqBE 16-1” as used herein refers to a nucleotide sequence comprising a sequence at least 80%, 85%, 90%, 91%, 92%, 93%, 94%, 95%, 96%, 97%, 98%, 99% or 100% identity to the sequence of SEQ ID NO: 8218, 8260, 8302 or 8344, or fragments or reverse complements thereof. In some embodiments, the SqBE 16-1 sequence refers to a bisulfite converted nucleotide sequence comprising a sequence at least 80%, 85%, 90%, 91%, 92%, 93%, 94%, 95%, 96%, 97%, 98%, 99% or 100% identity to the sequence of SEQ ID NO: 8232, 8274, 8316 or 8358, or fragments or reverse complements thereof. In some embodiments, the SqBE 16-1 sequence refers to a bisulfite converted product of a methylated nucleotide sequence comprising a sequence at least 80%, 85%, 90%, 91%, 92%, 93%, 94%, 95%, 96%, 97%, 98%, 99% or 100% identity to the sequence of SEQ ID NO: 8246, 8288, 8330 or 8372, or fragments or reverse complements thereof. In some embodiments, the SqBE 16-1 sequence may be amplified using primers comprising the sequence of SEQ ID NOs: 8386 and/or 8400, or fragments or reverse complements thereof.

[0082] The term “SqBE 16-2” as used herein refers to a nucleotide sequence comprising a sequence at least 80%, 85%, 90%, 91%, 92%, 93%, 94%, 95%, 96%, 97%, 98%, 99% or 100% identity to the sequence of SEQ ID NO: 8218, 8260, 8407 or 8422, or fragments or reverse complements thereof. In some embodiments, the SqBE 16-2 sequence refers to a bisulfite converted nucleotide sequence comprising a sequence at least 80%, 85%, 90%, 91%, 92%, 93%, 94%, 95%, 96%, 97%, 98%, 99% or 100% identity to the sequence of SEQ ID NO: 8232, 8274, 8412 or 8427, or fragments or reverse complements thereof. In some embodiments, the SqBE 16-2 sequence refers to a bisulfite converted product of a methylated nucleotide sequence comprising a sequence at least 80%, 85%, 90%, 91%, 92%, 93%, 94%, 95%, 96%, 97%, 98%, 99% or 100% identity to the sequence of SEQ ID NO: 8246, 8288, 8417 or 8432, or fragments or reverse complements thereof. In some embodiments, the SqBE 16-2 sequence may be amplified using primers comprising the sequence of SEQ ID NOs: 8437 and/or 8442, or fragments or reverse complements thereof.

[0083] The term “SqBE 17-1” as used herein refers to a nucleotide sequence comprising a sequence at least 80%, 85%, 90%, 91%, 92%, 93%, 94%, 95%, 96%, 97%, 98%, 99% or 100% identity to the sequence of SEQ ID NO: 8219, 8261, 8303 or 8345, or fragments or reverse complements thereof. In some embodiments, the SqBE 17-1 sequence refers to a bisulfite converted nucleotide sequence comprising a sequence at least 80%, 85%, 90%, 91%, 92%, 93%, 94%, 95%, 96%, 97%, 98%, 99% or 100% identity to the sequence of SEQ ID NO: 8233, 8275, 8317 or 8359, or fragments or reverse complements thereof. In some embodiments, the SqBE 17-1 sequence refers to a bisulfite converted product of a methylated nucleotide sequence comprising a sequence at least 80%, 85%, 90%, 91%, 92%, 93%, 94%, 95%, 96%, 97%, 98%, 99% or 100% identity to the sequence of SEQ ID NO: 8247, 8289, 8331 or 8373, or fragments or reverse complements thereof. In some embodiments, the SqBE 17-1 sequence may be amplified using primers comprising the sequence of SEQ ID NOs: 8387 and/or 8401, or fragments or reverse complements thereof.

[0084] The term “SqBE18” as used herein refers to a nucleotide sequence comprising a sequence at least 80%, 85%, 90%, 91%, 92%, 93%, 94%, 95%, 96%, 97%, 98%, 99% or 100% identity to the sequence of SEQ ID NO: 8220, 8262, 8304 or 8346, or fragments or reverse complements thereof. In some embodiments, the SqBE18 sequence refers to a bisulfite converted nucleotide sequence comprising a sequence at least 80%, 85%, 90%, 91%, 92%, 93%, 94%, 95%, 96%, 97%, 98%, 99% or 100% identity to the sequence of SEQ ID NO: 8234, 8276, 8318 or 8360, or fragments or reverse complements thereof. In some embodiments, the SqBE18sequence refers to a bisulfite converted product of a methylated nucleotide sequence comprising a sequence at least 80%, 85%, 90%, 91%, 92%, 93%, 94%, 95%, 96%, 97%, 98%, 99% or 100% identity to the sequence of SEQ ID NO: 8248, 8290, 8332 or 8374, or fragments or reverse complements thereof. In some embodiments, the SqBE18 sequence may be amplified using primers comprising the sequence of SEQ ID NOs: 8388 and/or 8402, or fragments or reverse complements thereof.

[0085] The term “SqBE 22-1” as used herein refers to a nucleotide sequence comprising a sequence at least 80%, 85%, 90%, 91%, 92%, 93%, 94%, 95%, 96%, 97%, 98%, 99% or 100% identity to the sequence of SEQ ID NO: 8221, 8263, 8305 or 8347, or fragments or reverse complements thereof. In some embodiments, the SqBE 22-1 sequence refers to a bisulfite converted nucleotide sequence comprising a sequence at least 80%, 85%, 90%, 91%, 92%, 93%, 94%, 95%, 96%, 97%, 98%, 99% or 100% identity to the sequence of SEQ ID NO: 8235, 8277, 8319 or 8361, or fragments or reverse complements thereof. In some embodiments, the SqBE 22-1 sequence refers to a bisulfite converted product of a methylated nucleotide sequence comprising a sequence at least 80%, 85%, 90%, 91%, 92%, 93%, 94%, 95%, 96%, 97%, 98%, 99% or 100% identity to the sequence of SEQ ID NO: 8249, 8291, 8333 or 8375, or fragments or reverse complements thereof. In some embodiments, the SqBE 22-1 sequence may be amplified using primers comprising the sequence of SEQ ID NOs: 8389 and/or 8403, or fragments or reverse complements thereof.

[0086] The term “SqBE 22-2” as used herein refers to a nucleotide sequence comprising a sequence at least 80%, 85%, 90%, 91%, 92%, 93%, 94%, 95%, 96%, 97%, 98%, 99% or 100% identity to the sequence of SEQ ID NO: 8221, 8263, 8409 or 8424, or fragments or reverse complements thereof. In some embodiments, the SqBE 22-2 sequence refers to a bisulfite converted nucleotide sequence comprising a sequence at least 80%, 85%, 90%, 91%, 92%, 93%, 94%, 95%, 96%, 97%, 98%, 99% or 100% identity to the sequence of SEQ ID NO: 8235, 8277, 8414 or 8429, or fragments or reverse complements thereof. In some embodiments, the SqBE 22-2 sequence refers to a bisulfite converted product of a methylated nucleotide sequence comprising a sequence at least 80%, 85%, 90%, 91%, 92%, 93%, 94%, 95%, 96%, 97%, 98%, 99% or 100% identity to the sequence of SEQ ID NO: 8249, 8291, 8419 or 8434, or fragments or reverse complements thereof. In some embodiments, the SqBE 22-2 sequence may be amplified using primers comprising the sequence of SEQ ID NOs: 8439 and/or 8444, or fragments or reverse complements thereof.

[0087] The term “SqBE 23” as used herein refers to a nucleotide sequence comprising a sequence at least 80%, 85%, 90%, 91%, 92%, 93%, 94%, 95%, 96%, 97%, 98%, 99% or 100% identity to the sequence of SEQ ID NO: 8222, 8264, 8306 or 8348, or fragments or reverse complements thereof. In some embodiments, the SqBE 23 sequence refers to a bisulfite converted nucleotide sequence comprising a sequence at least 80%, 85%, 90%, 91%, 92%, 93%, 94%, 95%, 96%, 97%, 98%, 99% or 100% identity to the sequence of SEQ ID NO: 8236, 8278, 8320 or 8362, or fragments or reverse complements thereof. In some embodiments, the SqBE 23 sequence refers to a bisulfite converted product of a methylated nucleotide sequence comprising a sequence at least 80%, 85%, 90%, 91%, 92%, 93%, 94%, 95%, 96%, 97%, 98%, 99% or 100% identity to the sequence of SEQ ID NO: 8250, 8292, 8334 or 8376, or fragments or reverse complements thereof. In some embodiments, the SqBE 23 sequence may be amplified using primers comprising the sequence of SEQ ID NOs: 8390 and/or 8404, or fragments or reverse complements thereof.

[0088] In some instances, any of the nucleotide sequences disclosed herein contain one or more “Y” positions. Cytosine residues that may be methylated or unmethylated, and hence may be bisulfite converted to T (if unmethylated) or remain as a C (if methylated), are designated with a “Y.” In some embodiments, a parental nucleotide sequence is fully unmethylated if the sequence comprises a T at every Y position following bisulfite conversion. In some embodiments, a parental nucleotide sequence is fully methylated if the sequence comprises a C at every Y position following bisulfite conversion. In some embodiments, a parental nucleotide sequence is partially methylated if the sequence comprises at least one C at a Y position and at least one T at a Y position of the sequence following bisulfite conversion. In some embodiments, the bisulfite converted sequences disclosed herein comprise at least one C at a Y position and at least one T at a Y position, i.e., the parental sequence is partially methylated.

### II. Overview

[0089] This disclosure is based at least in part on the recognition that differential methylation of particular genomic loci may be indicative of neoplasia of the upper gastrointestinal tract, e.g., esophagus. The present findings demonstrate that methylation at these genomic loci may be a useful biomarker of neoplasia in the upper gastrointestinal tract. The present findings further demonstrate that the status of methylation at these genomic loci used in combination with the status of somatic mutation(s) in TP53 may be a highly sensitive and specific biomarker of neoplasia in the upper gastrointestinal tract.

[0090] In general, neoplasias may develop through one of at least three different pathways, termed chromosomal instability, microsatellite instability, and the CpG island methylator phenotype (CIMP). Although there is some overlap, these pathways tend to present somewhat different biological behavior. By understanding the pathway of tumor development, the target genes involved, and the mechanisms underlying the genetic instability, it is possible to implement strategies to detect and treat the different types of neoplasias.

[0091] This disclosure is based, at least in part, on the recognition that certain target genes may be silenced or inactivated by the differential methylation of CpG islands in the 5′ flanking or promoter regions of the target gene. CpG islands are clusters of cytosine-guanosine residues in a DNA sequence, which are prominently represented in the 5-flanking region or promoter region of about half the genes in our genome. In particular, this application is based at least in part on the recognition that differential methylation of particular genomic loci may be indicative of neoplasia of the upper gastrointestinal tract including, but not limited to, esophageal neoplasia.

[0092] Additionally, this disclosure is based, at least in part, on the recognition that somatic mutations in TP53 (e.g., any of the somatic TP53 mutations disclosed herein), in combination with methylation of certain informative loci as disclosed herein, may serve as useful indicators of neoplasia, including esophageal neoplasia (e.g., esophageal adenocarcinoma). In certain embodiments, the TP53 somatic mutation is any of the TP53 mutations disclosed herein. In certain embodiments, the TP53 somatic mutation is any nonsynonymous somatic mutation known in the art. In certain embodiments, the TP53 somatic mutation is any one or more mutation at any one or more amino acid residue corresponding to amino acid residue 72, 105, 108, 110, 113, 124, 127, 132, 144, 152, 163, 175, 183, 194,213,214,218,232,234,248, 265, 273, 278, 306, 337, 347, or 639 of SEQ ID NO: 16205. In certain embodiments, the TP53 somatic mutation is any one or more mutation selected from the group consisting of: Leu194Arg, Gly105Asp, Arg273His, Tyr163His, Ile232Thr, Arg213Ter, Arg273His, Arg248Gln, Arg175His, Arg110delinsGlnSer, Ser183Ter, Arg248Gln, Arg337Leu, Lys132Arg, Leu265ThrfsTer7, Arg306Ter, Cys124TrpfsTer25, Pro72Arg, Val218Glu, His214Leu, Gln144Ter, Phe113Ser, Tyr234His, Ser127Phe, Pro278Ala, Ala347Thr, and Pro152Leu of SEQ ID NO: 16205. In certain embodiments, the TP53 mutation is any one or more mutation at any one or more nucleotide position corresponding to nucleotide position 108, 215, 314, 338, 380, 395, 430, 455, 487, 524, 548, 581, 637, 639, 641, 653, 695, 700, 743, 818, 832, 916, 1010, or 1039 of SEQ ID NO: 16206.

[0093] The sequence of SEQ ID NO: 16205 (corresponding to GenBank Accession No. NP_000537.3) is as follows:

MEEPQSDPSVEPPLSQETFSDLWKLLPENNVLSPLPSQAMDDLMLSPDD
IEQWFTEDPGPDEAPRMPEAAPPVAPAPAAPTPAAPAPAPSWPLSSSVP
SQKTYQGSYGFRLGFLHSGTAKSVTCTYSPALNKMFCQLAKTCPVQLWV
DSTPPPGTRVRAMAIYKQSQHMTEVVRRCPHHERCSDSDGLAPPQHLIR
VEGNLRVEYLDDRNTFRHSVVVPYEPPEVGSDCTTIHYNYMCNSSCMGG
MNRRPILTIITLEDSSGNLLGRNSFEVRVCACPGRDRRTEEENLRKKGE
PHHELPPGSTKRALPNNTSSSPQPKKKPLDGEYFTLQIRGRERFEMFRE
LNEALELKDAQAGKEPGGSRAHSSHLKSKKGQSTSRHKKLMFKTEGPDS
D

[0094] The sequence of SEQ ID NO: 16206 (corresponding to GenBank Accession No. NM_000546.5) is as follows:

GATGGGATTGGGGTTTTCCCCTCCCATGTGCTCAAGACTGGCGCTAAAA
GTTTTGAGCTTCTCAAAAGTCTAGAGCCACCGTCCAGGGAGCAGGTAGC
TGCTGGGCTCCGGGGACACTTTGCGTTCGGGCTGGGAGCGTGCTTTCCA
CGACGGTGACACGCTTCCCTGGATTGGCAGCCAGACTGCCTTCCGGGTC
ACTGCCATGGAGGAGCCGCAGTCAGATCCTAGCGTCGAGCCCCCTCTGA
GTCAGGAAACATTTTCAGACCTATGGAAACTACTTCCTGAAAACAACGT
TCTGTCCCCCTTGCCGTCCCAAGCAATGGATGATTTGATGCTGTCCCCG
GACGATATTGAACAATGGTTCACTGAAGACCCAGGTCCAGATGAAGCTC
CCAGAATGCCAGAGGCTGCTCCCCCCGTGGCCCCTGCACCAGCAGCTCC
TACACCGGCGGCCCCTGCACCAGCCCCCTCCTGGCCCCTGTCATCTTCT
GTCCCTTCCCAGAAAACCTACCAGGGCAGCTACGGTTTCCGTCTGGGCT
TCTTGCATTCTGGGACAGCCAAGTCTGTGACTTGCACGTACTCCCCTGC
CCTCAACAAGATGTTTTGCCAACTGGCCAAGACCTGCCCTGTGCAGCTG
TGGGTTGATTCCACACCCCCGCCCGGCACCCGCGTCCGCGCCATGGCCA
TCTACAAGCAGTCACAGCACATGACGGAGGTTGTGAGGCGCTGCCCCCA
CCATGAGCGCTGCTCAGATAGCGATGGTCTGGCCCCTCCTCAGCATCTT
ATCCGAGTGGAAGGAAATTTGCGTGTGGAGTATTTGGATGACAGAAACA
CTTTTCGACATAGTGTGGTGGTGCCCTATGAGCCGCCTGAGGTTGGCTC
TGACTGTACCACCATCCACTACAACTACATGTGTAACAGTTCCTGCATG
GGCGGCATGAACCGGAGGCCCATCCTCACCATCATCACACTGGAAGACT
CCAGTGGTAATCTACTGGGACGGAACAGCTTTGAGGTGCGTGTTTGTGC
CTGTCCTGGGAGAGACCGGCGCACAGAGGAAGAGAATCTCCGCAAGAAA
GGGGAGCCTCACCACGAGCTGCCCCCAGGGAGCACTAAGCGAGCACTGC
CCAACAACACCAGCTCCTCTCCCCAGCCAAAGAAGAAACCACTGGATGG
AGAATATTTCACCCTTCAGATCCGTGGGCGTGAGCGCTTCGAGATGTTC
CGAGAGCTGAATGAGGCCTTGGAACTCAAGGATGCCCAGGCTGGGAAGG
AAGCCAGGGGGGAGCAGGGCTCACTCCAGCCACCTGAAGTCCAAAAAGG
GTCAGTCTACCTCCCGCCATAAAAAACTCATGTTCAAGACAGAAGGGCC
TGACTCAGACTGACATTCTCCACTTCTTGTTCCCCACTGACAGCCTCCC
ACCCCCTCTCTCCCTCCCCTGCCATTTTGGGTTTTGGGTCTTTGAACCC
TTGCTTGCAATAGGTGTGCGTCAGAAGCACCCAGGACTTCCATTTGCTT
TGTCCCGGGGCTCCACTGAACAAGTTGGCCTGCACTGGTGTTTTGTTGT
GGGGAGGAGGATGGGGAGTAGGACATACCAGCTTAGATTTTAAGGTTTT
TACTGTGAGGGATGTTTGGGAGATGTAAGAAATGTTCTTGCAGTTAAGG
GTTAGTTTACAATCAGCCACATTCTAGGTAGGGGCCCACTTCACCGTAC
TAACCAGGGAAGCTGTCCCTCACTGTTGAATTTTCTCTAACTTCAAGGC
CCATATCTGTGAAATGCTGGCATTTGCACCTACCTCACAGAGTGCATTG
TGAGGGTTAATGAAATAATGTACATCTGGCCTTGAAACCACCTTTTATT
ACATGGGGTCTAGAACTTGACCCCCTTGAGGGTGCTTGTTCCCTCTCCC
TGTTGGTCGGTGGGTTGGTAGTTTCTACAGTTGGGCAGCTGGTTAGGTA
AGGAAATCTCACCCCATCCCACACCCTGGAGGATTTCATCTCTTGTATA
TGAGGGAGTTGTCAAGTCTCTGCTGGCCCAGCCAAACCCTGTCTGACAA
CCTCTTGGTGAACCTTAGTACCTAAAGATGATCTGGATCCACCAAGACT
TGTTTTATGCTCAGGGTCAATTTCTTTTTTCTTTTTTTTTTTTTTTTTT
CTTTTTCTTTGAGACTGGGTCTCGCTTTGTTGCCCAGGCTGGAGTGGAG
TGGCGTGATCTTGGCTTACTGCAGCCTTTGCCTCCCCGGCTCGAGCAGT
CCTGCCTCAGCCTCCGGAGTAGCTGGGACCACAGGTTCATGCCACCATG
GCCAGCCAACTTTTGCATGTTTTGTAGAGATGGGGTCTCACAGTGTTGC
CCAGGCTGGTCTCAAACTCCTGGGCTCAGGCGATCCACCTGTCTCAGCC
TCCCAGAGTGCTGGGATTACAATTGTGAGCCACCACGTCCAGCTGGAAG
GGTCAACATCTTTTACATTCTGCAAGCACATCTGCATTTTCACCCCACC
CTTCCCCTCCTTCTCCCTTTTTATATCCCATTTTTATATCGATCTCTTA
TTTTACAATAAAACTTTGCTGCCACCTGTGTGTCTGAGGGGTG.

[0095] Esophageal adenocarcinoma (EAC) has steadily increased in incidence over recent decades. With an 85% mortality rate this cancer is the most rapidly increasing cause of cancer mortality from solid tumors in the American population. There has thus been substantial interest in development of screening approaches for early detection of EAC and its precursor lesions of Barrett's esophagus (BE). However, the majority of EACs develop in patients without prior symptoms, and current approaches of endoscopic screening of individuals with persistent symptoms of gastro-esophageal reflux disease, combined with longitudinal screening of those found to have BE, have accordingly not had significant impact on reducing deaths from EACs.

[0096] As noted above, early detection of gastrointestinal neoplasia (e.g., neoplasia of the upper gastrointestinal tract) coupled with appropriate intervention, is important for increasing patient survival rates. Present systems for screening for esophageal neoplasia are deficient for a variety of reasons, including a lack of specificity and/or sensitivity (e.g., barium swallow) or a high cost and intensive use of medical resources (e.g., upper endoscopy or CT scan).

[0097] Alternative systems for detection of esophageal neoplasia would be useful in a wide range of other clinical circumstances as well. For example, detecting esophageal neoplasia may select the patient to undergo therapies that include, but are not limited, to resection of the neoplasia (via endoscopic resection or surgical resection), ablation of the neoplasia, chemotherapy, or radiation therapy. As a further example, patients who have received surgical and/or pharmaceutical therapy for esophageal cancer may experience a relapse. It would be advantageous to have an alternative system for determining whether such patients have a recurrent or relapsed neoplasia of the upper gastrointestinal tract. As a further example, an alternative diagnostic system would facilitate monitoring an increase, decrease or persistence of neoplasia of the upper gastrointestinal tract in a patient known to have such a neoplasia. A patient undergoing chemotherapy may be monitored to assess the effectiveness of the therapy.

### III. Methylation of Informative Loci as Disease Biomarkers

[0098] The present disclosure relates at least in part to the identification of genomic loci whose altered DNA methylation is indicative of the presence of esophageal neoplasias and/or metaplasias that include Barrett's esophagus (BE) and/or esophageal adenocarcinoma (EAC). In some embodiments, the Barrett's esophagus is associated with dysplasia. In some embodiments, the dysplasia is high-grade dysplasia. In some embodiments, the dysplasia is low-grade dysplasia. In some embodiments, the methylation patterns of the informative loci as disclosed herein are determined in a sample taken from a subject as described herein and may be used to distinguish between subjects having Barrett's esophagus and subjects having high grade dysplasia and/or low grade dysplasia and/or esophageal adenocarcinoma. Examples of the informative loci are provided herein.

[0099] In some embodiments, any of the nucleotide sequences disclosed herein, or fragments or reverse complements thereof, may contain one or more “Y” residues. Cytosine residues that may be methylated or unmethylated, and hence may be bisulfite converted to T (if unmethylated) or remain as a C (if methylated), are designated with a “Y.” In some embodiments, one or more of the Y residues in any of the sequences disclosed herein (or fragments or reverse complements thereof) designates a methylated C. In some embodiments, one or more of the Y residues in any of the sequences disclosed herein (or fragments or reverse complements thereof) designates an unmethylated C. In some embodiments, at least 1, 2, 3, 4, 5, 6, 7, 8, 9, 10, 11, 12, 13, 14, 15, 16, 17, 18, 19, 20, 21, 22, 23, 24, 25, 26, 27, 28, 29, or 30 of the Y residues in any of the sequences disclosed herein (or fragments or reverse complements thereof) correspond to methylated C residues. In some embodiments, at least 1, 2, 3, 4, 5, 6, 7, 8, 9, 10, 11, 12, 13, 14, 15, 16, 17, 18, 19, 20, 21, 22, 23, 24, 25, 26, 27, 28, 29, or 30 of the Y residues in any of the sequences disclosed herein (or fragments or reverse complements thereof) correspond to unmethylated C residues. In some embodiments, at least 10%, 20%, 30%, 40%, 50%, 60%, 70%, 80%, 90%, or 100% of the Y residues in any of the sequences disclosed herein (or fragments or reverse complements thereof) correspond to methylated C residues. In some embodiments, at least 10%, 20%, 30%, 40%, 50%, 60%, 70%, 80%, 90%, or 100% of the Y residues in any of the sequences disclosed herein (or fragments or reverse complements thereof) are correspond to unmethylated C residues. In some embodiments, any of the sequences disclosed herein (or fragments or reverse complements thereof) is bisulfite-converted. In some embodiments, at least 1, 2, 3, 4, 5, 6, 7, 8, 9, 10, 11, 12, 13, 14, 15, 16, 17, 18, 19, 20, 21, 22, 23, 24, 25, 26, 27, 28, 29, or 30 of the Y residues in any of the bisulfite-converted sequences disclosed herein (or fragments or reverse complements thereof) correspond to C. In some embodiments, at least 1, 2, 3, 4, 5, 6, 7, 8, 9, 10, 11, 12, 13, 14, 15, 16, 17, 18, 19, 20, 21, 22, 23, 24, 25, 26, 27, 28, 29, or 30 of the Y residues in any of the bisulfite-converted sequences disclosed herein (or fragments or reverse complements thereof) correspond to T. In some embodiments, at least 10%, 20%, 30%, 40%, 50%, 60%, 70%, 80%, 90%, or 100% of the Y residues in any of the bisulfite-converted sequences disclosed herein (or fragments or reverse complements thereof) correspond to C residues. In some embodiments, at least 10%, 20%, 30%, 40%, 50%, 60%, 70%, 80%, 90%, or 100% of the Y residues in any of the bisulfite-converted sequences disclosed herein (or fragments or reverse complements thereof) correspond to T residues.

[0100] In some embodiments, an informative loci in a subject is considered “methylated” for the purposes of determining whether or not the subject is prone to developing and/or has developed a metaplasia in the esophagus (e.g., Barrett's esophagus) or neoplasia (e.g., Barrett's esophagus with dysplasia such as high-grade or low-grade dysplasia) (e.g., esophageal cancer such as esophageal adenocarcinoma) if the loci is at least 10%, 20%, 30%, 40%, 50%, 60%, 70%, 80%, 90%, or 100% methylated. In some embodiments, a DNA sample from a subject is treated with bisulfite, and the resulting bisulfite sequence corresponds to any of the nucleotide sequences disclosed herein comprising a “Y” nucleotide. In some embodiments, if at least 1, 2, 3, 4, 5, 6, 7, 8, 9, 10, 11, 12, 13, 14, 15, 16, 17, 18, 19, 20, 21, 22, 23, 24, 25, 26, 27, 28, 29, or 30 of the Y residues of the bisulfite-converted sequence have a C, the sequence is considered “methylated” for the purposes of determining whether or not the subject is prone to developing and/or has developed a metaplasia in the esophagus (e.g., Barrett's esophagus) or neoplasia (e.g., Barrett's esophagus with dysplasia such as high-grade or low-grade dysplasia) (e.g., esophageal cancer such as esophageal adenocarcinoma). In some embodiments, a DNA sample from a subject is treated with bisulfite, and the resulting bisulfite sequence corresponds to any of the nucleotide sequences disclosed herein comprising a “Y” nucleotide. In some embodiments, if at least 10%, 20%, 30%, 40%, 50%, 60%, 70%, 80%, 90%, or 100% of the Y residues of the bisulfite-converted sequence have a C, the sequence is considered “methylated” for the purposes of determining whether or not the subject is prone to developing and/or has developed a metaplasia in the esophagus (e.g., Barrett's esophagus) or neoplasia (e.g., Barrett's esophagus with dysplasia such as high-grade or low-grade dysplasia) (e.g., esophageal cancer such as esophageal adenocarcinoma). The disclosure provides for informative loci that may be used to assess whether a subject (e.g. a human) has or is prone to developing a metaplasia in the esophagus (e.g., Barrett's esophagus) or neoplasia (e.g., Barrett's esophagus with dysplasia such as high-grade or low-grade dysplasia) (e.g., esophageal cancer such as esophageal adenocarcinoma). In some embodiments, one or more informative loci, as defined herein, may be used for determining whether a subject has or is likely to develop, a metaplasia (e.g., Barrett's esophagus). In some embodiments, one or more informative loci, as defined herein, may be used for determining whether a subject has or is likely to develop, a neoplasia (e.g., Barrett's esophagus with high grade dysplasia, or an esophageal cancer such as esophageal adenocarcinoma). In some embodiments, one or more informative loci, as defined herein, may be used to distinguish between whether a subject has a metaplasia in the esophagus (e.g., Barrett's esophagus) or an esophageal neoplasia (e.g., Barrett's esophagus with high grade dysplasia, or an esophageal cancer such as esophageal adenocarcinoma).

[0101] In some embodiments, the informative loci include sequences associated with any one or more of the plus strand DNA sequences having at least 80%, 85%, 87%, 90%, 91%, 92%, 93%, 94%, 95%, 96%, 97%, 98%, 99% or 100% identity to any of SEQ ID NOs: 1-428, 2569-2996, 5137-5531, 7507-7532, 7663-7668, 7819-7842, 7963-7976, 8047-8060, 8131-8143, 8209-8222, 8293-8306, 8405-8409, 8447-8632, 9563-9748, 10679-10825, 11561-11611, 11867-11917, 12173-12219, 12455-12460, 12491-12496, 12527-12532, 12563-12568, 12599-12604, 12647-12649, 12671-12907, 14093-14329, 15515-15537, 15653-15692, 15893-15932, 16133-16137, 16163-16165, 16181-16183, or 16199, or fragments or complements thereof. In particular embodiments, the informative loci include sequences associated with any one or more of the plus strand DNA sequences having at least 80%, 85%, 87%, 90%, 91%, 92%, 93%, 94%, 95%, 96%, 97%, 98%, 99% or 100% identity to any of SEQ ID NOs: 7963-7976, 8047-8060, 8131-8143, 12455-12460, 12491-12496, 12527-12532, 16163-16165, 16181-16183, or 16199, or fragments or complements thereof. In some embodiments, the informative loci are associated with increased methylation in both Barrett's esophagus and esophageal adenocarcinoma samples, as compared to the same sample types taken from a healthy control subject. In some embodiments, the informative loci that are associated with increased methylation in both Barrett's esophagus and esophageal adenocarcinoma samples include sequences associated with any one or more of the plus strand DNA sequences having at least 80%, 85%, 87%, 90%, 91%, 92%, 93%, 94%, 95%, 96%, 97%, 98%, 99% or 100% identity to any of SEQ ID NOs: 1-428, 2569-2996, 5137-5531, 7507-7532, 7663-7668, 7819-7842, 7963-7976, 8047-8060, 8131-8143, 8209-8222, 8293-8306, or 8405-8409, or fragments or complements thereof. In particular embodiments, the informative loci that are associated with increased methylation in both Barrett's esophagus and esophageal adenocarcinoma samples include sequences associated with any one or more of the plus strand DNA sequences having at least 80%, 85%, 87%, 90%, 91%, 92%, 93%, 94%, 95%, 96%, 97%, 98%, 99% or 100% identity to any of SEQ ID NOs: 7963-7976, 8047-8060, or 8131-8143, or fragments or complements thereof. In some embodiments, the informative loci are associated with increased methylation in an esophageal adenocarcinoma sample and/or a Barrett's with low grade or high grade dysplasia as compared to a sample of the same type taken from a subject having Barrett's esophagus without dysplasia. In some embodiments, the informative loci that are associated with increased methylation in an esophageal adenocarcinoma sample or a Barrett's with low grade or high grade dysplasia sample include any one or more of the sequences having at least 80%, 85%, 87%, 90%, 91%, 92%, 93%, 94%, 95%, 96%, 97%, 98%, 99% or 100% identity to any of SEQ ID NOs: 8447-8632, 9563-9748, 10679-10825, 11561-11611, 11867-11917, 12173-12219, 12455-12460, 12491-12496, or 12527-12532, or fragments or complements thereof. In particular embodiments, the informative loci that are associated with increased methylation in Barrett's with low grade dysplasia sample include any one or more of the sequences having at least 80%, 85%, 87%, 90%, 91%, 92%, 93%, 94%, 95%, 96%, 97%, 98%, 99% or 100% identity to any of SEQ ID NOs: 12455-12460, 12491-12496, or 12527-12532, or fragments or complements thereof. In particular embodiments, the informative loci that are associated with increased methylation in an esophageal adenocarcinoma sample or a Barrett's with high grade dysplasia sample include any one or more of the sequences having at least 80%, 85%, 87%, 90%, 91%, 92%, 93%, 94%, 95%, 96%, 97%, 98%, 99% or 100% identity to any of SEQ ID NOs: 12455-12460, 12491-12496, or 12527-12532, or fragments or complements thereof. In some embodiments, the informative loci are associated with reduced methylation in an esophageal adenocarcinoma sample as compared to a sample of the same type taken from a subject having Barrett's esophagus. In some embodiments, the informative loci that are associated with reduced methylation in an esophageal adenocarcinoma sample include any one or more of the sequences having at least 80%, 85%, 87%, 90%, 91%, 92%, 93%, 94%, 95%, 96%, 97%, 98%, 99% or 100% identity to any of SEQ ID NOs: 12671-12908, 14093-14329, 15515-15537, 15653-15692, 15893-15932, 16133-16137, 16163-16165, 16181-16183, or 16199, or fragments or complements thereof. In particular embodiments, the informative loci that are associated with reduced methylation in an esophageal adenocarcinoma sample include any one or more of the sequences having at least 80%, 85%, 87%, 90%, 91%, 92%, 93%, 94%, 95%, 96%, 97%, 98%, 99% or 100% identity to any of SEQ ID NOs: 16163-16165, 16181-16183, or 16199, or fragments or complements thereof.

[0102] In some embodiments, the informative loci or amplicon of the informative loci are treated with an agent, such as bisulfite. In some embodiments, the informative loci include sequences that have been treated with bisulfite. In some embodiments, the disclosure provides for bisulfite control sequences of any of the plus DNA strands disclosed herein. In some embodiments, the disclosure provides for bisulfite-treated unmethylated sequences of any of the plus DNA strands disclosed herein. In some embodiments, the bisulfite-converted plus-strand control DNA sequences include any one or more having at least 80%, 85%, 87%, 90%, 91%, 92%, 93%, 94%, 95%, 96%, 97%, 98%, 99% or 100% identity to any of SEQ ID NOs: 857-1284, 3425-3852, 5927-6321, 7559-7584, 7715-7740, 7867-7890, 7991-8004, 8075-8088, 8157-8169, 8223-8236, 8307-8320, 8410-8414, 8819-9004, 9935-10120, 10973-11119, 11663-11713, 11969-12019, 12267-12313, 12467-12472, 12503-12508, or 12539-12544, 12569-12574, 12605-12610, 12650-12652, or fragments or complements thereof. In particular embodiments, the bisulfite-converted plus-strand control DNA sequences include any one or more having at least 80%, 85%, 87%, 90%, 91%, 92%, 93%, 94%, 95%, 96%, 97%, 98%, 99% or 100% identity to any of SEQ ID NOs: 7991-8004, 8075-8088, 8157-8169, 8223-8236, 8307-8320, 8410-8414, 12467-12472, 12503-12508, or 12539-12544, 12569-12574, 12605-12610, 12650-12652, or fragments or complements thereof. In some embodiments, the informative loci are associated with increased methylation in both Barrett's esophagus and esophageal adenocarcinoma samples, as compared to the same sample types taken from a healthy control subject. In some embodiments, the disclosure provides for bisulfite-treated unmethylated sequences of any of the plus DNA strands that are associated with increased methylation in both Barrett's esophagus and esophageal adenocarcinoma samples, as compared to the same sample types taken from a healthy control subject. In some embodiments, the bisulfite converted sequences of any of the plus DNA strands that are associated with increased methylation in both Barrett's esophagus and esophageal adenocarcinoma samples are selected from the group consisting of sequences having at least 80%, 85%, 87%, 90%, 91%, 92%, 93%, 94%, 95%, 96%, 97%, 98%, 99% or 100% identity to any of SEQ ID NOs: 857-1284, 3425-3852, 5927-6321, 7559-7584, 7715-7740, 7867-7890, 7991-8004, 8075-8088, 8157-8169, 8223-8236, 8307-8320, or 8410-8414, or fragments or complements thereof. In particular embodiments, the bisulfite converted sequences of any of the plus DNA strands that are associated with increased methylation in both Barrett's esophagus and esophageal adenocarcinoma samples include any one or more bisulfite-converted methylated plus-strand DNA sequences selected from the group consisting of sequences having at least 80%, 85%, 87%, 90%, 91%, 92%, 93%, 94%, 95%, 96%, 97%, 98%, 99% or 100% identity to any of: SEQ ID NOs: 7991-8004, 8075-8088, 8157-8169, 8223-8236, 8307-8320, or 8410-8414, or fragments or complements thereof. In some embodiments, the disclosure provides for bisulfite-treated unmethylated sequences of any of the plus DNA strands that are associated with increased methylation in an esophageal adenocarcinoma sample or a Barrett's with low grade or high grade dysplasia sample as compared to a sample of the same type taken from a subject having Barrett's esophagus without dysplasia. In some embodiments, the bisulfite converted sequences of any of the plus DNA strands that are associated with increased methylation in an esophageal adenocarcinoma sample or a Barrett's with low grade or high grade dysplasia sample include any one or more bisulfite-converted methylated plus-strand DNA sequences selected from the group consisting having at least 80%, 85%, 87%, 90%, 91%, 92%, 93%, 94%, 95%, 96%, 97%, 98%, 99% or 100% identity to any of SEQ ID NOs: 8819-9004, 9935-10120, 10973-11119, 11663-11713, 11969-12019, 12267-12313, 12467-12472, 12503-12508,12539-12544, 12569-12574, 12605-12610, or 12650-12652, or fragments or complements thereof. In particular embodiments, the bisulfite converted sequences of any of the plus DNA strands that are associated with increased methylation in an esophageal adenocarcinoma sample or a Barrett's with low grade or high grade dysplasia sample include any one or more of the sequences having at least 80%, 85%, 87%, 90%, 91%, 92%, 93%, 94%, 95%, 96%, 97%, 98%, 99% or 100% identity to any of SEQ ID NOs: 12467-12472, 12503-12508, 12539-12544, 12569-12574, 12605-12610, or 12650-12652, or fragments or complements thereof. In some embodiments, the informative loci are associated with reduced methylation in an esophageal adenocarcinoma sample as compared to a sample of the same type taken from a subject having Barrett's esophagus. In some embodiments, the disclosure provides for methylated control sequences of the plus DNA strand that are associated with reduced methylation in an esophageal adenocarcinoma sample as compared to a sample of the same type taken from a subject having Barrett's esophagus. In some embodiments, the methylated control sequences of any of the plus DNA strands that are associated with reduced methylation in an esophageal adenocarcinoma sample include any one or more bisulfite-converted methylated plus-strand DNA sequences selected from the group consisting having at least 80%, 85%, 87%, 90%, 91%, 92%, 93%, 94%, 95%, 96%, 97%, 98%, 99% or 100% identity to any of SEQ ID NOs: 13145-13381, 14567-14803, 15561-15583, 15733-15772, 15973-16012, 16143-16147, 16169-16171, 16187-16189 or 16201, or fragments or complements thereof. In particular embodiments, the methylated control sequences of any of the plus DNA strands that are associated with reduced methylation in an esophageal adenocarcinoma sample include any one or more bisulfite-converted methylated plus-strand DNA sequences selected from the group consisting having at least 80%, 85%, 87%, 90%, 91%, 92%, 93%, 94%, 95%, 96%, 97%, 98%, 99% or 100% identity to any of SEQ ID NOs: 16169-16171, 16187-16189 or 16201, or fragments or complements thereof.

[0103] In some embodiments, the informative loci or amplicon of the informative loci are treated with an agent, such as bisulfite. In some embodiments, the informative loci include sequences that have been treated with bisulfite. In some embodiments, the informative loci include methylated nucleic acid sequences that have been treated with bisulfite. In some embodiments, the bisulfite-converted methylated plus-strand DNA sequences have at least 80%, 85%, 87%, 90%, 91%, 92%, 93%, 94%, 95%, 96%, 97%, 98%, 99% or 100% identity to any of SEQ ID NOs: 1285-1712, 3853-4280, 6322-6716, 7585-7610, 7741-7766, 7891-7914, 8005-8018, 8089-8102, 8170-8182, 8237-8250, 8321-8334, 8415-8419, 9005-9190, 10121-10306, 11120-11266, 11714-11764, 12020-12070, 12314-12360, 12473-12478, 12509-12514 or 12545-12550, 12575-12580, 12611-12616, 12653-12655, or fragments or complements thereof. In particular embodiments, the bisulfite-converted methylated plus-strand DNA sequences have at least 80%, 85%, 87%, 90%, 91%, 92%, 93%, 94%, 95%, 96%, 97%, 98%, 99% or 100% identity to any of SEQ ID NOs: 8005-8018, 8089-8102, 8170-8182, 12473-12478, 12509-12514 or 12545-12550, or fragments or complements thereof. In some embodiments, the informative loci are associated with increased methylation in both Barrett's esophagus and esophageal adenocarcinoma samples, as compared to the same sample types taken from a healthy control subject. In some embodiments, the informative loci that are associated with increased methylation in both Barrett's esophagus and esophageal adenocarcinoma samples include any one or more bisulfite-converted methylated plus-strand DNA sequences selected from the group consisting of sequences having at least 80%, 85%, 87%, 90%, 91%, 92%, 93%, 94%, 95%, 96%, 97%, 98%, 99% or 100% identity to any of SEQ ID NOs: 1285-1712, 3853-4280, 6322-6716, 7585-7610, 7741-7766, 7891-7914, 8005-8018, 8089-8102, 8170-8182, 8237-8250, 8321-8334, or 8415-8419, or fragments or complements thereof. In particular embodiments, the informative loci that are associated with increased methylation in both Barrett's esophagus and esophageal adenocarcinoma samples include any one or more bisulfite-converted methylated plus-strand DNA sequences selected from the group consisting of sequences having at least 80%, 85%, 87%, 90%, 91%, 92%, 93%, 94%, 95%, 96%, 97%, 98%, 99% or 100% identity to: SEQ ID NOs: 8005-8018, 8089-8102, 8170-8182, 8237-8250, 8321-8334, or 8415-8419, or fragments or complements thereof. In some embodiments, the informative loci are associated with increased methylation in an esophageal adenocarcinoma sample or a Barrett's with low grade or high grade dysplasia sample as compared to a sample of the same type taken from a subject having Barrett's esophagus without dysplasia. In some embodiments, the informative loci that are associated with increased methylation in an esophageal adenocarcinoma sample or a Barrett's with low grade or high grade dysplasia sample include any one or more bisulfite-converted methylated plus-strand DNA sequences selected from the group consisting of sequences having at least 80%, 85%, 87%, 90%, 91%, 92%, 93%, 94%, 95%, 96%, 97%, 98%, 99% or 100% identity to SEQ ID NOs: 9005-9190, 10121-10306, 11120-11266, 11714-11764, 12020-12070, 12314-12360, 12473-12478, 12509-12514, 12545-12550, 12575-12580, 12611-12616, or 12653-12655, or fragments or complements thereof. In particular embodiments, the informative loci that are associated with increased methylation in an esophageal adenocarcinoma sample or a Barrett's with low grade or high grade dysplasia sample include any one or more of the sequences having at least 80%, 85%, 87%, 90%, 91%, 92%, 93%, 94%, 95%, 96%, 97%, 98%, 99% or 100% identity to SEQ ID NOs: 12473-12478, 12509-12514, 12545-12550, 12575-12580, 12611-12616, or 12653-12655, or fragments or complements thereof. In some embodiments, the informative loci are associated with reduced methylation in an esophageal adenocarcinoma sample as compared to a sample of the same type taken from a subject having Barrett's esophagus. In some embodiments, the informative loci that are associated with reduced methylation in an esophageal adenocarcinoma sample include any one or more bisulfite-converted methylated plus-strand DNA sequences selected from the group consisting of sequences having at least 80%, 85%, 87%, 90%, 91%, 92%, 93%, 94%, 95%, 96%, 97%, 98%, 99% or 100% identity to SEQ ID NOs: 13382-13618, 14804-15040, 15584-15606, 15773-15812, 16013-16052, 16148-16152, 16172-16174, 16190-16192 or 16202. In particular embodiments, the informative loci that are associated with reduced methylation in an esophageal adenocarcinoma sample include any one or more of the sequences having at least 80%, 85%, 87%, 90%, 91%, 92%, 93%, 94%, 95%, 96%, 97%, 98%, 99% or 100% identity to SEQ ID NOs: 16172-16174, 16190-16192 or 16202, or fragments or complements thereof.

[0104] In some embodiments, the informative loci include sequences associated with any of the minus strand DNA sequences having at least 80%, 85%, 87%, 90%, 91%, 92%, 93%, 94%, 95%, 96%, 97%, 98%, 99% or 100% identity to any of SEQ ID NOs: 429-856, 2997-3424, 5532-5926, 7533-7558, 7689-7714, 7843-7866, 7977-7990, 8061-8074, 8144-8156, 8251-8264, 8335-8348, 8420-8424, 8633-8818, 9749-9934, 10826-10972, 11612-11662, 11918-11968, 12220-12266, 12461-12466, 12497-12502, 12533-12538, 12581-12586, 12617-12622, 12656-12658, 12909-13144, 14330-14566, 15538-15560, 15693-15732, 15933-15972, 16138-16142, 16166-16168, 16184-16186 or 16200, or fragments or complements thereof. In particular embodiments, the informative loci include sequences associated with any of the minus strand DNA sequences having at least 80%, 85%, 87%, 90%, 91%, 92%, 93%, 94%, 95%, 96%, 97%, 98%, 99% or 100% identity to any of SEQ ID NOs: 7977-7990, 8061-8074, 8144-8156, 8251-8264, 8335-8348, 8420-8424, 12461-12466, 12497-12502, 12533-12538, 12581-12586, 12617-12622, 12656-12658, 16166-16168, 16184-16186 or 16200, or fragments or complements thereof. In some embodiments, the informative loci are associated with increased methylation in both Barrett's esophagus and esophageal adenocarcinoma samples, as compared to the same sample types taken from a healthy control subject. In some embodiments, the informative loci that are associated with increased methylation in both Barrett's esophagus and esophageal adenocarcinoma samples include sequences associated with any one or more of the minus strand DNA sequences having at least 80%, 85%, 87%, 90%, 91%, 92%, 93%, 94%, 95%, 96%, 97%, 98%, 99% or 100% identity to any of SEQ ID NOs: 429-856, 2997-3424, 5532-5926, 7533-7558, 7689-7714, 7843-7866, 7977-7990, 8061-8074, 8144-8156, 8251-8264, 8335-8348, 8420-8424, or fragments or complements thereof. In particular embodiments, the informative loci that are associated with increased methylation in both Barrett's esophagus and esophageal adenocarcinoma samples include sequences associated with any one or more of the plus strand DNA sequences having at least 80%, 85%, 87%, 90%, 91%, 92%, 93%, 94%, 95%, 96%, 97%, 98%, 99% or 100% identity to any of SEQ ID NOs: 8251-8264, 8335-8348, 8420-8424, or fragments or complements thereof. In some embodiments, the informative loci are associated with increased methylation in an esophageal adenocarcinoma sample or a Barrett's with low grade or high grade dysplasia sample as compared to a sample of the same type taken from a subject having Barrett's esophagus without dysplasia. In some embodiments, the informative loci that are associated with increased methylation in an esophageal adenocarcinoma sample or a Barrett's with low grade or high grade dysplasia sample include any one or more of the sequences having at least 80%, 85%, 87%, 90%, 91%, 92%, 93%, 94%, 95%, 96%, 97%, 98%, 99% or 100% identity to any of SEQ ID NOs: 8633-8818, 9749-9934, 10826-10972, 11612-11662, 11918-11968, 12220-12266, 12461-12466, 12497-12502, 12533-12538, 12581-12586, 12617-12622, or 12656-12658, or fragments or complements thereof. In particular embodiments, the informative loci that are associated with increased methylation in an esophageal adenocarcinoma sample or a Barrett's with low grade or high grade dysplasia sample include any one or more of the sequences having at least 80%, 85%, 87%, 90%, 91%, 92%, 93%, 94%, 95%, 96%, 97%, 98%, 99% or 100% identity to any of SEQ ID NOs: 12461-12466, 12497-12502, 12533-12538, 12581-12586, 12617-12622, or 12656-12658, or fragments or complements thereof. In some embodiments, the informative loci are associated with reduced methylation in an esophageal adenocarcinoma sample as compared to a sample of the same type taken from a subject having Barrett's esophagus. In some embodiments, the informative loci that are associated with reduced methylation in an esophageal adenocarcinoma sample include any one or more of the sequences having at least 80%, 85%, 87%, 90%, 91%, 92%, 93%, 94%, 95%, 96%, 97%, 98%, 99% or 100% identity to any of SEQ ID NOs: 12909-13144, 14330-14566, 15538-15560, 15693-15732, 15933-15972, 16138-16142, 16166-16168, 16184-16186 or 16200, or fragments or complements thereof. In particular embodiments, the informative loci that are associated with reduced methylation in an esophageal adenocarcinoma sample include any one or more of the sequences having at least 80%, 85%, 87%, 90%, 91%, 92%, 93%, 94%, 95%, 96%, 97%, 98%, 99% or 100% identity to any of SEQ ID NOs: 16166-16168, 16184-16186 or 16200, or fragments or complements thereof.

[0105] In some embodiments, the informative loci or amplicon of the informative loci are treated with an agent, such as bisulfite. In some embodiments, the informative loci include sequences that have been treated with bisulfite. In some embodiments, the disclosure provides for bisulfite control sequences of any of the minus DNA strands disclosed herein. In some embodiments, the disclosure provides for bisulfite-treated sequences of any of the minus DNA strands disclosed herein. In some embodiments, the bisulfite-converted minus-strand control DNA sequences include any one or more of the sequences having at least 80%, 85%, 87%, 90%, 91%, 92%, 93%, 94%, 95%, 96%, 97%, 98%, 99% or 100% identity to any of SEQ ID NOs: 1713-2140, 4281-4708, 6717-7111, 7611-7636, 7767-7792, 7915-7938, 8019-8032, 8103-8116, 8183-8195, 8265-8278, 8349-8362, 8425-8429, 9191-9376, 10307-10492, 11267-11413, 11765-11815, 12071-12121, 12361-12407, 12479-12484, 12515-12520, 12551-12556, 12587-12592, 12623-12628, or 12659-12661, or fragments or complements thereof. In particular embodiments, the bisulfite-converted minus-strand control DNA sequences include any one or more the sequences having at least 80%, 85%, 87%, 90%, 91%, 92%, 93%, 94%, 95%, 96%, 97%, 98%, 99% or 100% identity to any of SEQ ID NOs: 8019-8032, 8103-8116, 8183-8195, 12479-12484, 12515-12520, or 12551-12556, or fragments or complements thereof. In some embodiments, the informative loci are associated with increased methylation in both Barrett's esophagus and esophageal adenocarcinoma samples, as compared to the same sample types taken from a healthy control subject. In some embodiments, the disclosure provides for bisulfite-treated sequences of any of the minus DNA strands that are associated with increased methylation in both Barrett's esophagus and esophageal adenocarcinoma samples, as compared to the same sample types taken from a healthy control subject. In some embodiments, the sequences of any of the minus DNA strands that are associated with increased methylation in both Barrett's esophagus and esophageal adenocarcinoma samples are selected from the group consisting of sequences having at least 80%, 85%, 87%, 90%, 91%, 92%, 93%, 94%, 95%, 96%, 97%, 98%, 99% or 100% identity to any of SEQ ID NOs: 1713-2140, 4281-4708, 6717-7111, 7611-7636, 7767-7792, 7915-7938, 8019-8032, 8103-8116, 8183-8195, 8265-8278, 8349-8362, or 8425-8429, or fragments or complements thereof. In particular embodiments, the sequences of any of the minus DNA strands that are associated with increased methylation in both Barrett's esophagus and esophageal adenocarcinoma samples include any one or more bisulfite-converted methylated minus-strand DNA sequences selected from the group consisting of sequences having at least 80%, 85%, 87%, 90%, 91%, 92%, 93%, 94%, 95%, 96%, 97%, 98%, 99% or 100% identity to: SEQ ID NOs: 8019-8032, 8103-8116, 8183-8195, 8265-8278, 8349-8362, or 8425-8429, or fragments or complements thereof. In some embodiments, the disclosure provides for bisulfite-treated sequences of any of the minus DNA strands that are associated with increased methylation in an esophageal adenocarcinoma sample or a Barrett's with low grade or high grade dysplasia sample as compared to a sample of the same type taken from a subject having Barrett's esophagus without dysplasia. In some embodiments, the sequences of any of the minus DNA strands that are associated with increased methylation in an esophageal adenocarcinoma sample or a Barrett's with low grade or high grade dysplasia sample include any one or more bisulfite-converted methylated minus-strand DNA sequences selected from the group consisting of sequences having at least 80%, 85%, 87%, 90%, 91%, 92%, 93%, 94%, 95%, 96%, 97%, 98%, 99% or 100% identity to SEQ ID NOs: 9191-9376, 10307-10492, 11267-11413, 11765-11815, 12071-12121, 12361-12407, 12479-12484, 12515-12520, or 12551-12556, 12587-12592, 12623-12628, or 12659-12661, or fragments or complements thereof. In particular embodiments, the unmethylated sequences of any of the minus DNA strands that are associated with increased methylation in an esophageal adenocarcinoma sample or a Barrett's with low grade or high grade dysplasia sample include any one or more of the sequences having at least 80%, 85%, 87%, 90%, 91%, 92%, 93%, 94%, 95%, 96%, 97%, 98%, 99% or 100% identity to SEQ ID NOs: 12479-12484, 12515-12520, 12551-12556, 12587-12592, 12623-12628, or 12659-12661, or fragments or complements thereof. In some embodiments, the informative loci are associated with reduced methylation in an esophageal adenocarcinoma sample as compared to a sample of the same type taken from a subject having Barrett's esophagus. In some embodiments, the disclosure provides for methylated control sequences of the minus DNA strand that are associated with reduced methylation in an esophageal adenocarcinoma sample as compared to a sample of the same type taken from a subject having Barrett's esophagus. In some embodiments, the methylated control sequences of any of the minus DNA strands that are associated with reduced methylation in an esophageal adenocarcinoma sample include any one or more bisulfite-converted methylated minus-strand DNA sequences selected from the group consisting of sequences having at least 80%, 85%, 87%, 90%, 91%, 92%, 93%, 94%, 95%, 96%, 97%, 98%, 99% or 100% identity to SEQ ID NOs: 13619-13855, 15041-15277, 15607-15629, 15813-15852, 16053-16092, 16153-16157, 16175-16177, 16192-16195 or 16203, or fragments or complements thereof. In particular embodiments, the methylated control sequences of any of the minus DNA strands that are associated with reduced methylation in an esophageal adenocarcinoma sample include any one or more bisulfite-converted methylated minus-strand DNA sequences selected from the group consisting of sequences having at least 80%, 85%, 87%, 90%, 91%, 92%, 93%, 94%, 95%, 96%, 97%, 98%, 99% or 100% identity to SEQ ID NOs: 16175-16177, 16192-16195 or 16203, or fragments or complements thereof.

[0106] In some embodiments, the informative loci or amplicon of the informative loci are treated with an agent, such as bisulfite. In some embodiments, the informative loci include sequences that have been treated with bisulfite. In some embodiments, the informative loci include methylated nucleic acid sequences that have been treated with bisulfite. In some embodiments, the bisulfite-converted methylated minus-strand DNA sequences include any one or more of sequences having at least 80%, 85%, 87%, 90%, 91%, 92%, 93%, 94%, 95%, 96%, 97%, 98%, 99% or 100% identity to SEQ ID NOs: 2141-2568, 4709-5136, 7112-7506, 7637-7662, 7793-7818, 7939-7962, 8033-8046, 8117-8130, 8196-8208, 8279-8292, 8363-8376, 8430-8434, 9377-9562, 10493-10678, 11414-11560, 11816-11866, 12122-12172, 12408-12454, 12485-12490, 12521-12526, 12557-12562, 12593-12598, 12269-12634, or 12662-12664, or fragments or complements thereof. In particular embodiments, the bisulfite-converted methylated minus-strand DNA sequences include any one or more of sequences having at least 80%, 85%, 87%, 90%, 91%, 92%, 93%, 94%, 95%, 96%, 97%, 98%, 99% or 100% identity to SEQ ID NOs: 8033-8046, 8117-8130, 8196-8208, 8279-8292, 8363-8376, 8430-8434, 12485-12490, 12521-12526, 12557-12562, 12593-12598, 12269-12634, or 12662-12664, or fragments or complements thereof. In some embodiments, the informative loci are associated with increased methylation in both Barrett's esophagus and esophageal adenocarcinoma samples, as compared to the same sample types taken from a healthy control subject. In some embodiments, the informative loci that are associated with increased methylation in both Barrett's esophagus and esophageal adenocarcinoma samples include any one or more bisulfite-converted methylated minus-strand DNA sequences selected from the group consisting of sequences having at least 80%, 85%, 87%, 90%, 91%, 92%, 93%, 94%, 95%, 96%, 97%, 98%, 99% or 100% identity to SEQ ID NOs: 2141-2568, 4709-5136, 7112-7506, 7637-7662, 7793-7818, 7939-7962, 8033-8046, 8117-8130, 8196-8208, 8279-8292, 8363-8376, or 8430-8434, or fragments or complements thereof. In particular embodiments, the informative loci that are associated with increased methylation in both Barrett's esophagus and esophageal adenocarcinoma samples include any one or more bisulfite-converted methylated minus-strand DNA sequences selected from the group consisting of sequences having at least 80%, 85%, 87%, 90%, 91%, 92%, 93%, 94%, 95%, 96%, 97%, 98%, 99% or 100% identity to: SEQ ID NOs: 8033-8046, 8117-8130, 8196-8208, 8279-8292, 8363-8376, or 8430-8434,or fragments or complements thereof. In some embodiments, the informative loci are associated with increased methylation in an esophageal adenocarcinoma sample or a Barrett's with high grade dysplasia sample as compared to a sample of the same type taken from a subject having Barrett's esophagus without dysplasia. In some embodiments, the informative loci that are associated with increased methylation in an esophageal adenocarcinoma sample or a Barrett's with low grade or high grade dysplasia sample include any one or more bisulfite-converted methylated minus-strand DNA sequences selected from the group consisting of sequences having at least 80%, 85%, 87%, 90%, 91%, 92%, 93%, 94%, 95%, 96%, 97%, 98%, 99% or 100% identity to SEQ ID NOs: 9377-9562, 10493-10678, 11414-11560, 11816-11866, 12122-12172, 12408-12454, 12485-12490, 12521-12526, 12557-12562, 12593-12598, 12269-12634, or 12662-12664, or fragments or complements thereof. In particular embodiments, the informative loci that are associated with increased methylation in an esophageal adenocarcinoma sample or a Barrett's with low grade or high grade dysplasia sample include any one or more of the sequences of sequences having at least 80%, 85%, 87%, 90%, 91%, 92%, 93%, 94%, 95%, 96%, 97%, 98%, 99% or 100% identity to SEQ ID NOs: 12485-12490, 12521-12526, 12557-12562, 12593-12598, 12269-12634, or 12662-12664, or fragments or complements thereof. In some embodiments, the informative loci are associated with reduced methylation in an esophageal adenocarcinoma sample as compared to a sample of the same type taken from a subject having Barrett's esophagus. In some embodiments, the informative loci that are associated with reduced methylation in an esophageal adenocarcinoma sample include any one or more bisulfite-converted methylated minus-strand DNA sequences selected from the group consisting of sequences having at least 80%, 85%, 87%, 90%, 91%, 92%, 93%, 94%, 95%, 96%, 97%, 98%, 99% or 100% identity to SEQ ID NOs: 13856-14092, 15278-15514, 15630-15652, 15853-15892, 16093-16132, 16158-16162, 16178-16180, 16196-16198, or 16204, or fragments or complements thereof. In particular embodiments, the informative loci that are associated with reduced methylation in an esophageal adenocarcinoma sample include any one or more of the sequences having at least 80%, 85%, 87%, 90%, 91%, 92%, 93%, 94%, 95%, 96%, 97%, 98%, 99% or 100% identity to SEQ ID NOs: 16178-16180, 16196-16198, or 16204, or fragments or complements thereof.

[0107] In some embodiments, the disclosure provides for a bisulfite-converted nucleotide sequence comprising the bisulfite-converted nucleotide sequence of any one of the following: Up3, Up10, Up15-1, Up15-2, Up20-1, Up20-2, Up20-2, Up27, Up35-1, Up35-2, SqBE2, SqBE5, SqBE7, SqBE9, SqBE10, SqBE11-1, SqBE11-2, SqBE13, SqBE14-2, SqBE15, SqBE16-1, SqBE16-2, SqBE17-1, SqBE18, SqBE22-1, SqBE22-2 or SqBE23. In particular embodiments, the sequence comprises the bisulfite-converted nucleotide sequence of any one of the following: Up3, Up10, Up15-1, Up15-2, Up20-1, Up20-2, Up20-2, Up27, Up35-1, or Up35-2. In particular embodiments, the sequence comprises the bisulfite-converted nucleotide sequence of any one of the following: SqBE2, SqBE5, SqBE7, SqBE9, SqBE10, SqBE11-1, SqBE11-2, SqBE13, SqBE14-2, SqBE15, SqBE16-1, SqBE16-2, SqBE17-1, SqBE18, SqBE22-1, SqBE22-2 or SqBE23.

[0108] In some embodiments, the disclosure provides for a panel of any of the sequences disclosed herein. In some embodiments, the panel comprises any of the following combinations of sequences: a) Up3, Up10, Up15-1, Up15-2, Up20-1, Up20-2, Up27, Up35-1, and Up35-2; b) Up3, Up15-1, Up15-2, Up20-1, Up27, and Up35-1; c) Up10, Up3, Up15-1, Up15-2, Up20-1, Up27, and Up35-1; d) Up35-2, Up3, Up15-1, Up15-2, Up20-1, Up27 and Up35-1; e) Up15-1 and Up35-1; f) Up15-1, Up35-1, and Up10; g) Up15-1, Up35-1 and Up20-1; h) Up15-1, Up35-1, Up10, and Up15-2; i) Up15-1, Up35-1, Up10, and Up27; j) Up15-1, Up35-1, Up15-2, and Up20-1; k) Up15-1, Up35-1, Up15-2 and Up27; l) Up15-1, Up35-1, Up20-1, and Up27; m) Up3 and Up35-1; n) Up3 and Up35-2; o) Up3 and Up10; p) Up3 and Up27; q) Up35-1 and Up35-2; r) Up35-1 and Up27; s) Up35-2 and Up10; t) Up10 and Up27; u) Up3, Up35-1 and Up35-2; v) Up3, Up35-1 and Up10; w) Up3, Up35-1, and Up27; x) Up3, Up35-2 and Up10; y) Up3, Up35-2, and Up27; z) Up3, Up10, and Up27; aa) Up35-1, Up10, and Up27; ab) Up35-2, Up10, and Up27; ac) Up3, Up35-1, Up35-2 and Up10; ad) Up3, Up35-1, Up35-2 and Up27; ae) Up35-1, Up35-2, Up10 and Up27; af) Up3, Up35-2, Up10 and Up27; ag) Up3, Up35-1, Up10 and Up27; ah) Up3, Up10, Up27, Up35-1, and Up35-2; ai) Up35-1 and Up10, aj) Up35-1 and Up27; ak) Up35-2 and Up10; al) Up35-2 and Up27; am) Up3, Up35-1 and Up35-2; an) Up3, Up35-1, and Up10; ao) Up3, Up35-1, and Up27; ap) Up3, Up35-2 and Up10; aq) Up3, Up35-2 and Up27; ar) Up3, Up10 and Up27; at) Up35-1, Up10, and Up27; au) Up3, Up35-1, Up35-2, and Up10; av) Up3, Up35-1, Up35-2 and Up27; aw) Up35-1, Up35-2, Up10 and Up27; ax) Up3, Up35-2, Up10 and Up27; ay) Up3, Up35-1, Up10 and Up27; az) Up3, Up10, Up27, Up35-1, and Up35-2; ba) SqBE5 and SqBE7; bb) SqBE5 and SqBE16; bc) SqBE5 and SqBE17; bd) SqBE5 and SqBE18; be) SqBE7 and SqBE16; bf) SqBE7 and SqBE17; SqBE7 and SqBE17; bg) SqBE7 and SqBE18; bh) SqBE16 and SqBE17 and bi) SqBE16 and SqBE18. In some embodiments, the disclosure provides for a method of detecting the methylation status of the sequences in any of the panels disclosed herein. In some embodiments, the disclosure provides for a method of detecting the methylation status of the sequences in any of the panels disclosed herein, and further comprises detecting the mutation status of p53. In particular embodiments, the disclosure provides for a method of a) detecting the methylation status of a panel comprising the sequences of Up-3 and Up35-2, and b) further detecting the mutation status of TP53.

[0109] In some embodiments, the disclosure provides for a method of detecting the methylation status of any of the loci disclosed herein, and further comprises detecting the methylation status of vimentin. In some embodiments, the vimentin methylation is detected in a manner consistent with that described in Li et al. (Li M, et al. (2009) Sensitive digital quantification of DNA methylation in clinical samples. Nat Biotechnol 27(9):858-863). In some embodiments, the vimentin methylation patterns are determined in a nucleotide sequence having at least 80%, 85%, 90%, 91%, 92%, 93%, 94%, 95%, 96%, 97%, 98%, 99% or 100% identity to SEQ ID NO: 16207 or 16208. In some embodiments, the methylation patterns are determined in any of the following nucleic acid sequence combinations: a) vimentin and SQBE5; b) vimentin and SQBE7, c) vimentin and SQBE16, d) vimentin and SQBE17 or e) vimentin and SQBE18.

[0110] In particular embodiments, the disclosure provides for a nucleotide sequence comprising a sequence having at least 80%, 85%, 90%, 91%, 92%, 93%, 94%, 95%, 96%, 97%, 98%, 99% or 100% identity to any of the following sequences: 8209-8222, 8251-8264, 8293-8306, 8335-8348, 8405-8409, 8420-8424, 12563-12568, 12581-12586, 12599-12604, 12617-12622, 12647-12649 or 12656-12658, or fragments and/or reverse complements thereof. In particular embodiments, the disclosure provides for a nucleotide sequence comprising a sequence having at least 80%, 85%, 90%, 91%, 92%, 93%, 94%, 95%, 96%, 97%, 98%, 99% or 100% identity to any of the following sequences: 12563-12568, 12581-12586, 12599-12604, 12617-12622, 12647-12649 or 12656-12658, or fragments and/or reverse complements thereof. In particular embodiments, the disclosure provides for a nucleotide sequence comprising a sequence having at least 80%, 85%, 90%, 91%, 92%, 93%, 94%, 95%, 96%, 97%, 98%, 99% or 100% identity to any of the following sequences: 8209-8222, 8251-8264, 8293-8306, 8335-8348, 8405-8409, or 8420-8424, or fragments and/or reverse complements thereof.

[0111] In some embodiments, the disclosure provides for a bisulfite-converted nucleotide sequence comprising a sequence having at least 80%, 85%, 90%, 91%, 92%, 93%, 94%, 95%, 96%, 97%, 98%, 99% or 100% identity to any of the following sequences: SEQ ID NOs: 8307-8313, 8315-8327, 8329-8334, 8349-8355, 8357-8369, 8371-8376, 8411, 8412, 8414, 8416, 8417, 8419, 8426, 8427, 8429, 8431, 8432, 8434, 12605-12616, 12623-12634, 12650-12655, or 12659-12664, or fragments and/or reverse complements thereof. In some embodiments, the sequence comprises a sequence having at least 80%, 85%, 90%, 91%, 92%, 93%, 94%, 95%, 96%, 97%, 98%, 99% or 100% identity to any of the following sequences: SEQ ID NOs: 8307-8313, 8315-8327, 8329-8334, 8349-8355, 8357-8369, 8371-8376, 8411, 8412, 8414, 8416, 8417, 8419, 8426, 8427, 8429, 8431, or 8432, 8434. In some embodiments, the sequence comprises a sequence having at least 80%, 85%, 90%, 91%, 92%, 93%, 94%, 95%, 96%, 97%, 98%, 99% or 100% identity to any of the following sequences: SEQ ID NOs: 12605-12616, 12623-12634, 12650-12655, or 12659-12664.

[0112] In some embodiments, the disclosure provides for a bisulfite-converted nucleotide sequence comprising a sequence having at least 80%, 85%, 90%, 91%, 92%, 93%, 94%, 95%, 96%, 97%, 98%, 99% or 100% identity to any of the following sequences: SEQ ID NOs: 8223-8250, 8265-8292, 12569-12580, or 12587-12598, or fragments and/or reverse complements thereof. In some embodiments, the sequence comprises a sequence having at least 80%, 85%, 90%, 91%, 92%, 93%, 94%, 95%, 96%, 97%, 98%, 99% or 100% identity to any of the following sequences: SEQ ID NOs: 8223-8250 or 8265-8292. In some embodiments, the sequence comprises a sequence having at least 80%, 85%, 90%, 91%, 92%, 93%, 94%, 95%, 96%, 97%, 98%, 99% or 100% identity to any of the following sequences: SEQ ID NOs: 12569-12580 or 12587-12598.

[0113] In some embodiments, the sample for use in any of the methods disclosed herein is a tissue sample taken from the subject. In some embodiments, the sample is tissue sample from the esophagus. In some embodiments, the sample is a biopsy or a brushing. In some embodiments, the sample is a biopsy or brushing of the esophagus. In some embodiments, the sample is a body fluid. In some embodiments, the body fluid is blood, serum, saliva, spit, stool, urine or an esophageal washing.

[0114] The present disclosure contemplates methods of selecting an individual to undergo a diagnostic procedure to determine the presence of Barrett's esophagus, Barrett's esophagus with dysplasia (e.g., Barrett's esophagus with low-grade or high-grade dysplasia), or of esophageal adenocarcinoma, by obtaining a biological sample from an individual, and determining in the sample the presence of DNA methylation in at least one of any of the sequences disclosed herein. In some embodiments, the disclosure provides for a method of selecting a subject for monitoring of esophageal neoplasia, wherein the presence of DNA methylation in at least one of any of the sequences disclosed herein is detected in a sample from the subject. In some embodiments, detection is achieved by any one or more of DNA sequencing, next generation sequencing, methylation specific PCR, methylation specific PCR combined with a fluorogenic hybridization probe, real time methylation specific PCR, or hybridization to an array. In some embodiments, the detection in the sample is indicative that the subject is at high risk of progression to esophageal neoplasia (e.g., esophageal cancer). In some embodiments, the subject is monitored by endoscopy. In some embodiments, a sample from a subject in which DNA methylation of at least one of any of the sequences disclosed herein is detected, is indicative that the subject should be administered a particular treatment. In some embodiments, the treatment is selected from the group consisting of endoscopic removal or ablation of an esophageal neoplasia, and/or surgery, radiation, or chemotherapy treatment of esophageal adenocarcinoma. In some embodiments, the sequence is any one or more sequence selected from the group consisting of a sequence having at least 80%, 85%, 90%, 91%, 92%, 93%, 94%, 95%, 96%, 97%, 98%, 99% or 100% identity to any of the following sequences: SEQ ID NOs: 1-856, 2569-3424, 5137-5926; 7507-7558, 7663-7714, 7819-7866, 7963-7990, 8047-8074, 8131-8156, 8209-8222, 8251-8264, 8293-8306, 8335-8348, 8405-8409, and 8420-8424, or fragments or complements thereof.

[0115] The present disclosure also contemplates methods of selecting an individual to undergo a diagnostic procedure to determine presence of Barrett's esophagus with low-grade dysplasia, Barrett's esophagus with high grade dysplasia or of esophageal adenocarcinoma, by obtaining a biological sample from an individual, and determining in the sample the presence of DNA methylation in at least one of any of the sequences disclosed herein. In some embodiments, the sequence is any one or more sequence selected from the group consisting of sequences having at least 80%, 85%, 90%, 91%, 92%, 93%, 94%, 95%, 96%, 97%, 98%, 99% or 100% identity to any of the following sequences: SEQ ID NOs: 8447-8818, 9563-9934, 10679-10972, 11561-11662, 11867-11968, 12173-12266, 12455-12466, 12491-12502, 12527-12538, 12563-12568, 12581-12586, 12599-12604, 12617-12622, 12647-12649, or 12656-12658, or fragments or complements thereof. The present disclosure further contemplates that the method may further comprise determining the status of somatic mutation(s) in TP53 in the sample. For example, a method comprising determining the status of methylation of chromosomal loci e.g., Up15-1, Up35-1, Up35-2, Up3, Up27, and Up10 in a sample; and determining the presence or absence of somatic mutation(s) in TP53 in the sample is contemplated.

[0116] The present disclosure further contemplates that the method may further comprise determining the status of somatic mutation(s) in TP53 in the sample. For example, a method comprising determining the status of methylation of chromosomal loci e.g., Up15-1, Up35-1, Up35-2, Up3, Up27, and Up10 in a sample; and determining the presence or absence of somatic mutation(s) in TP53 in the sample is contemplated. In certain embodiments, the method optionally further comprises detecting the presence or absence of a somatic mutation in TP53. In certain embodiments, the TP53 somatic mutation, as described herein, is any one or more mutation at any one or more amino acid residue corresponding to amino acid residue 72, 105, 108, 110, 113, 124, 127, 132, 144, 152, 163, 175, 183, 194,213,214,218,232,234, 248, 265, 273, 278, 306, 337, 347, or 639 of SEQ ID NO: 16205. In certain embodiments, the TP53 somatic mutation is any non-synonymous somatic mutation known in the art. In certain embodiments, the TP53 somatic mutation is any one or more mutation selected from the group consisting of: Leu194Arg, Gly105Asp, Arg273His, Tyr163His, Ile232Thr, Arg213Ter, Arg273His, Arg248Gln, Arg175His, Arg110delinsGlnSer, Ser183Ter, Arg248Gln, Arg337Leu, Lys132Arg, Leu265ThrfsTer7, Arg306Ter, Cys124TrpfsTer25, Pro72Arg, Val218Glu, His214Leu, Gln144Ter, Phe113Ser, Tyr234His, Ser127Phe, Pro278Ala, Ala347Thr, and Pro152Leu of SEQ ID NO: 16205 In certain embodiments, the TP53 mutation is any one or more non-synonymous somatic mutation at any one or more nucleotide position corresponding to nucleotide position 108, 215, 314, 338, 380, 395, 430, 455, 487, 524, 548, 581, 637, 639, 641, 653, 695, 700, 743, 818, 832, 916, 1010, or 1039 of SEQ ID NO: 16206.

[0117] The present disclosure also contemplates methods of selecting an individual to undergo a treatment for Barrett's esophagus, Barrett's esophagus with low grade dysplasia, Barrett's esophagus with high grade dysplasia or for esophageal adenocarcinoma, by obtaining a biological sample from an individual, and determining in the sample the presence of DNA methylation in at least one of any of the sequences disclosed herein. In some embodiments, the sequence is any one or more sequence selected from the group consisting of sequence having at least 80%, 85%, 90%, 91%, 92%, 93%, 94%, 95%, 96%, 97%, 98%, 99% or 100% identity to any of the following sequences: SEQ ID NOs: 1-856, 2569-3424, 5137-5926; 7507-7558, 7663-7714, 7819-7866, 7963-7990, 8047-8074, 8131-8156, 8209-8222, 8251-8264, 8293-8306, 8335-8348, 8405-8409, or 8420-8424, or fragments or complements thereof. In some embodiments, the present disclosure further contemplates that the method may further comprise determining the status of somatic mutation(s) in TP53 in the sample. For example, a method comprising determining the status of methylation of chromosomal loci e.g., Up15-1, Up35-1, Up35-2, Up3, Up27, and Up10 in a sample; and determining the presence or absence of somatic mutation(s) in TP53 in the sample is contemplated.

[0118] The present disclosure also contemplates methods of selecting an individual to undergo a treatment for Barrett's esophagus, Barrett's esophagus with low-grade dysplasia, Barrett's esophagus with high grade dysplasia or for esophageal adenocarcinoma, by obtaining a biological sample from an individual, and determining in the sample the presence of DNA methylation in at least one of any of the sequences disclosed herein. In some embodiments, the sequence is any one or more sequence selected from the group consisting of sequence having at least 80%, 85%, 90%, 91%, 92%, 93%, 94%, 95%, 96%, 97%, 98%, 99% or 100% identity to any of the following sequences: SEQ ID NOs: 8447-8818, 9563-9934, 10679-10972, 11561-11662, 11867-11968, 12173-12266, 12455-12466, 12491-12502, 12527-12538, 12563-12568,12581-12586, 12599-12604, 12617-12622, 12647-12649, or 12656-12658, or fragments or complements thereof. The present disclosure further contemplates that the method may further comprise determining the status of somatic mutation(s) in TP53 in the sample. For example, a method comprising determining the status of methylation of chromosomal loci e.g., Up15-1, Up35-1, Up35-2, Up3, Up27, and Up10 in a sample; and determining the presence or absence of somatic mutation(s) in TP53 in the sample is contemplated. The present disclosure also contemplates methods of selecting an individual to undergo enhanced surveillance for the development of Barrett's esophagus with low grade dysplasia, Barrett's esophagus with high grade dysplasia or of esophageal adenocarcinoma, by obtaining a biological sample from an individual, and determining in the sample the presence of DNA methylation in at least one of any of the sequences disclosed herein. In some embodiments, the sequence is any one or more sequence selected from the group consisting of a sequence having at least 80%, 85%, 90%, 91%, 92%, 93%, 94%, 95%, 96%, 97%, 98%, 99% or 100% identity to any of the following sequences: SEQ ID NOs: 8447-8818, 9563-9934, 10679-10972, 11561-11662, 11867-11968, 12173-12266, 12455-12466, 12491-12502, 12527-12538, 12563-12568, 12581-12586, 12599-12604, 12617-12622, 12647-12649, or 12656-12658, or fragments or complements thereof. The present disclosure further contemplates that the method may further comprise determining the status of somatic mutation(s) in TP53 in the sample. For example, a method comprising determining the status of methylation of chromosomal loci e.g., Up15-1, Up35-1, Up35-2, Up3, Up27, and Up10 in a sample; and determining the presence or absence of somatic mutation(s) in TP53 in the sample is contemplated. The present disclosure also contemplates methods of determining the response of an individual with esophageal cancer to therapy by obtaining a biological sample from an individual with esophageal cancer, and determining the presence of methylation in at least one of any of the sequences disclosed herein. In some embodiments, the sequence is any one or more sequence selected from the group consisting of sequences having at least 80%, 85%, 90%, 91%, 92%, 93%, 94%, 95%, 96%, 97%, 98%, 99% or 100% identity to any of the following sequences: SEQ ID NOs: 1-856, 2569-3424, 5137-5926; 7507-7558, 7663-7714, 7819-7866, 7963-7990, 8047-8074, 8131-8156, 8209-8222, 8251-8264, 8293-8306, 8335-8348, 8405-8409, or 8420-8424, 8447-8818, 9563-9934, 10679-10972; SEQ ID NOs: 11561-11662, 11867-11968, 12173-12266; SEQ ID NOs: 12455-12466, 12491-12502, 12527-12538, 12563-12568, 12581-12586, 12599-12604, 12617-12622, 12647-12649, and 12656-12658, or fragments or complements thereof. In some implementations, an increase in levels of methylation over time is indicative of disease progression and a need for a change in therapy (such as modifying the dosing regime of an exiting therapy, or administering a new therapeutic(s) either alone or in combination with the existing therapy), and an absence of increase in levels of methylation over time or decrease in levels of methylation over time is indicative that a change in therapy is not required. The present disclosure further contemplates that the method may further comprise determining the status of somatic mutation(s) in TP53 in the sample. For example, a method comprising determining the status of methylation of chromosomal loci e.g., Up15-1, Up35-1, Up35-2, Up3, Up27, and Up10 in a sample; and determining the presence or absence of somatic mutation(s) in TP53 in the sample is contemplated.

[0119] The present disclosure also contemplates method of distinguishing EAC and/or low/high grade dysplasia from BE by obtaining a biological sample from an individual, and determining in the sample the presence of DNA methylation in at least one of any of the sequences disclosed herein. In some embodiments, the sequence is any one or more sequence selected from the group consisting of sequences having at least 80%, 85%, 90%, 91%, 92%, 93%, 94%, 95%, 96%, 97%, 98%, 99% or 100% identity to any of the following sequences: SEQ ID NOs: 8447-8818, 9563-9934, 10679-10972; SEQ ID NOs: 11561-11662, 11867-11968, 12173-12266; SEQ ID NOs: 12455-12466, 12491-12502, 12527-12538, 12563-12568, 12581-12586, 12599-12604, 12617-12622, 12647-12649, and 12656-12658, or fragments or complements thereof. The present disclosure further contemplates that the method may further comprise determining the status of somatic mutation(s) in TP53 in the sample. For example, a method comprising determining the status of methylation of chromosomal loci e.g., Up15-1, Up35-1, Up35-2, Up3, Up27, and Up10 in a sample; and determining the presence or absence of somatic mutation(s) in TP53 in the sample is contemplated. In certain embodiments, the absence of methylation at Up15-1, Up35-1, Up35-2, Up3, Up27, and Up10; and the absence of a somatic mutation in TP53 may be indicative of non-dysplastic Barret's esophagus. In certain embodiments, the presence of methylation at any one of Up15-1, Up35-1, Up35-2, Up3, Up27, and Up10; or the presence of a somatic mutation in TP53 may be indicative of esophageal adenocarcinoma or of Barrett's with high grade dysplasia.

[0120] The present disclosure also contemplates method of distinguishing EAC and/or low/high grade dysplasia from BE by obtaining a biological sample from an individual, and determining in the sample the presence of DNA methylation in at least one of any of the sequences disclosed herein. In some embodiments, the sequence is any one or more sequence selected from the group consisting of sequences having at least 80%, 85%, 90%, 91%, 92%, 93%, 94%, 95%, 96%, 97%, 98%, 99% or 100% identity to any of the following sequences: SEQ ID NOs: 8447-8818, 9563-9934, 10679-10972; SEQ ID NOs: 11561-11662, 11867-11968, 12173-12266; SEQ ID NOs: 12455-12466, 12491-12502, 12527-12538, 12563-12568, 12581-12586, 12599-12604, 12617-12622, 12647-12649, and 12656-12658, or fragments or complements thereof. The present disclosure further contemplates that the method may further comprise determining the status of somatic mutation(s) in TP53 in the sample. For example, a method comprising determining the status of methylation of chromosomal loci e.g., Up15-1, Up35-1, Up35-2, Up3, Up27, and Up10 in a sample; and determining the presence or absence of somatic mutation(s) in TP53 in the sample is contemplated. In certain embodiments, the absence of methylation at Up15-1, Up35-1, Up35-2, Up3, Up27, and Up10; and the absence of a somatic mutation in TP53 may be indicative of non-dysplastic Barret's esophagus. In certain embodiments, the presence of methylation at any one of Up15-1, Up35-1, Up35-2, Up3, Up27, and Up10; or the presence of a somatic mutation in TP53 may be indicative of esophageal adenocarcinoma.

[0121] The present disclosure also contemplates a method of monitoring the progression (or regression) of esophageal neoplasias over time. The method involves detecting the methylation status of one or more nucleotide sequences selected from the group consisting of sequences having at least 80%, 85%, 90%, 91%, 92%, 93%, 94%, 95%, 96%, 97%, 98%, 99% or 100% identity to any of the following sequences: SEQ ID NOs: 1-856, 2569-3424, 5137-5926; 7507-7558, 7663-7714, 7819-7866, 7963-7990, 8047-8074, 8131-8156, 8209-8222, 8251-8264, 8293-8306, 8335-8348, 8405-8409, and 8420-8424, 8447-8818, 9563-9934, 10679-10972; SEQ ID NOs: 11561-11662, 11867-11968, 12173-12266; SEQ ID NOs: 12455-12466, 12491-12502, 12527-12538, 12563-12568, 12581-12586, 12599-12604, 12617-12622, 12647-12649, and 12656-12658, or fragments or complements thereof in samples from a subject at a first time and at a later time. In certain embodiments, neoplasia regression may be indicated by the absence of methylation in the nucleotide sequence taken at a later time and the presence of methylation in the nucleotide sequence taken at the first time. In certain embodiments, neoplasia progression may be indicated by the presence of methylation in the nucleotide sequence taken at a later time and the absence of methylation in the nucleotide sequence taken at the first time. The present disclosure further contemplates that the method may further comprise determining the status of somatic mutation(s) in TP53 in the samples. In some embodiments, neoplastic regression may be indicated by the presence of methylated chromosomal loci e.g., methylation of Up15-1, Up35-1, Up35-2, Up3, Up27, and/or Up10 or the presence of a somatic mutation in TP53 in a first sample; and the absence of methylated chromosomal loci e.g., unmethylated Up15-1, Up35-1, Up35-2, Up3, Up27, and Up10, and the absence of somatic mutation(s) in TP53 in a later sample. In some embodiments, neoplastic progression may be indicated by the presence of unmethylated chromosomal loci e.g., unmethylated Up15-1, Up35-1, Up35-2, Up3, Up27, and Up10; and the absence of somatic mutation(s) in TP53 in a first sample; and the presence of methylated chromosomal loci e.g., methylated Up15-1, Up35-1, Up35-2, Up3, Up27, and/or Up10, or the presence of a somatic mutation in TP53 in a later sample.

[0122] The present disclosure also provides sequences that will hybridize under highly stringent conditions to the nucleotide sequences of any one or more of SEQ ID NOs: 1-8444 and 8447-16204, or fragments or complements thereof. As discussed above, one of ordinary skill in the art will understand readily that appropriate stringency conditions which promote DNA hybridization can be varied. One of ordinary skill in the art will understand readily that appropriate stringency conditions which promote DNA hybridization can be varied. For example, one could perform the hybridization at 6.0× sodium chloride/sodium citrate (SSC) at about 45° C., followed by a wash of 2.0×SSC at 50° C. For example, the salt concentration in the wash step can be selected from a low stringency of about 2.0×SSC at 50° C. to a high stringency of about 0.2×SSC at 50° C. In addition, the temperature in the wash step can be increased from low stringency conditions at room temperature, about 22° C., to high stringency conditions at about 65° C. Both temperature and salt may be varied, or temperature or salt concentration may be held constant while the other variable is changed. In one embodiment, the disclosure provides nucleic acids which hybridize under low stringency conditions of 6×SSC at room temperature followed by a wash at 2×SSC at room temperature.

[0123] In other embodiments, the disclosure also provides the methylated forms of the nucleotide sequences of any one or more of SEQ ID NOs: 1-8444 and 8447-16204, or fragments thereof, wherein the cytosine bases of the CpG islands present in the sequences are methylated. In other words, the nucleotide sequences listed of any one or more of SEQ ID NOs: 1-8444 or 8447-16204 or fragments or complements thereof may be either in the methylated status (e.g., as seen in neoplasias) or in the unmethylated status (e.g., as seen in normal cells). In further embodiments, the nucleotide sequences of the disclosure can be isolated, recombinant, and/or fused with a heterologous nucleotide sequence, or in a DNA library.

[0124] In certain embodiments, the present disclosure provides bisulfite-converted nucleotide sequences, for example, bisulfite-converted sequences selected from any of the sequences disclosed herein. In some embodiments, the sequence is selected from the group consisting of sequences having at least 80%, 85%, 90%, 91%, 92%, 93%, 94%, 95%, 96%, 97%, 98%, 99% or 100% identity to any of the following sequences: SEQ ID NOs: 857-2568, 3425-5136, 5927-7506, 7559-7662, 7715-7818, 7867-7962, 7991-8046, 8075-8130, 8157-8208, 8223-8250, 8265-8292, 8307-8334, 8349-8376, 8410-8419, 8425-8434, and/or fragments thereof, and/or the reverse complements thereof. In yet other embodiments, the disclosure provides bisulfite-converted sequences selected from the group consisting of sequences having at least 80%, 85%, 90%, 91%, 92%, 93%, 94%, 95%, 96%, 97%, 98%, 99% or 100% identity to any of the following sequences: SEQ ID NOs: 8819-9562, 9935-10678, 10973-11560; 11663-11866, 11969-12172, 12267-12454; 12467-12490, 12503-12526, 12539-12562, 12569-12580, 12587-12598, 12605-12616, 12623-12634, 12650-12655, and 12659-12664, and/or fragments thereof, and/or the reverse complements thereof. In yet other embodiments, the disclosure provides bisulfite-converted sequences selected from the group consisting of sequences having at least 80%, 85%, 90%, 91%, 92%, 93%, 94%, 95%, 96%, 97%, 98%, 99% or 100% identity to any of the following sequences: SEQ ID NOs: 13145-14092, 14567-15514, 15561-15652; 15733-15892, 15973-16132, 16143-16162; 16169-16180, 16187-16198, and 16201-16204, and/or fragments thereof, and/or the reverse complements thereof.

[0125] A fragment of any of the nucleotide sequences disclosed herein may be of any length, so long as the methylation status of that nucleotide sequence may be determined. In some embodiments, the nucleotide sequence is at least 10, 15, 25, 30, 40, 50, 60, 70, 80, 90, 100, 110, 120, 130, 140, 150, 160, 170, 180, 190, 200, 250, 300, 350, 400, 450, 500, 600, 700, 800, 900, 1000, 1200, 1400, 1500, 1700, or 2000 nucleotides in length. In some embodiments, the nucleotide sequence is at least 10-2000, 10-1000, 10-500, 10-200, 10-150, 10-100, 50-2000, 50-1000, 50-500, 50-200, 50-150, 50-100, 80-2000, 80-1000, 80-500, 80-150, 80-100, 100-2000, 100-1000, 100-500, 100-200, or 100-150 nucleotides in length.

[0126] Such bisulfite-converted nucleotide sequences can be used for detecting the methylation status, for example, by an MSP reaction or by direct sequencing (e.g., next generation sequencing). These bisulfite-converted sequences are also of use for designing primers for MSP reactions that specifically detect methylated or unmethylated nucleotide sequences following bisulfite conversion. In yet other embodiments, the bisulfite-converted nucleotide sequences of the disclosure also include nucleotide sequences that will hybridize under highly stringent conditions to any nucleotide sequence of any one or more of SEQ ID NOs: 1-8444 and 8447-16204, or fragments or complements thereof.

[0127] In further aspects, the application provides methods for producing such bisulfite-converted nucleotide sequences, for example, the application provides methods for treating a nucleotide sequence with a bisulfite agent such that the unmethylated cytosine bases are converted to a different nucleotide base such as a uracil.

[0128] In yet other aspects, the application provides oligonucleotide primers for amplifying a region within the nucleic acid sequence of any one or more of SEQ ID NOs: 1-8444 and 8447-16204. In certain aspects, a pair of the oligonucleotide primers can be used in a detection assay, such as the HpaII assay. In certain aspects, primers used in an MSP reaction can specifically distinguish between methylated and non-methylated DNA.

[0129] The primers of the disclosure have sufficient length and appropriate sequence so as to provide specific initiation of amplification nucleic acids. Primers of the disclosure are designed to be “substantially” complementary to each strand of the nucleic acid sequence to be amplified. In some embodiments, the primer is selected from the group consisting of sequences having 80%, 85%, 90%, 91%, 92%, 93%, 94%, 95%, 96%, 97%, 98%, 99%, or 100% identity to any of SEQ ID NOs: 8377-8404, 8435-8446, 12635-12646, and 12665-12670. In some embodiments, the primer comprises at least 1, 2, 3, 4, 5, 6, 7, 8, 9, 10, 11, 12, 13, 14, 15, 16, 17, 18, 19, 20, 21, 22, 23, 24, 25, 26, 27, 28, 29, 30, 31, 32, 33, 34, or 35 consecutive nucleotides of any of the primer sequences of SEQ ID NOs: 8377-8404, 8435-8446, 12635-12646, and 12665-12670. While exemplary primers include the sequences of any sequence having at least 80%, 85%, 90%, 91%, 92%, 93%, 94%, 95%, 96%, 97%, 98%, 99%, or 100% identity to any of SEQ ID NOs: 8377-8404, 8435-8446, 12635-12646, and 12665-12670, or fragments thereof, it is understood that any primers that hybridize with the bisulfite-converted sequence of any one or more of SEQ ID NOs: 1-8444 and 8447-16204 are included within the scope of this disclosure and is useful in the method of the disclosure for detecting methylated nucleic acid, as described. Similarly, it is understood that any primers that would serve to amplify a methylation sensitive restriction site or sites within the differentially methylated region of the informative loci of any of the sequences of SEQ ID NOs: 1-8444 or 8447-16204, or fragments or complements thereof are included within the scope of this disclosure and is useful in the method of the disclosure for detecting nucleic methylated nucleic acid, as described.

[0130] The oligonucleotide primers of the disclosure may be prepared by using any suitable method, such as conventional phosphotriester and phosphodiester methods or automated embodiments thereof. In one such automated embodiment, diethylphosphoramidites are used as starting materials and may be synthesized as described by Beaucage, et al. (Tetrahedron Letters, 22:1859-1862, 1981). One method of synthesizing oligonucleotides on a modified solid support is described in U.S. Pat. No. 4,458,066.

### IV. Assays and Drug Screening Methodologies

[0131] In certain aspects, the application provides assays and methods using any of the informative loci, or bisulfite converted methylated or unmethylated sequences thereof, disclosed herein. In some embodiments, the informative loci comprise a sequence having at least 80%, 85%, 90%, 91%, 92%, 93%, 94%, 95%, 96%, 97%, 98%, 99%, or 100% identity to any of the sequences of SEQ ID NOs: 1-428, 2569-2996, 5137-5531, 7507-7532, 7663-7668, 7819-7842, 7963-7976, 8047-8060, 8131-8143, 8209-8222, 8293-8306, 8405-8409, 8447-8632, 9563-9748, 10679-10825, 11561-11611, 11867-11917, 12173-12219, 12455-12460, 12491-12496, 12527-12532, 12563-12568, 12599-12604, 12647-12649, 12671-12908, 14093-14329, 15515-15537, 15653-15692, 15893-15932, 16133-16137, 16163-16165, 16181-16183, 16199, 429-856, 2997-3424, 5532-5926, 7533-7558, 7689-7714, 7843-7866, 7977-7990, 8061-8074, 8144-8156, 8251-8264, 8335-8348, 8420-8424, 8633-8818, 9749-9934, 10826-10972, 11612-11662, 11918-11968, 12220-12266, 12461-12466, 12497-12502, 12533-12538, 12581-12586, 12617-12622, 12656-12658, 12909-13144, 14330-14566, 15538-15560, 15693-15732, 15933-15972, 16138-16142, 16166-16168, 16184-16186 or 16200 or any fragments or complements thereof. In some embodiments, the informative loci are used as molecular markers to distinguish between healthy cells and metaplastic cells (e.g., Barrett's esophageal cells). In some embodiments, the informative loci are used as molecular markers to distinguish between healthy cells and neoplastic cells (e.g., cancer cells). In particular embodiments, the informative loci are used as molecular markers to distinguish between healthy cells and esophageal adenocarcinoma cells. In some embodiments, the informative loci are used as molecular markers to distinguish between Barrett's esophagus cells and cancer cells. In some embodiments, the informative loci are used as molecular markers to distinguish between Barrett's esophagus cells and esophageal adenocarcinoma cells. For example, in one embodiment, the application provides methods and assays using any of the informative loci comprising a sequence having at least 80%, 85%, 90%, 91%, 92%, 93%, 94%, 95%, 96%, 97%, 98%, 99%, or 100% identity to any one or more of SEQ ID NOs: 8447-8818, 9563-9934, 10679-10972, 11561-11662, 11867-11968, 12173-12266, 12455-12466, 12491-12502, 12527-12538, 12563-12568, 12581-12586, 12599-12604, 12617-12622, 12647-12649, OR 12656-12658, or any fragments or complements thereof as markers that distinguish between healthy cells and neoplasia cells. In other embodiments, the application provides methods and assays using the informative loci comprising a sequence having at least 80%, 85%, 90%, 91%, 92%, 93%, 94%, 95%, 96%, 97%, 98%, 99%, or 100% identity to any one or more of SEQ ID NOs: 1-856, 2569-3424, 5137-5926, 7507-7558, 7663-7714, 7819-7866, 7963-7990, 8047-8047, 8131-8156, 8209-8222, 8251-8264, 8293-8306, 8335-8348, 8405-8409, 8420-8424, 8447-8818, 9563-9934, 10679-10972, 11561-11662, 11867-11968, 12173-12266, 12455-12466, 12491-12502, 12527-12538, 12563-12568, 12581-12586, 12599-12604, 12617-12622, 12647-12649, 12656-12658, 12671-13144, 14093-14566, 15515-15560, 15653-15732, 15893-15972, 16135-16142, 16163-16168, 16181-16186 and/or 16199-16200 or any fragments or complements thereof as markers that distinguish between healthy cells and cells derived from neoplasias of the upper gastrointestinal tract. In one aspect, a molecular marker of the invention is a differentially methylated sequence of an informative locus. In certain aspects, the application provides assays and methods using the informative loci comprising a sequence having at least 80%, 85%, 90%, 91%, 92%, 93%, 94%, 95%, 96%, 97%, 98%, 99%, or 100% identity to any one or more of SEQ ID NOs: 1-856, 2569-3424, 5137-5926, 7507-7558, 7663-7714, 7819-7866, 7963-7990, 8047-8047, 8131-8156, 8209-8222, 8251-8264, 8293-8306, 8335-8348, 8405-8409, 8420-8424, 8447-8818, 9563-9934, 10679-10972, 11561-11662, 11867-11968, 12173-12266, 12455-12466, 12491-12502, 12527-12538, 12563-12568, 12581-12586, 12599-12604, 12617-12622, 12647-12649, 12656-12658, 12671-13144, 14093-14566, 15515-15560, 15653-15732, 15893-15972, 16135-16142, 16163-16168, 16181-16186 and/or 16199-16200 or any fragments or complements thereof in combination with the status of somatic mutation(s) in TP53 as molecular markers that distinguish between healthy cells and cancer cells. For example, in one embodiment, the application provides methods and assays using the informative loci comprising a sequence having at least 80%, 85%, 90%, 91%, 92%, 93%, 94%, 95%, 96%, 97%, 98%, 99%, or 100% identity to any one or more of SEQ ID NOs: 1-856, 2569-3424, 5137-5926, 7507-7558, 7663-7714, 7819-7866, 7963-7990, 8047-8047, 8131-8156, 8209-8222, 8251-8264, 8293-8306, 8335-8348, 8405-8409, 8420-8424, 8447-8818, 9563-9934, 10679-10972, 11561-11662, 11867-11968, 12173-12266, 12455-12466, 12491-12502, 12527-12538, 12563-12568, 12581-12586, 12599-12604, 12617-12622, 12647-12649, 12656-12658, 12671-13144, 14093-14566, 15515-15560, 15653-15732, 15893-15972, 16135-16142, 16163-16168, 16181-16186 and/or 16199-16200 or any fragments or complements thereof and the status of somatic mutation(s) in TP53 as markers that distinguish between healthy cells and neoplasia cells (e.g. cancer/esophageal adenocarcinoma cells). In other embodiments, the application provides methods and assays using the informative loci disclosed herein (e.g., chromosomal loci Up15-1, Up35-1, Up35-2, Up3, Up27, and Up10) and the status of somatic mutation(s) in TP53 as markers that distinguish between healthy cells and cells derived from neoplasias of the upper gastrointestinal tract. In one aspect, a molecular marker of the invention is a differentially methylated sequence of an informative locus.

[0132] In certain embodiments, the application provides assays for detecting differentially methylated nucleotide sequences. Thus, a differentially methylated nucleotide sequence, in its methylated state, can serve as a target for detection using various methods described herein and the methods that are well within the purview of the skilled artisan in view of the teachings of this application.

[0133] In certain aspects, such methods for detecting methylated nucleotide sequences are based on treatment of genomic DNA with a chemical compound which converts non-methylated C, but not methylated C (i.e., 5mC), to a different nucleotide base. One such compound is sodium bisulfite (also referred to simply as “bisulfite” herein), which converts C, but not 5mC, to U. Methods for bisulfite treatment of DNA are known in the art (Herman, et al., 1996, Proc Natl Acad Sci USA, 93:9821-6; Herman and Baylin, 1998, Current Protocols in Human Genetics, N. E. A. Dracopoli, ed., John Wiley & Sons, 2:10.6.1-10.6.10; U.S. Pat. No. 5,786,146). To illustrate, when a DNA molecule that contains unmethylated C nucleotides is treated with sodium bisulfite to become a compound-converted DNA, the sequence of that DNA is changed (C→U). Detection of the U in the converted nucleotide sequence is indicative of an unmethylated C.

[0134] The different nucleotide base (e.g., U) present in compound-converted nucleotide sequences can subsequently be detected in a variety of ways. In a particular embodiment, the present invention provides a method of detecting U in compound-converted DNA sequences by using “methylation sensitive PCR” (MSP) (see, e.g., Herman, et al., 1996, Proc. Natl. Acad. Sci. USA, 93:9821-9826; U.S. Pat. Nos. 6,265,171; 6,017,704; 6,200,756). In MSP, one set of primers (i.e., comprising a forward and a reverse primer) amplifies the compound-converted template sequence if C bases in CpG dinucleotides within the DNA are methylated. This set of primers is called “methylation-specific primers.” Another set of primers amplifies the compound-converted template sequence if C bases in CpG dinucleotides within the 5′ flanking sequence are not methylated. This set of primers is called “unmethylation-specific primers.” In MSP, the reactions use the compound-converted DNA from a sample in a subject.

[0135] In assays for methylated DNA, methylation-specific primers are used. In the case where C within CpG dinucleotides of the target sequence of the DNA are methylated, the methylation-specific primers will amplify the compound-converted template sequence in the presence of a polymerase and an MSP product will be produced. If C within CpG dinucleotides of the target sequence of the DNA is not methylated, the methylation-specific primers will not amplify the compound-converted template sequence in the presence of a polymerase and an MSP product will not be produced. In some embodiments, any of the bisulfite converted methylated sequences disclosed herein is used as a marker for a particular indication.

[0136] It is often also useful to run a control reaction for the detection of unmethylated DNA. The reaction uses the compound-converted DNA from a sample in a subject and unmethylation-specific primers are used. In the case where C within CpG dinucleotides of the target sequence of the DNA are unmethylated, the unmethylation specific primers will amplify the compound-converted template sequence in the presence of a polymerase and an MSP product will be produced. If C within CpG dinucleotides of the target sequence of the DNA is methylated, the unmethylation-specific primers will not amplify the compound-converted template sequence in the presence of a polymerase and an MSP product will not be produced. Note that a biologic sample will often contain a mixture of both neoplastic cells that give rise to a signal with methylation specific primers, and normal cellular elements that give rise to a signal with unmethylation-specific primers. The unmethylation specific signal is often of use as a control reaction, but does not in this instance imply the absence of neoplasia as indicated by the positive signal derived from reactions using the methylation specific primers. In some embodiments, any of the bisulfite converted unmethylated sequences disclosed herein are used as controls. In some embodiments, the unmethylated control sequences are any of the bisulfite converted sequences of SEQ ID NOs: 857-1284, 3425-3852, 5927-6321, 7559-7584, 7715-7740, 7867-7890, 7991-8004, 8075-8088, 8157-8169, 8223-8236, 8307-8320, 8410-8414, 8819-9004, 9935-10120, 10973-11119, 11663-11713, 11969-12019, 12267-12313, 12467-12472, 12503-12508, or 12539-12544, 12569-12574, 12605-12610, 12650-12652,1713-2140, 4281-4708, 6717-7111, 7611-7636, 7767-7792, 7915-7938, 8019-8032, 8103-8116, 8183-8195, 8265-8278, 8349-8362, 8425-8429, 9191-9376, 10307-10492, 11267-11413, 11765-11815, 12071-12121, 12361-12407, 12479-12484, 12515-12520, 12551-12556, 12587-12592, 12623-12628, or 12659-12661 in which every “Y” position is a “T.”

[0137] Primers for a MSP reaction are derived from the compound-converted template sequence. Herein, “derived from” means that the sequences of the primers are chosen such that the primers amplify the compound-converted template sequence in a MSP reaction. Each primer comprises a single-stranded DNA fragment which is at least 8 nucleotides in length. In some embodiments, the primers are less than 50 nucleotides in length, or in some embodiments, from 15 to 35 nucleotides in length. Because the compound-converted template sequence can be either the Watson strand or the Crick strand of the double-stranded DNA that is treated with sodium bisulfite, the sequences of the primers is dependent upon whether the Watson or Crick compound-converted template sequence is chosen to be amplified in the MSP. Either the Watson or Crick strand can be chosen to be amplified.

[0138] The compound-converted template sequence, and therefore the product of the MSP reaction, is, in some embodiments, between 20 to 3000 nucleotides in length. In other embodiments, the product of the MSP reaction is between 50 to 1000 nucleotides in length. In other embodiments, the product of the MSP reaction is between 50 to 500 nucleotides in length. In other embodiments, the product of the MSP reaction is between 80-150 nucleotides in length. In some embodiments, the product of the MSP reaction is at least 20, 30, 40, 50, 60, 70, 80, 90, 100, 110, 120, 130, 140, 150, 160, 170, 180, 190, 200, 210, 220, 230, 240 or 250 nucleotides in length. In some embodiments, the methylation-specific primers result in an MSP product of a different length than the MSP product produced by the unmethylation-specific primers.

[0139] A variety of methods can be used to determine if an MSP product has been produced in a reaction assay. One way to determine if an MSP product has been produced in the reaction is to analyze a portion of the reaction by agarose gel electrophoresis. For example, a horizontal agarose gel of from 0.6 to 2.0% agarose is made and a portion of the MSP reaction mixture is electrophoresed through the agarose gel. After electrophoresis, the agarose gel is stained with ethidium bromide. MSP products are visible when the gel is viewed during illumination with ultraviolet light. By comparison to standardized size markers, it is determined if the MSP product is of the correct expected size.

[0140] Other methods can be used to determine whether a product is made in an MSP reaction. One such method is called “real-time PCR.” Real-time PCR utilizes a thermal cycler (i.e., an instrument that provides the temperature changes necessary for the PCR reaction to occur) that incorporates a fluorimeter (i.e. an instrument that measures fluorescence). The real-time PCR reaction mixture also contains a reagent whose incorporation into a product can be quantified and whose quantification is indicative of copy number of that sequence in the template. One such reagent is a fluorescent dye, called SYBR Green I (Molecular Probes, Inc.; Eugene, Oregon) that preferentially binds double-stranded DNA and whose fluorescence is greatly enhanced by binding of double-stranded DNA. When a PCR reaction is performed in the presence of SYBR Green I, resulting DNA products bind SYBR Green I and fluorescence. The fluorescence is detected and quantified by the fluorimeter. Such technique is particularly useful for quantification of the amount of the product in the PCR reaction. Additionally, the product from the PCR reaction may be quantitated in “real-time PCR” by the use of a variety of probes that hybridize to the product including TaqMan probes and molecular beacons. Quantitation may be on an absolute basis, or may be relative to a constitutively methylated DNA standard, or may be relative to an unmethylated DNA standard. In one instance the ratio of methylated derived product to unmethylated derived product may be constructed.

[0141] Methods for detecting methylation of the DNA according to the present disclosure are not limited to MSP, and may cover any assay for detecting DNA methylation. Another example method of detecting methylation of the DNA is by using “methylation-sensitive” restriction endonucleases. Such methods comprise treating the genomic DNA isolated from a subject with a methylation-sensitive restriction endonuclease and then using the restriction endonuclease-treated DNA as a template in a PCR reaction. Herein, methylation-sensitive restriction endonucleases recognize and cleave a specific sequence within the DNA if C bases within the recognition sequence are not methylated. If C bases within the recognition sequence of the restriction endonuclease are methylated, the DNA will not be cleaved. Examples of such methylation-sensitive restriction endonucleases include, but are not limited to HpaII, SmaI, SacII, EagI, BstUI, and BssHII. In this technique, a recognition sequence for a methylation-sensitive restriction endonuclease is located within the template DNA, at a position between the forward and reverse primers used for the PCR reaction. In the case that a C base within the methylation-sensitive restriction endonuclease recognition sequence is not methylated, the endonuclease will cleave the DNA template and a PCR product will not be formed when the DNA is used as a template in the PCR reaction. In the case that a C base within the methylation-sensitive restriction endonuclease recognition sequence is methylated, the endonuclease will not cleave the DNA template and a PCR product will be formed when the DNA is used as a template in the PCR reaction. Therefore, methylation of C bases can be determined by the absence or presence of a PCR product (Kane, et al., 1997, Cancer Res, 57:808-11). No sodium bisulfite is used in this technique.

[0142] Yet another exemplary method of detecting methylation of the DNA is called the modified MSP, which method utilizes primers that are designed and chosen such that products of the MSP reaction are susceptible to digestion by restriction endonucleases, depending upon whether the compound-converted template sequence contains CpG dinucleotides or UpG dinucleotides.

[0143] Yet other methods for detecting methylation of the DNA include the MS-SnuPE methods. This method uses compound-converted DNA as a template in a primer extension reaction wherein the primers used produce a product, dependent upon whether the compound-converted template contains CpG dinucleotides or UpG dinucleotides (see e.g., Gonzalgo, et al., 1997, Nucleic Acids Res., 25:2529-31).

[0144] Another exemplary method of detecting methylation of the DNA is called COBRA (i.e., combined bisulfite restriction analysis). This method has been routinely used for DNA methylation detection and is well known in the art (see, e.g., Xiong, et al., 1997, Nucleic Acids Res, 25:2532-4). In this technique, methylation-sensitive restriction endonucleases recognize and cleave a specific sequence within the DNA if C bases within the recognition sequence are methylated. If C bases within the recognition sequence of the restriction endonuclease are not methylated, the DNA will not be cleaved. In some embodiments, the method utilizes methylation-sensitive restriction endonucleases.

[0145] Another exemplary method of detecting methylation of DNA requires hybridization of a compound converted DNA to arrays that include probes that hybridize to sequences derived from a methylated template.

[0146] Another exemplary method of detecting methylation of DNA includes precipitation of methylated DNA with antibodies that bind methylated DNA or with other proteins that bind methylated DNA, and then detection of DNA sequences in the precipitate. The detection of DNA could be done by PCR based methods, by hybridization to arrays, or by other methods known to those skilled in the art.

[0147] Another exemplary method of detecting methylated DNA is bisulfite sequencing that involves amplification of a target region of bisulfite converted DNA using methylation indifferent PCR primers that amplify converted DNAs derived from both methylated and unmethylated templates. The methylation indifferent primers are often designed to be both methylation indifferent and bisulfite specific, i.e. to amplify only bisulfite converted target DNAs and not to amplify non-converted target sequences. In some embodiments, the amplified DNAs then may be characterized by Next Generation Sequencing methods that allow each cytosine base in the original template to be assessed within each DNA sequence read for the presence of methylation (retention of cytosine) or the absence of methylation (conversion to thymidine). The percent of methylation at each cytosine base in the original template can then be calculated by the percent of DNA reads in which the cytosine is preserved as cytosine versus is converted to thymidine. Similarly, the percent of methylation across a region of interest can be assessed by determining a rule for assessing the region as methylated or unmethylated in an individual DNA read (i.e. determining a cutoff for methylation in the region that will categorize the region as “methylated”), and then determining the percent of DNA reads in which the region qualifies as methylated.

[0148] In certain embodiments, the disclosure provides methods that involve directly sequencing the product resulting from an MSP reaction to determine if the compound-converted template sequence contains CpG dinucleotides or UpG dinucleotides. Molecular biology techniques such as directly sequencing a PCR product are well known in the art.

[0149] In some embodiments, methylation of DNA may be measured as a percentage of total DNA. High levels of methylation may be 1-100% methylation, for example, 1%, 10%, 20%, 30%, 40%, 50%, 60%, 70%, 80%, 90%, or 100% methylation. Low levels of methylation may be 0%-0.99% methylation, for example, 0%, 0.1%, 0.5%, 0.6%, 0.7%, 0.8%, 0.9%. At least some normal tissues, for example, normal esophagus samples, may not have any detectable methylation.

[0150] The skilled artisan will appreciate that the present disclosure is based in part, on the recognition that any one of the informative loci disclosed herein may include nucleotide sequences that encode polypeptides that, for example, may function as a tumor suppressor gene. Accordingly, the application further provides methods for detecting such polypeptides in cell samples. In some embodiments, the disclosure provides detection methods by assaying such polypeptides so as to determine whether a patient has or does not have a disease condition. Further, such a disease condition may be characterized by decreased levels of such polypeptides. In certain embodiments, the disclosure provides methods for determining whether a patient is or is not likely to have cancer by detecting such polypeptides. In further embodiments, the disclosure provides methods for determining whether the patient is having a relapse or determining whether a patient's cancer is responding to treatment.

[0151] Optionally, such methods involve obtaining a quantitative measure of the protein in the sample. In view of this specification, one of skill in the art will recognize a wide range of techniques that may be employed to detect and optionally quantitate the presence of a protein. In some embodiments, a protein is detected with an antibody. In many embodiments, an antibody-based detection assay involves bringing the sample and the antibody into contact so that the antibody has an opportunity to bind to proteins having the corresponding epitope. In many embodiments, an antibody-based detection assay also typically involves a system for detecting the presence of antibody-epitope complexes, thereby achieving a detection of the presence of the proteins having the corresponding epitope. Antibodies may be used in a variety of detection techniques, including enzyme-linked immunosorbent assays (ELISAs), immunoprecipitations, Western blots. Antibody-independent techniques for identifying a protein may also be employed. For example, mass spectroscopy, particularly coupled with liquid chromatography, permits detection and quantification of large numbers of proteins in a sample. Two-dimensional gel electrophoresis may also be used to identify proteins, and may be coupled with mass spectroscopy or other detection techniques, such as N-terminal protein sequencing. RNA aptamers with specific binding for the protein of interest may also be generated and used as a detection reagent. Samples should generally be prepared in a manner that is consistent with the detection system to be employed. For example, a sample to be used in a protein detection system should generally be prepared in the absence of proteases. Likewise, a sample to be used in a nucleic acid detection system should generally be prepared in the absence of nucleases. In many instances, a sample for use in an antibody-based detection system will not be subjected to substantial preparatory steps. For example, urine may be used directly, as may saliva and blood, although blood will, in certain embodiments, be separated into fractions such as plasma and serum.

[0152] In certain embodiments, a method of the disclosure comprises detecting the presence of an informative loci-expressed nucleic acid, such as an mRNA, in a sample. Optionally, the method involves obtaining a quantitative measure of the informative loci-expressed nucleic acid in the sample. In view of this specification, one of skill in the art will recognize a wide range of techniques that may be employed to detect and optionally quantitate the presence of a nucleic acid. Nucleic acid detection systems generally involve preparing a purified nucleic acid fraction of a sample, and subjecting the sample to a direct detection assay or an amplification process followed by a detection assay. Amplification may be achieved, for example, by polymerase chain reaction (PCR), reverse transcriptase (RT) and coupled RT-PCR. Detection of a nucleic acid is generally accomplished by probing the purified nucleic acid fraction with a probe that hybridizes to the nucleic acid of interest, and in many instances, detection involves an amplification as well. Northern blots, dot blots, microarrays, quantitative PCR, and quantitative RT-PCR are all well known methods for detecting a nucleic acid in a sample.

[0153] In certain embodiments, the disclosure provides nucleic acid probes that bind specifically to an informative loci nucleic acid. Such probes may be labeled with, for example, a fluorescent moiety, a radionuclide, an enzyme or an affinity tag such as a biotin moiety. For example, the TaqMan® system employs nucleic acid probes that are labeled in such a way that the fluorescent signal is quenched when the probe is free in solution and bright when the probe is incorporated into a larger nucleic acid.

[0154] Immunoscintigraphy using monoclonal antibodies directed at the informative loci may be used to detect and/or diagnose a cancer. For example, monoclonal antibodies against the informative loci labeled with ⁹⁹Technetium, ¹¹¹Indium, ¹²⁵Iodine-may be effectively used for such imaging. As will be evident to the skilled artisan, the amount of radioisotope to be administered is dependent upon the radioisotope. Those having ordinary skill in the art can readily formulate the amount of the imaging agent to be administered based upon the specific activity and energy of a given radionuclide used as the active moiety. Typically 0.1-100 millicuries per dose of imaging agent, 1-10 millicuries, or often 2-5 millicuries are administered. Thus, compositions according to the present invention useful as imaging agents comprising a targeting moiety conjugated to a radioactive moiety comprise 0.1-100 millicuries, in some embodiments 1-10 millicuries, in some embodiments 2-5 millicuries, in some embodiments 1-5 millicuries.

[0155] A variety of methods can be used to determine if TP53 contains a somatic mutation, as will be evident to the skilled artisan. In some embodiments, the TP53 gene or protein sequence is determined and any change in the determined sequence relative to the wildtype sequence is detected. In some embodiments, the TP53 gene sequence is determined by PCR, RT-PCR, Northern Blot, Southern Blot, and/or in situ hybridization. Another way to determine if TP53 contains a somatic mutation may involve the use of an antibody-based detection assay (e.g. ELISA, immunohistochemistry, and/or Western Blot). In some embodiments, the antibody-based detection assay utilizes an antibody that binds to a mutant TP53 protein with a tighter affinity than it binds to a wildtype TP53 protein. The skilled artisan will also readily appreciate methods of determining somatic mutations in TP53 based on the disclosures of U.S. Pat. Nos. 5,843,654, 5,620,848, EP0390323 and U.S. Pat. No. 5,527,676, all of which are herein incorporated by reference in their entirely.

[0156] In some embodiments, the disclosure provides for a device useful for detecting the methylation status of any of the informative loci, or fragments or complements thereof, disclosed herein. In some embodiments, the disclosure provides for a kit comprising components useful for detecting the methylation status of the informative loci, or fragments, or complements thereof, disclosed herein. In some embodiments, the kit comprises a swallowable balloon for collecting an esophageal sample from the subject. In some embodiments, the kit comprises any of the swallowable balloon devices disclosed in WO 2015/089422, which is incorporated herein in its entirety.

[0157] In certain embodiments, the present disclosure provides drug screening assays for identifying test compounds which potentiate the tumor suppressor function of polypeptides encoded by sequences located in the informative loci disclosed herein. In one aspect, the assays detect test compounds which potentiate the expression level of polypeptides encoded by sequences located in the informative loci disclosed herein. In another aspect, the assays detect test compounds which inhibit the methylation of DNA. In certain embodiments, drug screening assays can be generated which detect test compounds on the basis of their ability to interfere with stability or function of polypeptides encoded by sequences located in the informative loci disclosed herein.

[0158] A variety of assay formats may be used and, in light of the present disclosure, those not expressly described herein will nevertheless be considered to be within the purview of ordinary skill in the art. Assay formats can approximate such conditions as protein expression level, methylation status of nucleotide sequences, tumor suppressing activity, and may be generated in many different forms. In many embodiments, the disclosure provides assays including both cell-free systems and cell-based assays which utilize intact cells.

[0159] Compounds to be tested can be produced, for example, by bacteria, yeast or other organisms (e.g., natural products), produced chemically (e.g., small molecules, including peptidomimetics), or produced recombinantly. The efficacy of the compound can be assessed by generating dose response curves from data obtained using various concentrations of the test compound. Moreover, a control assay can also be performed to provide a baseline for comparison. In the control assay, the formation of complexes is quantitated in the absence of the test compound.

[0160] In many drug screening programs which test libraries of compounds and natural extracts, high throughput assays are desirable in order to maximize the number of compounds surveyed in a given period of time. Assays of the present invention which are performed in cell-free systems, such as may be developed with purified or semi-purified proteins or with lysates, are often preferred as “primary” screens in that they can be generated to permit rapid development and relatively easy detection of an alteration in a molecular target which is mediated by a test compound. Moreover, the effects of cellular toxicity and/or bioavailability of the test compound can be generally ignored in the in vitro system, the assay instead being focused primarily on the effect of the drug on the molecular target as may be manifest in an alteration of binding affinity with other proteins or changes in enzymatic properties of the molecular target.

[0161] In certain embodiments, test compounds identified from these assays may be used in a therapeutic method of treating cancer.

[0162] Still another aspect of the application provides transgenic non-human animals which express a gene located within any one of the informative loci disclosed herein, or which have had one or more of such genomic gene(s) disrupted in at least one of the tissue or cell-types of the animal.

[0163] In another aspect, the application provides an animal model for cancer, which has a mis-expressed allele of a gene located within any one of the informative loci disclosed herein. Such a mouse model can then be used to study disorders arising from mis-expression of genes located within any one of the informative loci disclosed herein.

[0164] Genetic techniques which allow for the expression of transgenes can be regulated via site-specific genetic manipulation in vivo are known to those skilled in the art. For instance, genetic systems are available which allow for the regulated expression of a recombinase that catalyzes the genetic recombination a target sequence. As used herein, the phrase “target sequence” refers to a nucleotide sequence that is genetically recombined by a recombinase. The target sequence is flanked by recombinase recognition sequences and is generally either excised or inverted in cells expressing recombinase activity. Recombinase catalyzed recombination events can be designed such that recombination of the target sequence results in either the activation or repression of expression of the polypeptides. For example, excision of a target sequence which interferes with the expression of a recombinant gene can be designed to activate expression of that gene. This interference with expression of the protein can result from a variety of mechanisms, such as spatial separation of the gene from the promoter element or an internal stop codon. Moreover, the transgene can be made wherein the coding sequence of the gene is flanked recombinase recognition sequences and is initially transfected into cells in a 3′ to 5′ orientation with respect to the promoter element. In such an instance, inversion of the target sequence will reorient the subject gene by placing the 5′ end of the coding sequence in an orientation with respect to the promoter element which allow for promoter driven transcriptional activation.

[0165] In an illustrative embodiment, either the cre/loxP recombinase system of bacteriophage P1 (Lakso et al., (1992) Proc. Natl. Acad. Sci. USA 89:6232-6236; Orban et al., (1992) Proc. Natl. Acad. Sci. USA 89:6861-6865) or the FLP recombinase system of Saccharomyces cerevisiae (O'Gorman et al., (1991) Science 251:1351-1355; PCT publication WO 92/15694) can be used to generate in vivo site-specific genetic recombination systems. Cre recombinase catalyzes the site-specific recombination of an intervening target sequence located between loxP sequences. loxP sequences are 34 base pair nucleotide repeat sequences to which the Cre recombinase binds and are required for Cre recombinase mediated genetic recombination. The orientation of loxP sequences determines whether the intervening target sequence is excised or inverted when Cre recombinase is present (Abremski et al., (1984) J. Biol. Chem. 259:1509-1514); catalyzing the excision of the target sequence when the loxP sequences are oriented as direct repeats and catalyzes inversion of the target sequence when loxP sequences are oriented as inverted repeats.

### V. Subjects and Samples

[0166] In certain aspects, the invention relates to a subject suspected of having or has: a cancer, a metaplasia, or a neoplasia of the upper gastrointestinal tract (e.g., esophageal cancer). Alternatively, a subject may be undergoing routine screening and may not necessarily be suspected of having such metaplasia or neoplasia. In some embodiments, the subject is a human subject, and the neoplasia is a neoplasia of the upper gastrointestinal tract, such as the esophagus. In some embodiments, the subject is a human subject, and the metaplasia is Barrett's esophagus.

[0167] Assaying for biomarkers discussed above in a sample from subjects not known to have, e.g., a metaplasia or neoplasia of the upper or lower gastrointestinal tract can aid in diagnosis of such a metaplasia or neoplasia in the subject. To illustrate, detecting the methylation status of the nucleotide sequences by MSP can be used by itself, or in combination with detecting the somatic mutation status of TP53 or other various assays, to improve the sensitivity and/or specificity for detecting, e.g., a neoplasia of the upper or lower gastrointestinal tract. In some embodiments, such detection is made at an early stage in the development of cancer, so that treatment is more likely to be effective.

[0168] In some embodiments, an informative loci in a subject is considered “methylated” for the purposes of determining whether or not the subject is prone to developing and/or has developed a metaplasia in the esophagus (e.g., Barrett's esophagus) or neoplasia (e.g., Barrett's esophagus with dysplasia such as high-grade or low-grade dysplasia) (e.g., esophageal cancer such as esophageal adenocarcinoma) if the loci is at least 10%, 20%, 30%, 40%, 50%, 60%, 70%, 80%, 90%, or 100% methylated. In some embodiments, a DNA sample from a subject is treated with bisulfite, and the resulting bisulfite sequence corresponds to any of the nucleotide sequences disclosed herein comprising a “Y” nucleotide. In some embodiments, if at least 1, 2, 3, 4, 5, 6, 7, 8, 9, 10, 11, 12, 13, 14, 15, 16, 17, 18, 19, 20, 21, 22, 23, 24, 25, 26, 27, 28, 29, or 30 of the Y residues of the bisulfite-converted sequence have a C, the sequence is considered “methylated” for the purposes of determining whether or not the subject is prone to developing and/or has developed a metaplasia in the esophagus (e.g., Barrett's esophagus) or neoplasia (e.g., Barrett's esophagus with dysplasia such as high-grade or low-grade dysplasia) (e.g., esophageal cancer such as esophageal adenocarcinoma). In some embodiments, a DNA sample from a subject is treated with bisulfite, and the resulting bisulfite sequence corresponds to any of the nucleotide sequences disclosed herein comprising a “Y” nucleotide. In some embodiments, if at least 10%, 20%, 30%, 40%, 50%, 60%, 70%, 80%, 90%, or 100% of the Y residues of the bisulfite-converted sequence have a C, the sequence is considered “methylated” for the purposes of determining whether or not the subject is prone to developing and/or has developed a metaplasia in the esophagus (e.g., Barrett's esophagus) or neoplasia (e.g., Barrett's esophagus with dysplasia such as high-grade or low-grade dysplasia) (e.g., esophageal cancer such as esophageal adenocarcinoma). In some embodiments, a subject is determined to be prone to developing and/or has developed a metaplasia in the esophagus (e.g., Barrett's esophagus) or neoplasia (e.g., Barrett's esophagus with dysplasia such as high-grade or low-grade dysplasia) (e.g., esophageal cancer such as esophageal adenocarcinoma) if a certain number of “Y” nucleotides in a bisulfite converted sequence are cytosines. In some embodiments, the certain number is at least 1, 2, 3, 4, 5, 6, 7, 8, 9, 10, 11, 12, 13, 14, 15, 16, 17, 18, 19, 20, 21, 22, 23, 24, 25, 26, 27, 28, 29, or 30 of the Y residues of the bisulfite-converted sequence. In some embodiments, the certain number is least 10%, 20%, 30%, 40%, 50%, 60%, 70%, 80%, 90%, or 100% of the Y residues of the bisulfite-converted sequence. In certain embodiments, a subject is determined to be prone to developing and/or has developed a metaplasia in the esophagus (e.g., Barrett's esophagus) or neoplasia (e.g., esophageal cancer such as esophageal adenocarcinoma) (e.g., Barrett's esophagus with dysplasia such as high-grade or low-grade dysplasia) if a certain percentage of DNA molecules from a sample from a subject are determined to be “methylated,” as defined herein. In some embodiments, the certain percentage of DNA molecules is at least 10%, 20%, 30%, 40%, 50%, 60%, 70%, 80%, 90%, or 100% of the DNA molecules from the sample are determined to be “methylated.” In some embodiments, the percentage of methylated DNA molecules is determined using next-generation sequencing. Exemplary cut-offs of DNA methylation and DNA molecule percentages may be found in the Examples section provided herein.

[0169] In addition to diagnosis, assaying of a marker in a sample from a subject not known to have, e.g., a metaplasia or neoplasia of the upper gastrointestinal tract, can be prognostic for the subject (i.e., indicating the probable course of the disease). To illustrate, subjects having a predisposition to develop a metaplasia or neoplasia of the upper gastrointestinal tract may possess methylated nucleotide sequences. Assaying of methylated informative loci in a sample from subjects either by itself, or in combination with assaying for somatic mutation(s) in TP53, can also be used to select a particular therapy or therapies which are particularly effective against, e.g., a neoplasia of the upper gastrointestinal tract in the subject, or to exclude therapies that are not likely to be effective.

[0170] Assaying of methylated informative loci in samples from subjects that are known to have, or to have had, a cancer is also useful. For example, the present methods can be used to identify whether therapy is effective or not for certain subjects. One or more samples are taken from the same subject prior to and following therapy, and assayed for any one or more of the informative loci markers either by itself or themselves, or in combination with assaying for somatic mutation(s) in TP53. A finding that an informative locus is methylated in the sample taken prior to therapy and absent (or at a lower level) after therapy may indicate that the therapy is effective and need not be altered. In those cases where the informative locus is methylated in the sample taken before therapy and in the sample taken after therapy, it may be desirable to alter the therapy to increase the likelihood that the cancer will be reduced in the subject. Thus, the present method may obviate the need to perform more invasive procedures which are used to determine a patient's response to therapy.

[0171] Cancers frequently recur following therapy in patients with advanced cancers. In this and other instances, the assays of the invention are useful for monitoring over time the status of a cancer associated with silencing of genes located in the informative loci disclosed herein. For subjects in whom a cancer is progressing, there can be no DNA methylation in some or all samples when the first sample is taken and then appear in one or more samples when the second sample is taken. For subjects in which cancer is regressing, DNA methylation may be present in one or a number of samples when the first sample is taken and then be absent in some or all of these samples when the second sample is taken.

[0172] Samples for use with the methods described herein may be essentially any biological material of interest. For example, a sample may be a bodily fluid sample from a subject, a tissue sample from a subject, a solid or semi-solid sample from a subject, a primary cell culture or tissue culture of materials derived from a subject, cells from a cell line, or medium or other extracellular material from a cell or tissue culture, or a xenograft (meaning a sample of a cancer from a first subject, e.g., a human, that has been cultured in a second subject, e.g., an immuno-compromised mouse). The term “sample” as used herein is intended to encompass both a biological material obtained directly from a subject (which may be described as the primary sample) as well as any manipulated forms or portions of a primary sample. A sample may also be obtained by contacting a biological material with an exogenous liquid, resulting in the production of a lavage liquid containing some portion of the contacted biological material. Furthermore, the term “sample” is intended to encompass the primary sample after it has been mixed with one or more additive, such as preservatives, chelators, anti-clotting factors, etc.

[0173] In certain embodiments, a bodily fluid sample is a blood sample. In this case, the term “sample” is intended to encompass not only the blood as obtained directly from the patient but also fractions of the blood, such as plasma, serum, cell fractions (e.g., platelets, erythrocytes, and lymphocytes), protein preparations, nucleic acid preparations, etc. In some embodiments, the bodily fluid may be derived from the stomach, for example, gastric secretions, acid reflux, or vomit. In other embodiments, the bodily fluid may be a fluid secreted by the pancreas or bladder. In other embodiments, the body fluid may be saliva, spit, or an esophageal washing. In certain embodiments, a tissue sample is a biopsy taken from the mucosa of the gastrointestinal tract. In other embodiments, a tissue sample is the brushings from, e.g., the esophagus of a subject.

[0174] A subject is in some embodiments a human subject, but it is expected that the molecular markers disclosed herein, and particularly their homologs from other animals, are of similar utility in other animals. In certain embodiments, it may be possible to detect a biomarker described herein (e.g., DNA methylation or protein expression level) directly in an organism without obtaining a separate portion of biological material. In such instances, the term “sample” is intended to encompass that portion of biological material that is contacted with a reagent or device involved in the detection process.

[0175] In certain embodiments, DNA which is used as the template in an MSP reaction is obtained from a bodily fluid sample. Examples of bodily fluids are blood, saliva, spit or an esophageal washing. Other body fluids can also be used. Because they can be easily obtained from a subject and can be used to screen for multiple diseases, blood or blood-derived fractions are especially useful. Blood-derived fractions can comprise blood, serum, plasma, or other fractions. For example, a cellular fraction can be prepared as a “buffy coat” (i.e., leukocyte-enriched blood portion) by centrifuging 5 ml of whole blood for 10 min at 800 times gravity at room temperature. Red blood cells sediment most rapidly and are present as the bottom-most fraction in the centrifuge tube. The buffy coat is present as a thin creamy white colored layer on top of the red blood cells. The plasma portion of the blood forms a layer above the buffy coat. Fractions from blood can also be isolated in a variety of other ways. One method is by taking a fraction or fractions from a gradient used in centrifugation to enrich for a specific size or density of cells.

[0176] DNA is then isolated from samples from the bodily fluids. Procedures for isolation of DNA from such samples are well known to those skilled in the art. Commonly, such DNA isolation procedures comprise lysis of any cells present in the samples using detergents, for example. After cell lysis, proteins are commonly removed from the DNA using various proteases. RNA is removed using RNase. The DNA is then commonly extracted with phenol, precipitated in alcohol and dissolved in an aqueous solution.

### VI. Therapeutic Methods

[0177] In some embodiments, the disclosure provides for a method of determining whether a subject has any one or more of the methylated informative loci disclosed herein that are indicative of the presence of a metaplasia in the esophagus (e.g., Barrett's esophagus), wherein if the subject is determined to have a metaplasia in the esophagus (e.g., Barrett's esophagus), the subject is treated with an agent that treats the metaplasia in the esophagus (e.g., Barrett's esophagus). In some embodiments, the disclosure provides for a method of treating a subject determined to have a metaplasia in the esophagus (e.g., Barrett's esophagus). In some embodiments, the treatment of a metaplasia in the esophagus (e.g., Barrett's esophagus) encompasses administration of any one or more of the following compounds: proton pump inhibitors (PPIs) such as omeprazole (Prilosec, Zegerid), lansoprazole (Prevacid), pantoprazole (Protonix), rabeprazole (AcipHex), esomeprazole (Nexium), dexlansoprazole (Dexilant). Histamine H2 receptor blocking agents such as cimetidine (Tagamet), ranitidine (Zantac), famotidine (Pepcid) and nizatidine (Axid). Tums, Rolaids, or other quick-acting reflux medications. Prokinetic agents, or drugs that help move food through the gastrointestinal tract more quickly, offer an attractive alternative either alone or in combination with acid inhibition. In some embodiments, the treatment of a metaplasia in the esophagus (e.g., Barrett's esophagus) is endoscopic mucosal resection (EMR); photodynamic therapy (PDT); radiofrequency ablation (RFA); argon plasma coagulation (APC); cryotherapy, and/or surgery (e.g. esophagectomy, anti-reflux surgery).

[0178] In some embodiments, the disclosure provides for a method of determining whether a subject has any one or more of the methylated informative loci disclosed herein that are indicative of esophageal neoplasia (e.g., esophageal cancer), wherein if the subject is determined to have an esophageal neoplasia (e.g., esophageal cancer), the subject is treated with an agent that treats the esophageal neoplasia (e.g., esophageal cancer). In some embodiments, the disclosure provides for a method of determining whether a subject has any one or more of the methylated informative loci disclosed herein in combination with any of the TP53 somatic mutations disclosed herein that are indicative of esophageal neoplasia (e.g., esophageal cancer), wherein if the subject is determined to have an esophageal neoplasia (e.g., esophageal cancer), the subject is treated with an agent that treats the esophageal neoplasia (e.g., esophageal cancer). In some embodiments, the disclosure provides for a method of treating a subject determined to have esophageal neoplasia (e.g., esophageal cancer). In some embodiments, the esophageal neoplasia is Barrett's esophagus with low grade dysplasia, Barrett's esophagus with high grade dysplasia (HGD) and/or esophageal adenocarcinoma (EAC). In some embodiments, the treatment of esophageal neoplasia (e.g., esophageal cancer) encompasses surgery (e.g. esophagectomy), radiation therapy, chemoradiation therapy and/or chemotherapy. In some embodiments, the treatment of esophageal neoplasia (e.g., esophageal cancer) encompasses administering one or more chemotherapeutic agent, such as any one or more therapeutic agent selected from the group consisting of: carboplatin and paclitaxel (Taxol®) (which may be combined with radiation); cisplatin and 5-fluorouracil (5-FU) (often combined with radiation); ECF: epirubicine (Ellence®), cisplatin, and 5-FU (especially for gastroesophageal junction tumors); DCF: docetaxel (Taxotere®), cisplatin, and 5-FU; Cisplatin with capecitabine (Xeloda®); oxaliplatin and either 5-FU or capecitabine; doxorubicin (Adriamycin®), bleomycin, mitomycin, methotrexate, vinorelbine (Navelbine®), topotecan, and irinotecan (Camptosar®). In some embodiments, for some esophagus cancers that overexpress the HER2 protein on the surface of their cells, chemotherapy may be used along with the targeted drug trastuzumab. Ramucirumab may be used to treat cancers that start at the gastroesophageal (GE) junction when they are advanced. In some embodiments, the treatment encompasses endoscopic treatments, such as endoscopic mucosal resection (EMR) followed by treatment with proton pump inhibitors, photodynamic therapy (PDT); radiofrequency ablation (RFA); laser ablation; argon plasma coagulation (APC); electrocoagulation (electrofulguration); or esophageal stent.

[0179] The terms “treatment”, “treating”, “alleviation” and the like are used herein to generally mean obtaining a desired pharmacologic and/or physiologic effect, and may also be used to refer to improving, alleviating, and/or decreasing the severity of one or more symptoms of a condition being treated. The effect may be prophylactic in terms of completely or partially delaying the onset or recurrence of a disease, condition, or symptoms thereof, and/or may be therapeutic in terms of a partial or complete cure for a disease or condition and/or adverse effect attributable to the disease or condition. “Treatment” as used herein covers any treatment of a disease or condition of a mammal, particularly a human, and includes: (a) preventing the disease or condition from occurring in a subject which may be predisposed to the disease or condition but has not yet been diagnosed as having it; (b) inhibiting the disease or condition (e.g., arresting its development); or (c) relieving the disease or condition (e.g., causing regression of the disease or condition, providing improvement in one or more symptoms).

[0180] Treating a metaplasia (e.g., Barrett's esophagus) and/or a neoplasia (e.g., esophageal cancer) in a subject refers to improving (improving the subject's condition), alleviating, delaying or slowing progression or onset, decreasing the severity of one or more symptoms associated with a metaplasia (e.g., Barrett's esophagus) and/or a neoplasia (e.g., esophageal cancer). For example, treating a metaplasia or neoplasia includes any one or more of: reducing growth, proliferation and/or survival of metaplastic/neoplastic cells, killing metaplastic/neoplastic cells (e.g., by necrosis, apoptosis or autophagy), decreasing metaplasia/neoplasia size, decreasing rate of metaplasia/neoplasia size increase, halting increase in metaplasia/neoplasia size, improving ability to swallow, decreasing internal bleeding, decreasing incidence of vomiting, reducing fatigue, decreasing the number of metastases, decreasing pain, increasing survival, and increasing progression free survival.

### Exemplification

[0181] The invention now being generally described, it will be more readily understood by reference to the following examples, which are included merely for purposes of illustration of certain aspects and embodiments of the present invention, and are not intended to limit the invention.

### Example 1: Identification of Esophageal Cancer Informative Loci

[0182] Methylated informative loci were initially identified using the technique of reduced representation bisulfite sequencing (RRBS) in a discovery set of 23 paired biopsies of normal squamous esophagus and matched esophageal adenocarcinomas, along with biopsies of 8 Barrett's esophagus tissue, and along with brushings of 8 Barrett's esophagus tissues (one BE brushing case also having a matched biopsy).

[0183] Discovery data were initially analyzed for each individual CpG residue in the RRBS data set. Individual CpGs were considered methylated in EAC if they showed methylation in less than 10% of DNA sequence reads in all of the informative squamous samples, where at least 4 squamous samples were informative, where an informative sample had equal to or greater than 20 reads covering the CpG, and if 8 or more of the informative EAC samples demonstrated percent methylation at a level that was at least 20 percentage points greater than the methylation level of the most methylated normal squamous sample. CpGs were similarly defined as methylated in Barrett's esophagus if they showed methylation of less than 10% of DNA sequence reads of all informative squamous samples, where an informative sample had equal to or greater than 20 reads covering the CpG, and if 3 or more of the informative BE samples demonstrated percent methylation at a level that was at least 20 percentage points greater than the methylation level of the most methylated normal squamous sample. CpGs meeting criteria for methylation in both EACs and BE were defined as methylated in both EAC and BE. Such methylated CpGs were then aggregated into patches by grouping together methylated CpGs that were within 200 bp of one another. Patches may consist of 1 CpG up to any number of CpGs that meet the above criteria.

[0184] The names assigned to 428 genomic patches defined as methylated in both EAC and BE by the criteria above were recorded, and the sequences of these loci correspond to SEQ ID NOs: 1-856. The genomic coordinates of the genomic patches defined as methylated by the above criteria were also recorded. The genomic sequences of these patches on the respective genomic (+) and (−) strands were determined and recorded. (Upper and lower case designations were used according to those of the UCSC browser, where lower case sequences are lower complexity DNA sequences). The bisulfite converted sequences of these corresponding patches (i.e. the bisulfite converted sequence of the (+) strand and the bisulfite converted sequence of the (−) strand) were determined and recorded (see sequences of SEQ ID NOs: 857-1281 and 1713-2140 for the bisulfite converted sequences of the respective (+) and (−) strands). C residues that may be methylated or unmethylated, and hence may be bisulfite converted to T (if unmethylated) or remain as a C (if methylated), were designated with a Y (where Y denotes C or T), and where, after bisulfite conversion, actual maintenance of a Y designated base as a C was scored as methylation at that base. Thus, these sequences represent the group of all combinations of all sequences in which 0, 1, or more than one Y is converted to a T. The reverse complements of the bisulfite converted sequences of the (+) and (−) strands will be obvious to one of ordinary skill in the art and are also included by implication in this disclosure. The bisulfite converted sequences of the fully methylated form of the corresponding patches (i.e. in which all Y bases in every bisulfite converted sequence are retained as a C), corresponding to the (+) strand the (−) strand were determined and recorded (see sequences of SEQ ID NOs: 1285-1712 and 2141-2568 for the bisulfite converted sequences of the fully methylated form of the (+) and (−) strands respectively of the corresponding patches). The reverse complements of the bisulfite converted methylated (+) stand and (−) stand sequences will be obvious to one of ordinary skill in the art and are also included by implication in this disclosure.

[0185] Patches were expanded by 100 base pairs on either side so as to accommodate either the design of amplification primers or to enclude additional presumptively methylated bases. The sequences of these expanded patches correspond to SEQ ID NOs: 2569-3424 and their genomic coordinates were also recorded. The genomic sequences of these expanded patches on the respective genomic (+) and (−) strands were determined and recorded. (Upper and lower case designations were used according to those of the UCSC browser, where lower case sequences are lower complexity DNA sequences). The bisulfite converted sequences of these corresponding expanded patches (i.e. the bisulfite converted sequence of the (+) strand and the bisulfite converted sequence of the (−) strand) were determined and recorded (see sequences of SEQ ID NOs: 3425-3852 and 4281-4708 for the bisulfite converted sequences of the respective (+) and (−) strands). C residues that may be methylated or unmethylated, and hence may be bisulfite converted to T (if unmethylated) or remain as a C (if methylated), were designated with a Y (where Y denotes C or T), and where, after bisulfite conversion, actual maintenance of a Y designated base as a C was scored as methylation at that base. Thus, these sequences represent the group of all combinations of all sequences in which 0, 1, or more than one Y is converted to a T. The reverse complements of the bisulfite converted sequences of the (+) and (−) strands will be obvious to one of ordinary skill in the art and are also included by implication in this disclosure. The bisulfite converted sequences of the fully methylated form of the corresponding expanded patches (i.e. in which all Y bases in every bisulfite converted sequence are retained as a C), corresponding to the (+) strand the (−) strand were determined and recorded (see sequences of SEQ ID NOs: 3853-4280 and 4789-5136 for the bisulfite converted sequences of the fully methylated form of the (+) and (−) strands respectively of the corresponding expanded patches). The reverse complements of the bisulfite converted methylated (+) stand and (−) stand sequences will be obvious to one of ordinary skill in the art and are also included by implication in this disclosure.

[0186] CpG islands overlapping patches that may contain additional CpGs that are methylated coordinately with patches were also defined. The sequences of these CpG islands correspond to SEQ ID NOs: 5137-5926. The genomic coordinates of the CpG islands were also recorded. The genomic sequences of these expanded patches on the respective genomic (+) and (−) strands were determined and recorded. (Upper and lower case designations were used according to those of the UCSC browser, where lower case sequences are lower complexity DNA sequences). The bisulfite converted sequences of these corresponding CpG islands (i.e. the bisulfite converted sequence of the (+) strand and the bisulfite converted sequence of the (−) strand) were determined and recorded (see sequences of SEQ ID NOs: 5927-6321 and 6717-7111 for the bisulfite converted sequences of the respective (+) and (−) strands). C residues that may be methylated or unmethylated, and hence may be bisulfite converted to T (if unmethylated) or remain as a C (if methylated), were designated with a Y (where Y denotes C or T), and where, after bisulfite conversion, actual maintenance of a Y designated base as a C was scored as methylation at that base. Thus, these sequences represent the group of all combinations of all sequences in which 0, 1, or more than one Y is converted to a T. The reverse complements of the bisulfite converted sequences of the (+) and (−) strands will be obvious to one of ordinary skill in the art and are also included by implication in this disclosure. The bisulfite converted sequences of the fully methylated form of the corresponding CpG islands (i.e. in which all Y bases in every bisulfite converted sequence are retained as a C), corresponding to the (+) strand the (−) strand were determined and recorded (see sequences of SEQ ID NOs: 6322-6716 and 7112-7506 for the bisulfite converted sequences of the fully methylated form of the (+) and (−) strands respectively of the corresponding CpG islands). The reverse complements of the bisulfite converted methylated (+) stand and (−) stand sequences will be obvious to one of ordinary skill in the art and are also included by implication in this disclosure.

[0187] Regions of Interest (ROI) were defined that provided preferred regions for design of PCR amplicons that would encompass preferred patches. The genomic coordinates of the ROI were also recorded. The sequences of the (+) strands of the Regions of Interest correspond to SEQ ID NOs: 8209-8222, and the sequences of the (−) strands Regions of Interest correspond to SEQ ID NOs: 8251-8261. (Upper and lower case designations were used according to those of the UCSC browser, where lower case sequences are lower complexity DNA sequences). The bisulfite converted sequences of these corresponding Regions of Interest (i.e. the bisulfite converted sequence of the (+) strand and the bisulfite converted sequence of the (−) strand) were determined and recorded (see sequences of SEQ ID NOs: 8223-8236 and 8265-8278 for the bisulfite converted sequences of the respective (+) and (−) strands). C residues that may be methylated or unmethylated, and hence may be bisulfite converted to T (if unmethylated) or remain as a C (if methylated), were designated with a Y (where Y denotes C or T), and where, after bisulfite conversion, actual maintenance of a Y designated base as a C was scored as methylation at that base. Thus, these sequences represent the group of all combinations of all sequences in which 0, 1, or more than one Y is converted to a T. The reverse complements of the bisulfite converted sequences of the (+) and (−) strands will be obvious to one of ordinary skill in the art and are also included by implication in this disclosure. The bisulfite converted sequences of the fully methylated form of the Regions of Interest (i.e. in which all Y bases in every bisulfite converted sequence are retained as a C), corresponding to the (+) strand the (−) strand were determined and recorded (see sequences of SEQ ID NOs: 8237-8250 and 8279-8292 for the bisulfite converted sequences of the fully methylated form of the (+) and (−) strands respectively of the corresponding Regions of Interest). The reverse complements of the bisulfite converted methylated (+) stand and (−) stand sequences will be obvious to one of ordinary skill in the art and are also included by implication in this disclosure.

[0188] Specific PCR Amplicons were defined within the Regions of Interest (ROI). The genomic coordinates of the Amplicons were recorded. The sequences of the (+) strands of the Amplicons correspond to SEQ ID NOs: 8293-8306 and 8405-8409, and the sequences of the (−) strands of the Amplicons correspond to SEQ ID NOs: 8335-8348 and 8420-8424. (Upper and lower case designations were used according to those of the UCSC browser, where lower case sequences are lower complexity DNA sequences). The bisulfite converted sequences of these Amplicons (i.e. the bisulfite converted sequence of the (+) strand and the bisulfite converted sequence of the (−) strand) were determined and recorded (see sequences of SEQ ID NOs: 8307-8320 and 8410-8414 for the bisulfite converted sequences of the (+) strands and see sequences of SEQ ID NOs: 8349-8362 and 8425-8429 and for the bisulfite converted sequences of the (−) strands). C residues that may be methylated or unmethylated, and hence may be bisulfite converted to T (if unmethylated) or remain as a C (if methylated), were designated with a Y (where Y denotes C or T), and where, after bisulfite conversion, actual maintenance of a Y designated base as a C was scored as methylation at that base. Thus, these sequences represent the group of all combinations of all sequences in which 0, 1, or more than one Y is converted to a T. The reverse complements of the bisulfite converted sequences of the (+) and (−) strands will be obvious to one of ordinary skill in the art and are also included by implication in this disclosure. The bisulfite converted sequences of the fully methylated form of the Amplicons (i.e. in which all Y bases in every bisulfite converted sequence are retained as a C), corresponding to the (+) strand the (−) strand were determined and recorded (see sequences of SEQ ID NOs: 8321-8334 and 8415-8419 for the bisulfite converted sequences of the fully methylated form of the (+) strands and see sequences of SEQ ID NOs: 8363-8376 and 8430-8434 for the bisulfite converted sequences of the fully methylated form of the (−) strands). The reverse complements of the bisulfite converted methylated (+) stand and (−) stand sequences will be obvious to one of ordinary skill in the art and are also included by implication in this disclosure. Sequences of PCR primers used in amplification of the Amplicons are provided as SEQ ID NOs: 8377-8404 and 8435-8444.

[0189] Confirmatory analysis of candidate loci was then done using bisulfite sequencing of candidate loci that were amplified using bisulfite specific but methylation independent amplification primers. This employed a new sample set of biopsies from: 23 EACs, 8 HGD, 15 non-dysplastic BE from individuals without known higher grade lesions. In addition, biopsies were obtained from 5 cases of BE adjacent to HGD, and from 11 cases of BE adjacent to an EAC. These were not included in analyses of non-dysplastic BE. In addition biopsies were obtained from 33 normal squamous mucosa samples.

[0190] Table 1 describes the performance in the confirmatory sample set using bisulfite sequencing analysis of amplicons of select loci having strong performance characteristics and identified in the studies discussed above. In Table 1, columns C—S disclose the performance of the select amplicons. For each DNA sequence read across each amplicon, the number of CpGs that were methylated was counted, and the read was classified as methylated or unmethyled using cutoffs for a required number of methylated CpGs on the amplicon. Table 1, row 3 lists the number of CpGs between the amplification primers for each of the amplicons. Table 1, row 4 lists the number of CpGs that need to be methylated on an individual read to count that read as methylated (e.g. for SqBE 2 there are 16 CpG residues between the primers, and 14+(meaning >=14) CpGs must be methylated on a read to score it as methylated. Table 1, rows 6, 7, and 8 record the sensitivity for detecting esophageal adenocarcinomas (EACs) (row 6), high grade dysplasias (HGD) (row 7) and non-dysplastic Barrett's esophagus (non-dysplastic BE) (row 8), using criteria in which a sample was detected if it demonstrated methylation in greater than 10% (0.1) of all DNA reads. Table 1, row 9 records the specificity of each amplicon for not detecting normal squamous mucosa again using criteria in which a sample was detected if it demonstrated methylation in greater than 10% (0.1) of all DNA reads. Table 1, row 11 records the specificity of each amplicon for not detecting normal squamous mucosa now using criteria in which a sample was detected if it demonstrated methylation in greater than 1% (0.01) of all DNA reads. As a comparator, Table 1, column B provides the same data for detecting methylation in the Vimentin (VIM) locus amplified using primers disclosed in Li et al. (Li M, et al. (2009) Sensitive digital quantification of DNA methylation in clinical samples. Nat Biotechnol 27(9):858-863). These primers correspond to SEQ ID NOs: 8445-8446. The amplicons amplified using these primers are as follows:

[0191] Vimentin amplicon (+) strand (SEQ ID NO: 16207):

tTYGTttTttTAtYGtAGGATGTTYGGYGGttYGGGtAtYGYGAGtYGG
tYGAGtTttAGtYGGAGtTAYGTGAtTAYGTttAttYGtAttTAtAGtt
TGGGtAGt

[0192] Vimentin amplicon (−) strand (SEQ ID NO: 16208):

GtTGtttAGGtTGTAGGTGYGGGTGGAYGTAGTtAYGTAGtTtYGGtTG
GAGtTYGGtYGGtTYGYGGTGttYGGGtYGtYGAAtATttTGYGGTAGG
AGGAYGAG

[0193] Amplicons (and patches) need not be used individually, but can be combined into panels for detection of esophageal neoplasia. Examples of such panels, and their associated performance statistics, are provided in Table 1, columns T through AG that provide the markers in the panel and the sensitivity and specificity resulting from the marker combination (when the combination is positive if any member of the combination is positive).

[0194] The sensitivity for detection of EAC (100%), HGD (88%), and BE (100%) is the same among the combinations shown of: all amplicons, 17 amplicons, 15 amplicons, 4 amplicons, three of four combinations of 3 amplicons (columns Y, Z, AA), and for one combination of 2 amplicons (column AF). Specificity for not detecting normal squamous (97%), at a detection cutoff of 10% of reads being methylated, is the same for all combinations shown of: 15 amplicons, 4 amplicons, 3 amplicons, or 2 amplicons. When specificity is determined using a cutoff of 1% of reads being methylated, then among amplicons with the highest sensitivity, the highest specificity is 94%, demonstrated by the combination of 3 amplicons of Table 1, column Z, followed by 91% specificity demonstrated by combinations shown of: 4 amplicons, two combinations of three amplicons, and one combination of 2 amplicons.

TABLE 1A

| | | C | D | E | F | G | H | I | J | K | L | M | N | O | P | Q | R | S |
|---|---|---|---|---|---|---|---|---|---|---|---|---|---|---|---|---|---|---|
| | B | SqBE | SqBE | SqBE | SqBE | SqBE | SqBE | SqBE | SqBE | SqBE | SqBE | SqBE | SqBE | SqBE | SqBE | SqBE | SqBE | SqBE |
| A | VIM | 2 | 5 | 7 | 9 | 10 | 11-1 | 11-2 | 13 | 14-2 | 15 | 16-1 | 16-2 | 17-1 | 18 | 22-1 | 22-2 | 23 |
| Number of CpGs in | 10 | 16 | 15 | 27 | 31 | 10 | 17 | 10 | 19 | 22 | 11 | 26 | 26 | 22 | 21 | 9 | 20 | 10 |
| amplicon analysis | | | | | | | | | | | | | | | | | | |
| Number of CpGs | 5+ | 14+ | 8+ | 10+ | 16+ | 5+ | 8+ | 5+ | 10+ | 14+ | 5+ | 9+ | 8+ | 12+ | 9+ | 6+ | 11+ | 6+ |
| used for methylation | | | | | | | | | | | | | | | | | | |
| call | | | | | | | | | | | | | | | | | | |
| Cut-off = 0.1 | | | | | | | | | | | | | | | | | | |
| Sensitivity EAC | 70% | 74% | 100% | 40% | 65% | 96% | 4% | 87% | 38% | 64% | 74% | 52% | 9% | 74% | 91% | 87% | 82% | 59% |
| Sensitivity HGD | 63% | 50% | 100% | 57% | 50% | 75% | 0% | 63% | 33% | 43% | 63% | 50% | 0% | 63% | 63% | 88% | 88% | 43% |
| Sensitivity for non- | 100% | 81% | 70% | 56% | 69% | 88% | 0% | 94% | 21% | 56% | 100% | 44% | 13% | 100% | 81% | 100% | 88% | 63% |
| dysplasticBarrets | | | | | | | | | | | | | | | | | | |
| Specificity Sq | 97% | 97% | 100% | 100% | 97% | 97% | 100% | 97% | 97% | 97% | 94% | 97% | 100% | 97% | 97% | 97% | 97% | 97% |
| Cut-off = 0.01 | | | | | | | | | | | | | | | | | | |
| Specificity Sq | 91% | 94% | 100% | 100% | 94% | 94% | 91% | 91% | 93% | 91% | 91% | 94% | 94% | 94% | 94% | 94% | 94% | 94% |

TABLE 1B

| | | U | | | | | |
|---|---|---|---|---|---|---|---|
| | | All 17 SqBE | V | | | | |
| | | amplicons: SqBE 2 | 15 SqBE | W | | | |
| | | SqBE 5 SqBE | amplicons: SqBE | 4 best | | | |
| | | 7 SqBE 9 SqBE | 5 SqBE 7 SqBE | amplicons | | | |
| | | 10 SqBE 11-1 | 9 SqBE 10 | with | | | |
| | | SqBE 11-2 | SqBE 11-1 | highest | X | | |
| | | SqBE 13 SqBE | SqBE 11-2 | EAC calls | trio 1 | | |
| | | 14-2 SqBE 15 | SqBE 13 SqBE | (SqBE 10 | (SqBE | Y | |
| | T | SqBE 16-1 | 14-2 SqBE 16-1 | SqBE 11-2 | 10 | trio2 | Z |
| | All | SqBE 16-2 | SqBE 16-2 | SqBE 18 | SqBE | (SqBE | trio3 |
| | amplicon | SqBE 17-1 | SqBE 17-1 | SqBE 22-1) | 11- | 10 SqBE | (SqBE 10 |
| | together, | SqBE 18 SqBE | SqBE 18 SqBE | perform as | 2 | 11-2 | SqBE 18 |
| | including | 22-1 SqBE 22-2 | 22-1 SqBE 22-2 | well as 16 | SqBE | SqBE | SqBE |
| A | VIM | SqBE 23 | SqBE 23 | amplicons | 18) | 22-1) | 22-1) |
| Number of | | | | | | | |
| CpGs in | | | | | | | |
| amplicon | | | | | | | |
| analysis | | | | | | | |
| Number of | | | | | | | |
| CpGs used for | | | | | | | |
| methylation call | | | | | | | |
| Cut-off = 0.1 | | | | | | | |
| Sensitivity | 100% | 100% | 100% | 100% | 100% | 100% | 100% |
| EAC | | | | | | | |
| Sensitivity | 88% | 88% | 88% | 88% | 75% | 88% | 88% |
| HGD | | | | | | | |
| Sensitivity | 100% | 100% | 100% | 100% | 100% | 100% | 100% |
| for non- | | | | | | | |
| dysplasticBarrets | | | | | | | |
| Specificity Sq | 91% | 91% | 97% | 97% | 97% | 97% | 97% |
| Cut-off = 0.01 | | | | | | | |
| Specificity Sq | 82% | 85% | 85% | 91% | 91% | 91% | 94% |
| | AA | | | | | | |
| | trio4 | AB | AC | AD | AE | AF | AG |
| | (SqBE | doublel | double2 | double3 | double4 | double5 | double6 |
| | 11-2 | (SqBE | (SqBE | (SqBE | (SqBE | (SqBE | (SqBE |
| | SqBE 18 | 10 | 10 | 11-2 | 10 | 11-2 | 18 |
| | SqBE | SqBE | SqBE | SqBE | SqBE | SqBE | SqBE |
| A | 22-1) | 11-2) | 18) | 18) | 22-1) | 22-1) | 22-1) |
| Number of | | | | | | | |
| CpGs in | | | | | | | |
| amplicon | | | | | | | |
| analysis | | | | | | | |
| Number of | | | | | | | |
| CpGs used for | | | | | | | |
| methylation call | | | | | | | |
| Cut-off = 0.1 | | | | | | | |
| Sensitivity | 100% | 100% | 100% | 100% | 96% | 100% | 96% |
| EAC | | | | | | | |
| Sensitivity | 88% | 75% | 75% | 63% | 88% | 88% | 88% |
| HGD | | | | | | | |
| Sensitivity | 100% | 100% | 94% | 100% | 100% | 100% | 100% |
| for non- | | | | | | | |
| dysplasticBarrets | | | | | | | |
| Specificity Sq | 97% | 97% | 97% | 97% | 97% | 97% | 97% |
| Cut-off = 0.01 | | | | | | | |
| Specificity Sq | 91% | 91% | 94% | 91% | 94% | 91% | 94% |

### Example 2: Identification of Esophageal Cancer Informative Loci to Detect Progression of Esophageal Neoplasia

[0195] Discovery data were also analyzed for each individual CpG residue in the RRBS data set to identify loci that could be used to distinguish EAC from BE. Individual CpGs were considered methylated in EAC versus BE if they showed methylation of less than 10% of reads of all informative BE samples, where at least 3 BE samples were informative, and if they showed methylation of less than 10% of reads of all informative normal squamous samples, and where an informative sample had equal to or greater than 20 reads covering the CpG, and if 6 or more of the EAC samples demonstrated percent methylation at a level that was at least 20 percentage points greater than the methylation level of the most methylated BE sample. CpGs meeting criteria for methylation in EAC versus and BE are defined as methylated in EAC vs BE. Such methylated CpGs were then aggregated into patches in instances in which methylated CpGs were within 200 bp one another.

[0196] 186 genomic patches defined as methylated in EACs versus BE in the discovery set were identified (see SEQ ID NOs: 8447-8818). The genomic coordinates of the genomic patches defined as methylated by the above criteria were also recorded. The genomic sequences of these patches on the respective genomic (+) and (−) strands were determined and recorded. (Upper and lower case designations were used according to those of the UCSC browser, where lower case sequences are lower complexity DNA sequences). The bisulfite converted sequences of these corresponding patches(i.e. the bisulfite converted sequence of the (+) strand and the bisulfite converted sequence of the (−) strand) were determined and recorded (see sequences of SEQ ID NOs: 8819-9004 and 9191-9376 for the bisulfite converted sequences of the respective (+) and (−) strands). C residues that may be methylated or unmethylated, and hence may be bisulfite converted to T (if unmethylated) or remain as a C (if methylated), were designated with a Y (where Y denotes C or T), and where, after bisulfite conversion, actual maintenance of a Y designated base as a C was scored as methylation at that base. Thus, these sequences represent the group of all combinations of all sequences in which 0, 1, or more than one Y is converted to a T. The reverse complements of the bisulfite converted sequences of the (+) and (−) strands will be obvious to one of ordinary skill in the art and are also included by implication in this disclosure. The bisulfite converted sequences of the fully methylated form of the corresponding patches (i.e. in which all Y bases in every bisulfite converted sequence are retained as a C), corresponding to the (+) strand the (−) strand were determined and recorded (see sequences of SEQ ID NOs: 9005-9190 and 9377-9562 for the bisulfite converted sequences of the fully methylated form of the (+) and (−) strands respectively of the corresponding patches). The reverse complements of the bisulfite converted methylated (+) stand and (−) stand sequences will be obvious to one of ordinary skill in the art and are also included by implication in this disclosure.

[0197] Patches were expanded by 100 base pairs on either side so as to accommodate either the design of amplification primers or to enclude additional presumptively methylated bases. The sequences of these expanded patches correspond to SEQ ID NOs: 9563-9934 and their genomic coordinates were also recorded. The genomic sequences of these expanded patches on the respective genomic (+) and (−) strands were determined and recorded. (Upper and lower case designations were used according to those of the UCSC browser, where lower case sequences are lower complexity DNA sequences). The bisulfite converted sequences of these corresponding expanded patches (i.e. the bisulfite converted sequence of the (+) strand and the bisulfite converted sequence of the (−) strand) were determined and recorded (see sequences of SEQ ID NOs: 9935-10120 and 10307-10492 for the bisulfite converted sequences of the respective (+) and (−) strands). C residues that may be methylated or unmethylated, and hence may be bisulfite converted to T (if unmethylated) or remain as a C (if methylated), were designated with a Y (where Y denotes C or T), and where, after bisulfite conversion, actual maintenance of a Y designated base as a C was scored as methylation at that base. Thus, these sequences represent the group of all combinations of all sequences in which 0, 1, or more than one Y is converted to a T. The reverse complements of the bisulfite converted sequences of the (+) and (−) strands will be obvious to one of ordinary skill in the art and are also included by implication in this disclosure. The bisulfite converted sequences of the fully methylated form of the corresponding expanded patches (i.e. in which all Y bases in every bisulfite converted sequence are retained as a C), corresponding to the (+) strand the (−) strand were determined and recorded (see sequences of SEQ ID NOs: 10121-10306 and 10493-10678 for the bisulfite converted sequences of the fully methylated form of the (+) and (−) strands respectively of the corresponding expanded patches). The reverse complements of the bisulfite converted methylated (+) stand and (−) stand sequences will be obvious to one of ordinary skill in the art and are also included by implication in this disclosure.

[0198] CpG islands overlapping patches that may contain additional CpGs that are methylated coordinately with patches were also defined. The sequences of these CpG islands correspond to SEQ ID NOs: 10679-10972. The genomic coordinates of the CpG islands were also recorded. The genomic sequences of these expanded patches on the respective genomic (+) and (−) strands were determined and recorded. (Upper and lower case designations were used according to those of the UCSC browser, where lower case sequences are lower complexity DNA sequences). The bisulfite converted sequences of these corresponding CpG islands (i.e. the bisulfite converted sequence of the (+) strand and the bisulfite converted sequence of the (−) strand) were determined and recorded (see sequences of SEQ ID NOs: 10973-11119 and 11267-11413 for the bisulfite converted sequences of the respective (+) and (−) strands). C residues that may be methylated or unmethylated, and hence may be bisulfite converted to T (if unmethylated) or remain as a C (if methylated), were designated with a Y (where Y denotes C or T), and where, after bisulfite conversion, actual maintenance of a Y designated base as a C was scored as methylation at that base. Thus, these sequences represent the group of all combinations of all sequences in which 0, 1, or more than one Y is converted to a T. The reverse complements of the bisulfite converted sequences of the (+) and (−) strands will be obvious to one of ordinary skill in the art and are also included by implication in this disclosure. The bisulfite converted sequences of the fully methylated form of the corresponding CpG islands (i.e. in which all Y bases in every bisulfite converted sequence are retained as a C), corresponding to the (+) strand the (−) strand were determined and recorded (see sequences of SEQ ID NOs: 11120-11266 and 11414-11266 for the bisulfite converted sequences of the fully methylated form of the (+) and (−) strands respectively of the corresponding CpG islands). The reverse complements of the bisulfite converted methylated (+) stand and (−) stand sequences will be obvious to one of ordinary skill in the art and are also included by implication in this disclosure.

[0199] Regions of Interest (ROI) were defined that provided preferred regions for design of PCR amplicons that would encompass preferred patches. The genomic coordinates of the ROI were also recorded. The sequences of the (+) strands of the Regions of Interest correspond to SEQ ID NOs: 12563-12568, and the sequences of the (−) strands Regions of Interest correspond to SEQ ID NOs: 12581-12586. (Upper and lower case designations were used according to those of the UCSC browser, where lower case sequences are lower complexity DNA sequences). The bisulfite converted sequences of these corresponding Regions of Interest (i.e. the bisulfite converted sequence of the (+) strand and the bisulfite converted sequence of the (−) strand) were determined and recorded (see sequences of SEQ ID NOs: 12569-12574 and 12587-12592 for the bisulfite converted sequences of the respective (+) and (−) strands). C residues that may be methylated or unmethylated, and hence may be bisulfite converted to T (if unmethylated) or remain as a C (if methylated), were designated with a Y (where Y denotes C or T), and where, after bisulfite conversion, actual maintenance of a Y designated base as a C was scored as methylation at that base. Thus, these sequences represent the group of all combinations of all sequences in which 0, 1, or more than one Y is converted to a T. The reverse complements of the bisulfite converted sequences of the (+) and (−) strands will be obvious to one of ordinary skill in the art and are also included by implication in this disclosure. The bisulfite converted sequences of the fully methylated form of the Regions of Interest (i.e. in which all Y bases in every bisulfite converted sequence are retained as a C), corresponding to the (+) strand the (−) strand were determined and recorded (see sequences of SEQ ID NOs: 12575-12580 and 12593-12598 for the bisulfite converted sequences of the fully methylated form of the (+) and (−) strands respectively of the corresponding Regions of Interest). The reverse complements of the bisulfite converted methylated (+) stand and (−) stand sequences will be obvious to one of ordinary skill in the art and are also included by implication in this disclosure.

[0200] Specific PCR Amplicons were defined within the Regions of Interest (ROI). The genomic coordinates of the Amplicons were recorded. The sequences of the (+) strands of the Amplicons correspond to SEQ ID NOs: 12599-12604 and 12647-12649, and the sequences of the (−) strands of the Amplicons correspond to SEQ ID NOs: 12617-12622 and 12656-12658. (Upper and lower case designations were used according to those of the UCSC browser, where lower case sequences are lower complexity DNA sequences). The bisulfite converted sequences of these Amplicons (i.e. the bisulfite converted sequence of the (+) strand and the bisulfite converted sequence of the (−) strand) were determined and recorded (see sequences of SEQ ID NOs: 12605-12610 and 12650-12652 for the bisulfite converted sequences of the (+) strands and see sequences of SEQ ID NOs: 12623-12628 and 12659-12661 and for the bisulfite converted sequences of the (−) strands). C residues that may be methylated or unmethylated, and hence may be bisulfite converted to T (if unmethylated) or remain as a C (if methylated), were designated with a Y (where Y denotes C or T), and where, after bisulfite conversion, actual maintenance of a Y designated base as a C was scored as methylation at that base. Thus, these sequences represent the group of all combinations of all sequences in which 0, 1, or more than one Y is converted to a T. The reverse complements of the bisulfite converted sequences of the (+) and (−) strands will be obvious to one of ordinary skill in the art and are also included by implication in this disclosure. The bisulfite converted sequences of the fully methylated form of the Amplicons (i.e. in which all Y bases in every bisulfite converted sequence are retained as a C), corresponding to the (+) strand the (−) strand were determined and recorded (see sequences of SEQ ID NOs: 12611-12616 and 12653-12655 for the bisulfite converted sequences of the fully methylated form of the (+) strands and see sequences of SEQ ID NOs: 12629-12634 and 12662-12664 for the bisulfite converted sequences of the fully methylated form of the (−) strands). The reverse complements of the bisulfite converted methylated (+) stand and (−) stand sequences will be obvious to one of ordinary skill in the art and are also included by implication in this disclosure. Sequences of PCR primers used in amplification of the Amplicons are provided as SEQ ID NOs: 12635-12646 and 12665-12670.

[0201] Confirmatory analysis of candidate loci was then done using bisulfite sequencing of candidate loci that were amplified using bisulfite specific but methylation independent amplification primers. This employed a new sample set of biopsies from: 23 EACs, 8 HGD, 15 non-dysplastic BE from individuals without known higher grade lesions. In addition, biopsies were obtained from 5 cases of BE adjacent to HGD, and from 11 cases of BE adjacent to an EAC. These are not included in analyses of non-dysplastic BE. In addition biopsies were obtained from 33 normal squamous mucosa samples.

[0202] Table 2 describes the performance in the confirmatory sample set using bisulfite sequencing analysis of amplicons from select loci defined as methylated in EACs versus BE and having preferred marker characteristics. In Table 2, Columns B-J disclose the performance of the amplicons in the confirmatory data set. In this data set, methylation was calculated as the average level of methylation of all CpGs in between the primers for amplifying the amplicon. For each read across each amplicon the number of CpGs that were methylated was counted and the read was classified as methylated or unmethyled using cutoffs for a required number of methylated CpGs on the amplicon. Table 2, row 3 lists the number of CpGs between the amplification primers for each of the amplicons. Table 2, row 4 lists the number of CpGs that need to be methylated on an individual read to count that read as methylated (e.g. for Up3 there are 36 CpG residues between the primers, and 25+(meaning >=25) CpGs must be methylated on a read to score it as methylated). Table 2, rows 6 and 7 record the sensitivity for detecting EACs (row 6) and HGD (row 7) using criteria in which a sample was detected if it demonstrated methylation in greater than 10% (0.1) of all DNA reads. Table 2, rows 8 and 9 record the specificity of each amplicon for not detecting non-dysplastic BE (row 8) and for not detecting normal squamous mucosa (row 9) again using criteria in which a sample was detected if it demonstrated methylation in greater than 10% (0.1) of all DNA reads. Table 2, rows 11 and 12 record the specificity of each amplicon for not detecting non-dysplastic BE (row 11) and for not detecting normal squamous mucosa (row 12) using criteria in which a sample was detected if it demonstrated methylation in greater than 1% (0.01) of all DNA reads. Amplicons (and patches) need not be used individually, but can be combined into panels for detection of esophageal neoplasia. Performance statistics of selected panels of amplicons are provided in Table 2 columns K through V that provides the sensitivity and specificity of the panels (when the combination is positive if any member of the combination is positive).

TABLE 2A

| | B | C | D | E | F | G | H | I | J |
|---|---|---|---|---|---|---|---|---|---|
| A | Up3 | Up10 | Up15_ampl1 | Up15_ampl2 | Up20_ampl1 | Up20_ampl2 | Up27 | Up35_ampl1 | Up35_ampl2 |
| Number of CpGs in | 36 | 30 | 25 | 26 | 21 | 16 | 21 | 26 | 18 |
| amplicon analysis | | | | | | | | | |
| Number of CpGs used | 25+ | 17+ | 15+ | 15+ | 11+ | 6+ | 11+ | 14+ | 10+ |
| for methylation call | | | | | | | | | |
| Cut-off = 0.1 | | | | | | | | | |
| Sensitivity EAC | 15% | 40% | 22% | 26% | 37% | 0% | 20% | 45% | 30% |
| Sensitivity HGD | 0% | 25% | 13% | 0% | 33% | 0% | 17% | 17% | 25% |
| Specificity for non- | 100% | 100% | 100% | 94% | 100% | 100% | 100% | 100% | 100% |
| dysplastic BE | | | | | | | | | |
| Specificity Sq | 100% | 100% | 100% | 97% | 100% | 100% | 97% | 100% | 100% |
| Cut-off = 0.01 | | | | | | | | | |
| Specificity for non- | 100% | 100% | 100% | 94% | 94% | 100% | 100% | 100% | 100% |
| dysplastic BE | | | | | | | | | |
| Specificity Sq | 100% | 88% | 100% | 91% | 90% | 100% | 93% | 100% | 100% |

TABLE 2B

| | K | | M | | | | | | | | | |
|---|---|---|---|---|---|---|---|---|---|---|---|---|
| | All | | 7 | | | | | | | | | |
| | am- | | am- | | | | | | | | | |
| | plicons | | plicon | N | | | | | | | | |
| | together: | L | combo | 7 | | | | | | | | |
| | Up3, | 6 core | 1: | amplicon | | | | | | | | |
| | Up10, | am- | up10 | combo 2: | | | Q | R | S | T | U | V |
| | Up15-1, | plicon: | and | Up35-2 | O | | 3 | 4 | 4 | 4 | 4 | 4 |
| | Up15-2, | Up3, | Up3, | and Up3, | 2 | P | am- | amplicon | amplicon | amplicon | amplicon | amplicon |
| | Up20-1, | Up15-1, | Up15-1, | Up15-1, | am- | 3 mplicon | plicon | combo 1: | combo 2: | combo 3: | combo 4: | combo 5: |
| | Up20-2, | Up15-2, | Up15-2, | Up15-2, | plicon | combo 1 | combo 2: | Up15-1, | Up15-1, | Up15-1, | Up15-1, | Up15-1, |
| | Up27, | Up20-1, | Up20-1, | Up20-1, | combo: | Up15-1, | Up15-1, | Up35-1, | Up35-1, | Up35-1, | Up35-1, | Up35-1, |
| | Up35-1, | Up27, | Up27, | Up27, | Up15-1, | Up35-1, | Up35-1, | Up10, | Up10, | Up15-2, | Up15-2, | Up20-1, |
| A | Up35-2 | Up35-1 | Up35-1 | Up35-1 | Up35-1 | Up10 | Up20-1 | Up15-2 | Up27 | Up20-1 | Up27 | Up27 |
| Number of | | | | | | | | | | | | |
| CpGs in | | | | | | | | | | | | |
| amplicon | | | | | | | | | | | | |
| analysis | | | | | | | | | | | | |
| Number of | | | | | | | | | | | | |
| CpGs used for | | | | | | | | | | | | |
| methylation | | | | | | | | | | | | |
| call | | | | | | | | | | | | |
| Cut-off = 0.1 | | | | | | | | | | | | |
| Sensitivity | 65% | 65% | 65% | 65% | 52% | 57% | 57% | 61% | 61% | 61% | 61% | 61% |
| EAC | | | | | | | | | | | | |
| Sensitivity | 50% | 38% | 50% | 50% | 25% | 38% | 38% | 38% | 38% | 38% | 25% | 38% |
| HGD | | | | | | | | | | | | |
| Specificity for | 94% | 94% | 94% | 94% | 100% | 100% | 100% | 94% | 100% | 94% | 94% | 100% |
| non-dysplastic | | | | | | | | | | | | |
| BE | | | | | | | | | | | | |
| Specificity Sq | 94% | 94% | 94% | 94% | 100% | 100% | 100% | 97% | 97% | 97% | 94% | 97% |
| Cut-off = 0.01 | | | | | | | | | | | | |
| Specificity for | 88% | 88% | 88% | 88% | 100% | 100% | 94% | 94% | 100% | 88% | 94% | 94% |
| non-dysplastic | | | | | | | | | | | | |
| BE | | | | | | | | | | | | |
| Specificity Sq | 82% | 82% | 82% | 82% | 100% | 94% | 91% | 88% | 91% | 85% | 88% | 88% |

[0203] In addition, RRBS discovery data was analyzed to identify CpG residues that demonstrated: i) at least 3 informative BE, which in every informative BE demonstrated at least 90% methylation; and where ii) no more than 5% of informative normal squamous samples demonstrated methylation level below 90%; and that iii) demonstrated at least 6 informative EAC, where in these informative EACs the level of methylation was at least 20 percentage points lower than the methylation level of the least methylated BE. CpGs meeting these criteria are defined as unmethylated in EAC versus BE. Such unmethylated CpGs were then aggregated into patches by grouping together unmethylated CpGs that were within 200 bp of one another. Unmethylated in EAC patches may consist of 1 CpG up to any number of CpGs that meet the above criteria.

### Example 3: Identification of Esophageal Cancer Informative Loci to Detect Progression of Esophageal Neoplasia

[0204] Biopsy samples (that overlapped with the confirmatory biopsy sample set) were further analyzed in tests of panels of markers for detecting the progression of Barrett's esophagus to Barrett's esophagus high grade dysplasia (HGD) or to esophageal adenocarcinoma (EAC). For each panel of markers, FIG. 1 shows the sensitivity (percentage of samples detected), the specificity (percentage of samples not detected), the total number of samples studied, and the total number of positive samples. Three panels of markers were selected for study. The first marker panel consisted of detecting at least one of the following four methylated markers: Up15-1, Up35-1, Up27, and Up10 (using bisulfite sequencing analysis of the corresponding amplicons and using the criteria for detection specified in table 2A). The second panel consisted of testing for somatic non-synonymous mutations in TP53 in assays in which TP53 was amplified from genomic DNA using a set of PCR amplicons that spanned the TP53 coding region and in which Next Generation DNA Sequencing was then used to compare TP53 sequences from esophageal lesions versus matched normal esophagus tissue. Samples were classified as detected if a TP53 mutant allele frequency of greater than or equal to 10% was identified. The third panel was a combination of detection of methylation in any of Up15-1, Up35-1, Up27, and Up10 or detection of mutation in TP53.

[0205] Table 3 shows the individual performance of biomarkers in detecting the different sample types of the 1st validation biopsies set using different cut-off criteria for methylation than the analysis of table 2. Shown is the performance for detection of different sample types of 5 different methylated DNA markers tested by bisulfite sequencing analysis of the corresponding amplicons (Up3, Up10, Up27, Up35-1, Up35-2). Table 3 specifies the number of CpGs required to be methylated on a DNA sequence read to classify that read as methylated for this analysis. Results are presented when samples are considered methylated if greater than or equal to 100 of all DNA sequence reads are classified as methylated, or if greater than or equal to 10% of all DNA sequence reads are classified as methylated. Also shown is the performance for detecting samples of testing for non-synonymous somatic mutation in assays in which TP53 was amplified from genomic DNA using a set of PCR amplicons that spanned the TP53 coding region and in which Next Generation DNA Sequencing was then used to compare TP53 sequences from esophageal lesions versus matched normal esophagus tissue. Shown are rates of sample detection (expressed as sensitivity or specificity) when samples are classified as TP53 mutant if greater than or equal to 3% of TP53 reads are scored as mutant, or if greater than or equal to 10% of TP53 reads are scored as mutant.

TABLE 3

| | Unchanged CpG # cut-off applied to all | | | Updated CpG # Cut-off | | |
|---|---|---|---|---|---|---|
| | sample sets | | | applied to all sample sets | | |
| | Up3 | Up35-1 | Up35-2 | Up10 | Up27 | |
| | 25 + CpGs | 14 + CpGs | 10 + CpGs | 26 + CpGs | 15 + CpGs | p53 |
| Category | >1% = positive | >1% = positive | >1% = positive | >1% = positive | >1% = positive | >3% |
| Sensitivity | 20% | 50% | 35% | 30% | 20% | 70% |
| EAC | | | | | | |
| Sensitivity | 7% | 20% | 19% | 0% | 7% | 25% |
| for BEs | | | | | | |
| synchronous | | | | | | |
| to EAC or | | | | | | |
| HGD | | | | | | |
| Sensitivity | 17% | 33% | 38% | 0% | 17% | 25% |
| HGD | | | | | | |
| Specificity | 100% | 100% | 100% | 100% | 97% | 100% |
| Sq | | | | | | |
| Specificity | 100% | 100% | 100% | 100% | 100% | 100% |
| for non- | | | | | | |
| dysplastic | | | | | | |
| BE | | | | | | |
| | >10% = positive | >10% = positive | >10% = positive | >10% = positive | >10% = positive | >10% = positive |
| Sensitivity | 15% | 45% | 30% | 10% | 15% | 61% |
| EAC | | | | | | |
| Sensitivity | 7% | 7% | 6% | 0% | 7% | 19% |
| for BEs | | | | | | |
| matching | | | | | | |
| higher | | | | | | |
| pathologies, | | | | | | |
| either EAC | | | | | | |
| or HGD | | | | | | |
| Sensitivity | 0% | 17% | 25% | 0% | 17% | 25% |
| HGD | | | | | | |

[0206] Table 4 shows the performance of selected combinations of the methylated DNA markers (Up3, Up10, Up27, Up35-1, Up35-2) for detection of different sample types in the experiment presented in Table 3. Samples are scored as methylated if any member of the marker combination panel scores the sample as methylated. Results are presented when the individual markers are considered methylated if greater than or equal to 1% of all DNA sequence reads are classified as methylated, or if greater than or equal to 10% of all DNA sequence reads are classified as methylated.

TABLE 4A

| Cut-off for | | | | | | | | | | | | | |
|---|---|---|---|---|---|---|---|---|---|---|---|---|---|
| positivity | | | | | | | | | | | | | |
| (e.i. | | | | | | | | | | | | | |
| samples is | | | | | | | | | | | | | |
| positive if | | | | | | | | | | | | | |
| more than | | | | | | | | | | | | | |
| this % of | | | | | | | | | | | | | |
| reads are | | | | | | | | | | | | | |
| methylated | | | | | | | | | | | | | |
| at the given | | | | | | Up35-1 | Up35-1 | Up35-1 | Up35-2 | Up35-2 | Up10 | Up3. | Up3. |
| number of | | Up3 and | Up3 and | Up3 and | Up3 and | and | and | and | and | and | and | Up35-1 | Up35-1, |
| CpGs) | Category | Up35-1 | Up35-2 | Up10 | Up27 | Up35-2 | Up10 | Up27 | Up10 | Up27 | Up27 | Up35-2 | Up10 |
| 1% | Sensitivity EAC | 50% | 45% | 50% | 35% | 50% | 60% | 60% | 50% | 50% | 40% | 50% | 60% |
| 1% | Sensitivity for BEs | 20% | 20% | 11% | 13% | 27% | 11% | 20% | 11% | 27% | 0% | 27% | 11% |
| | synchronous to EAC or | | | | | | | | | | | | |
| | HGD | | | | | | | | | | | | |
| 1% | Sensitivity HGD | 33% | 33% | 25% | 33% | 33% | 50% | 50% | 50% | 50% | 0% | 33% | 50% |
| 1% | Specificity Sq | 100% | 100% | 100% | 97% | 100% | 100% | 97% | 100% | 97% | 94% | 100% | 100% |
| 1% | Specificity for non- | 100% | 100% | 100% | 100% | 100% | 100% | 100% | 100% | 100% | 100% | 100% | 100% |
| | dysplastic BE | | | | | | | | | | | | |
| 10% | Sensitivity EAC | 45% | 35% | 30% | 25% | 45% | 50% | 50% | 30% | 40% | 20% | 45% | 50% |
| | Sensitivity for BEs | 13% | 13% | 11% | 13% | 7% | 0% | 13% | 0% | 13% | 0% | 13% | 11% |
| | matching higher | | | | | | | | | | | | |
| | pathologies, either | | | | | | | | | | | | |
| | EAC or HGD | | | | | | | | | | | | |
| 10% | Sensitivity HGD | 17% | 33% | 0% | 17% | 33% | 25% | 33% | 50% | 50% | 0% | 33% | 25% |

TABLE 4B

| Cut-off for | | | | | | | | | | | | | |
|---|---|---|---|---|---|---|---|---|---|---|---|---|---|
| positivity | | | | | | | | | | | | | |
| (e.i. | | | | | | | | | | | | | |
| samples is | | | | | | | | | | | | | |
| positive if | | | | | | | | | | | | | |
| more than | | | | | | | | | | | | | |
| this % of | | | | | | | | | | | | | |
| reads are | | | | | | | | | | | | | |
| methylated | | | | | | | | | | | | | |
| at the | | | | | | | | Up3. | Up3. | Up35-1, | Up3, | Up3, | |
| given | | Up3. | Up3. | Up3. | Up3. | Up35-1, | Up35-2, | Up35-1, | Up35-1, | Up35-2, | Up35-2, | Up35-1, | All 5 |
| number of | | Up35-1, | Up35-2, | Up35-2, | Up10, | Up10, | Up10, | Up35-2, | Up35-2, | Up10 | Up10 | Up10 | markers |
| CpGs) | Category | Up27 | Up10 | Up27 | Up27 | up27 | up27 | Up10 | Up27 | Up27 | Up27 | Up27 | together |
| 1% | Sensitivity EAC | 60% | 60% | 55% | 60% | 70% | 60% | 60% | 60% | 70% | 70% | 70% | 70% |
| 1% | Sensitivity for BEs | 20% | 11% | 27% | 11% | 11% | 11% | 11% | 27% | 11% | 11% | 11% | 11% |
| | synchronous to EAC or | | | | | | | | | | | | |
| | HGD | | | | | | | | | | | | |
| 1% | Sensitivity HGD | 50% | 50% | 50% | 25% | 50% | 50% | 50% | 50% | 50% | 50% | 50% | 50% |
| 1% | Specificity Sq | 97% | 100% | 97% | 94% | 94% | 94% | 100% | 97% | 94% | 94% | 94% | 94% |
| 1% | Specificity for non- | 100% | 100% | 100% | 100% | 100% | 100% | 100% | 100% | 100% | 100% | 100% | 100% |
| | dysplastic BE | | | | | | | | | | | | |
| 10% | Sensitivity EAC | 50% | 30% | 40% | 40% | 60% | 40% | 50% | 50% | 40% | 40% | 60% | 60% |
| | Sensitivity for BEs | 20% | 11% | 20% | 11% | 0% | 0% | 11% | 20% | 11% | 11% | 11% | 11% |
| | matching higher | | | | | | | | | | | | |
| | pathologies, either | | | | | | | | | | | | |
| | EAC or HGD | | | | | | | | | | | | |
| 10% | Sensitivity HGD | 33% | 50% | 50% | 0% | 25% | 50% | 50% | 50% | 50% | 50% | 25% | 50% |

[0207] Samples summarized in Table 3 and Table 4 were additionally tested for non-synonymous somatic mutations in TP53. Table 5 shows performance of selected combinations of methylated DNA markers (Up3, Up10, Up27, Up35-1, Up35-2) plus testing for mutations in TP53 (p53) for detection of different sample types. Samples are scored as detected if any member of the marker combination panel scores the sample as methylated or if analysis for TP53 mutations scores the sample as TP53 mutant. Shown is the performance of the marker panel in which samples are scored as detected if any methylation marker is detected as methylated at greater than or equal to 1% of DNA reads, or if TP53 is detected as mutant at greater than or equal to 10% of the DNA sequence reads. Also shown is the performance of the marker panel in which samples are scored as detected if any methylation marker is detected as methylated at greater than or equal to 10% of DNA reads, or if TP53 is detected as mutant at greater than or equal to 10% of the DNA sequence reads.

TABLE 5A

| Cut-off for positivity | | | | | | | |
|---|---|---|---|---|---|---|---|
| (e.i. sample is positive | | | | | | | |
| if more than this % of | | | | | | | |
| reads are methylated at | | | Up-3 | Up35-1 | Up35-2 | Up10 | |
| the given number of | P53 | | and | and | and | and | Up27 |
| CpGs) | cut-off | Category | p53 | p53 | p53 | p53 | and p53 |
| 1% | 10% | Sensitivity EAC | 70% | 80% | 70% | 60% | 70% |
| 1% | 10% | Sensitivity for BEs | 20% | 20% | 19% | 11% | 27% |
| | | synchronous to EAC or | | | | | |
| | | HGD | | | | | |
| | 10% | Sensitivity HGD | 33% | 50% | 38% | 25% | 33% |
| 1% | 10% | Specificity Sq | 100% | 100% | 100% | 100% | 97% |
| 1% | 10% | Specificity for non- | 100% | 100% | 100% | 100% | 100% |
| | | dysplastic BE | | | | | |
| | | | Individual Methylation Markers + P53 | | | | |
| 10% | 10% | Sensitivity EAC | 70% | 80% | 70% | 60% | 70% |
| | 10% | Sensitivity for BEs matching | 20% | 20% | 19% | 11% | 27% |
| | | higher pathologies, either | | | | | |
| | | EAC or HGD | | | | | |
| 10% | 10% | Sensitivity HGD | 33% | 50% | 38% | 25% | 33% |

TABLE 5B

| Cut-off for | | | | | | | | | | | | | | |
|---|---|---|---|---|---|---|---|---|---|---|---|---|---|---|
| positivity (e.i. | | | | | | | | | | | | | | |
| sample is | | | | | | | | | | | | | | |
| positive if | | | | | | | | | | | | | | |
| more than | | | | | | | | | | | | | | |
| this % of | | | | | | | | | | | | | Up35-1, | Up3, |
| reads are | | | Up3 | Up3 | Up3 | Up35-2 | Up35-2 | Up10 | Up3. | Up3. | Up3. | Up35-2, | Up35-2, | Up35-2, |
| methylated at | | | and | and | and | and | and | and | Up35-2, | Up35-2, | Up10, | Up10, | Up10 | Up10 |
| the given | P53 | | Up35-2 | Up10 | Up27 | Up10 | Up27 | Up27 | Up10 | Up27 | Up27 | Up27 | Up27 | Up27 |
| number of | cut- | | and | and | and | and | and | and | and | and | and | and | and | and |
| CpGs) | off | Category | p53 | p53 | p53 | p53 | p53 | p53 | p53 | p53 | p53 | p53 | p53 | p53 |
| 1% | 10% | Sensitivity EAC | 80% | 80% | 80% | 70% | 80% | 80% | 60% | 85% | 90% | 80% | 90% | 90% |
| 1% | 10% | Sensitivity for | 20% | 11% | 27% | 11% | 27% | 11% | 11% | 27% | 11% | 11% | 11% | 11% |
| | | BEs synchronous | | | | | | | | | | | | |
| | | to EAC or HGD | | | | | | | | | | | | |
| | 10% | Sensitivity HGD | 50% | 25% | 33% | 50% | 50% | 25% | 50% | 50% | 25% | 50% | 50% | 50% |
| 1% | 10% | Specificity Sq | 100% | 100% | 97% | 100% | 97% | 94% | 100% | 97% | 94% | 94% | 94% | 94% |
| 1% | 10% | Specificity for | 100% | 100% | 100% | 100% | 100% | 100% | 100% | 100% | 100% | 100% | 100% | 100% |
| | | non-dysplastic BE | | | | | | | | | | | | |
| | | | Methylation Marker Combinations Merged with P53 Mutation | | | | | | | | | | | |
| 10% | 10% | Sensitivity EAC | 75% | 70% | 75% | 70% | 80% | 70% | 30% | 80% | 80% | 80% | 80% | 80% |
| | 10% | Sensitivity for | 20% | 11% | 27% | 11% | 27% | 11% | 11% | 27% | 11% | 11% | 11% | 11% |
| | | BEs matching | | | | | | | | | | | | |
| | | higher | | | | | | | | | | | | |
| | | pathologies, | | | | | | | | | | | | |
| | | either EAC or | | | | | | | | | | | | |
| | | HGD | | | | | | | | | | | | |
| 10% | 10% | Sensitivity HGD | 50% | 25% | 33% | 50% | 50% | 25% | 50% | 50% | 25% | 50% | 50% | 50% |

[0208] DNA was also extracted from esophageal samples that were also obtained by cytology brushings of the esophagus. The sample set included brushings from 49 esophageal adenocarcinomas (EAC); 14 carcinomas of the gastroesophageal junction (JCA); 8 Barrett's esophagus with low grade dysplasia (LGD); 9 Barrett's esophagus with high-grade dysplasia (HGD); 33 cases of Barrett's esophagus without dysplasia from cases without HGD or EAC, otherwise termed non-dysplastic BE, that included 13 cases of short segment Barrett's esophagus (SSBE). Also included were brushings of the gastroesophageal junction (normal GEJ) from 62 individuals without Barrett's esophagus, without HGD, without EAC. This included individuals with gastroesophageal reflux disease, with eosinophilic esophagitis, or without any disease. Also included were 176 brushings of normal squamous esophagus from each of the above individuals. These DNA samples were analyzed for methylation by bisulfite sequencing of selected amplicons and were also analyzed for non-synonymous somatic mutations in TP53.

[0209] Table 6 shows the individual performance of biomarkers in detecting the different sample types of the validation brushings set. Shown is the performance for detection of different sample types of 5 different methylated DNA markers analyzed by bisulfite sequencing of selected amplicons (Up3, Up10, Up27, Up35-1, Up35-2). The table specifies the number of CpGs required to be methylated on a DNA sequence read to classify that read as methylated. Results are presented when samples are considered methylated if greater than or equal to 1% of all DNA sequence reads are classified as methylated, or if greater than or equal to 10% of all DNA sequence reads are classified as methylated. Also shown is the performance for detecting samples of testing for somatic mutation in assays in which TP53 was amplified from genomic DNA using a set of PCR amplicons that spanned the TP53 coding region and in which Next Generation DNA Sequencing was then used to compare TP53 sequences from esophageal lesions versus matched normal esophagus tissue. Shown are rates of sample detection (expressed as sensitivity or specificity) when samples are classified as TP53 mutant if greater than or equal to 3% of TP53 reads are scored as mutant, or if greater than or equal to 10% of TP53 reads are scored as mutant.

TABLE 6A

| | Unchanged CpG # cut-off applied to all sample sets | | |
|---|---|---|---|
| | Up-3 | Up35-1 | Up35-2 |
| | 25 + CpGs | 14 + CpGs | 10 + CpGs |
| Category | >1% = positive | >1% = positive | >1% = positive |
| Sensitivity EAC | 44% | 57% | 57% |
| Sensitivity JCA | 14% | 43% | 21% |
| Sensitivity LGD | 25% | 38% | 25% |
| Sensitivity HGD | 67% | 56% | 50% |
| Specificity normal GEJ | 98% | 98% | 98% |
| Specificity for “non-dysplastic | 95% | 100% | 100% |
| BE”- excluding SSBE | | | |
| Specificity for all BE without | 97% | 85% | 94% |
| dysplasia (including SSBE and | | | |
| non-dysplastic BE) | | | |
| | >10% = positive | >10% = positive | >10% = positive |
| Sensitivity EAC | 21% | 57% | 45% |
| Sensitivity JCA | 7% | 29% | 7% |
| Sensitivity LGD | 13% | 38% | 25% |
| Sensitivity HGD | 33% | 56% | 30% |
| Specificity normal GEJ | 100% | 100% | 100% |
| Specificity for “non-dysplastic | 100% | 100% | 100% |
| BE”- excluding SSBE | | | |
| Specificity for all BE without | 100% | 88% | 97% |
| dysplasia (including SSBE and | | | |
| non-dysplastic BE) | | | |

TABLE 6B

| | Updated CpG # Cut-off applied to | | |
|---|---|---|---|
| | all sample sets | | |
| | Up10 26 + CpGs | Up27 15 + CpGs | p53 |
| Category | >1% = positive | >1% = positive | >3% |
| Sensitivity EAC | 31% | 43% | 5996 |
| Sensitivity JCA | 43% | 14% | |
| Sensitivity LGD | 0% | 13% | 13% |
| Sensitivity HGD | 22% | 20% | 40% |
| Specificity normal | 98% | 100% | 100% |
| GEJ | | | |
| Specificity for “non- | 100% | 95% | 100% |
| dysplastic BE”- | | | |
| excluding SSBE | | | |
| Specificity for all BE | 100% | 94% | 97% |
| without dysplasia | | | |
| (including SSBE and | | | |
| non-dysplastic BE) | | | |
| | | | >10% = |
| | >10% = positive | >10% = positive | positive |
| Sensitivity EAC | 25% | 29% | 476 |
| Sensitivity JCA | 29% | 7% | 29% |
| Sensitivity LGD | 0% | 13% | 0% |
| Sensitivity HGD | 119% | 20% | 4096 |
| Specificity normal | 100% | 100% | 100% |
| GEJ | | | |
| Specificity for “non- | 100% | 95% | 100% |
| dysplastic BE”- | | | |
| excluding SSBE | | | |
| Specificity for all BE | 100% | 97% | 97% |
| without dysplasia | | | |
| (including SSBE and | | | |
| hon-dysplastic BE) | | | |

[0210] Table 7 shows the performance of selected combinations of the methylated DNA markers (Up3, Up10, Up27, Up35-1, Up35-2) for detection of different sample types in the esophageal brushings samples presented in Table 6. Samples are scored as methylated if any member of the marker combination panel scores the sample as methylated. Results are presented when the individual markers are considered methylated if greater than or equal to 1% of all DNA sequence reads are classified as methylated, or if greater than or equal to 10% of all DNA sequence reads are classified as methylated.

TABLE 7A

| Cut-off for | | | | | | | | | | | | |
|---|---|---|---|---|---|---|---|---|---|---|---|---|
| positivity | | | | | | | | | | | | |
| (e.i. sample | | | | | | | | | | | | |
| is positive if | | | | | | | | | | | | |
| more than | | | | | | | | | | | | |
| this % of | | | | | | | | | | | | |
| reads are | | | | | | | | | | | | |
| methylated | | | | | | | | | | | | |
| at the given | | Up3 | Up3 | Up3 | Up3 | Up35-1 | Up35-1 | Up35-1 | Up35-2 | Up35-2 | Up10 | Up3. |
| number of | | and | and | and | and | and | and | and | and | and | and | Up35-1, |
| CpGs) | Category | Up35-1 | Up35-2 | Up10 | Up27 | Up35-2 | Up10 | Up27 | Up10 | Up27 | Up27 | Up35-2 |
| 1% | Sensitivity EAC | 63% | 60% | 57% | 56% | 61% | 71% | 67% | 71% | 63% | 58% | 63% |
| 1% | Sensitivity JCA | 43% | 21% | 50% | 29% | 43% | 57% | 50% | 50% | 36% | 43% | 43% |
| 1% | Sensitivity LGD | 38% | 38% | 14% | 25% | 38% | 29% | 38% | 29% | 25% | 14% | 33% |
| 1% | Sensitivity HGD | 78% | 78% | 78% | 67% | 56% | 78% | 67% | 67% | 50% | 33% | 78% |
| 1% | Specificity normal | 98% | 98% | 97% | 98% | 98% | 97% | 98% | 97% | 98% | 98% | 98% |
| | GEJ | | | | | | | | | | | |
| 1% | Specificity for | 95% | 95% | 95% | 90% | 100% | 100% | 95% | 100% | 95% | 95% | 95% |
| | non-dysol BE | | | | | | | | | | | |
| 1% | Specificity all BE | 84% | 94% | 97% | 91% | 85% | 85% | 82% | 94% | 91% | 94% | 84% |
| | without dysplasia | | | | | | | | | | | |
| | (including SSBE, | | | | | | | | | | | |
| | and non- | | | | | | | | | | | |
| | dysplastic BE) | | | | | | | | | | | |
| 10% | Sensitivity EAC | 56% | 48% | 38% | 38% | 57% | 67% | 65% | 58% | 55% | 42% | 63% |
| 10% | Sensitivity JCA | 29% | 7% | 29% | 14% | 29% | 43% | 36% | 29% | 14% | 36% | 29% |
| 10% | Sensitivity LGD | 38% | 38% | 0% | 25% | 38% | 29% | 38% | 29% | 25% | 14% | 38% |
| 10% | Sensitivity HGD | 67% | 44% | 33% | 44% | 56% | 67% | 67% | 44% | 50% | 22% | 78% |

TABLE 7B

| Cut-off for | | | | | | | | | | | | | | |
|---|---|---|---|---|---|---|---|---|---|---|---|---|---|---|
| positivity | | | | | | | | | | | | | | |
| (e.i. sample | | | | | | | | | | | | | | |
| is positive if | | | | | | | | | | | | | | |
| more than | | | | | | | | | | | | | | |
| this % of | | | | | | | | | Up3. | Up3. | Up35- | | | |
| reads are | | | | | | | | | Up35- | Up35- | 1, | Up3, | Up3, | |
| methylated | | Up3. | Up3. | Up3. | Up3. | | Up35- | Up35- | 1, | 1, | Up35- | Up35- | Up35- | |
| at the given | | Up35- | Up35- | Up35- | Up35- | Up3. | 1, | 2, | Up35- | Up35- | 2, | 2, | 1, | All 5 |
| number of | | 1, | 1, | 2, | 2, | Up10, | Up10, | Up10, | 2, | 2, | Up10 | Up10 | Up10 | markers |
| CpGs) | Category | Up10 | Up27 | Up10 | Up27 | Up27 | Up27 | Up27 | Up10 | Up27 | Up27 | Up27 | Up27 | together |
| 1% | Sensitivity | 72% | 69% | 70% | 67% | 64% | 77% | 75% | 72% | 69% | 74% | 74% | 77% | 77% |
| | EAC | | | | | | | | | | | | | |
| 1% | Sensitivity | 57% | 50% | 50% | 36% | 50% | 57% | 50% | 57% | 50% | 50% | 50% | 57% | 57% |
| | JCA | | | | | | | | | | | | | |
| 1% | Sensitivity | 29% | 38% | 29% | 38% | 14% | 29% | 29% | 29% | 38% | 29% | 29% | 29% | 29% |
| | LGD | | | | | | | | | | | | | |
| 1% | Sensitivity | 89% | 78% | 89% | 78% | 78% | 89% | 78% | 89% | 78% | 89% | 89% | 89% | 89% |
| | HGD | | | | | | | | | | | | | |
| 1% | Specificity | 97% | 98% | 97% | 98% | 97% | 97% | 97% | 97% | 98% | 97% | 97% | 97% | 97% |
| | normal GEJ | | | | | | | | | | | | | |
| 1% | Specificity for | 95% | 90% | 95% | 90% | 90% | 95% | 95% | 95% | 90% | 90% | 90% | 90% | 90% |
| | non-dysol BE | | | | | | | | | | | | | |
| 1% | Specificity all | 84% | 81% | 94% | 91% | 91% | 82% | 91% | 84% | 81% | 91% | 91% | 81% | 81% |
| | BE without | | | | | | | | | | | | | |
| | dysplasia | | | | | | | | | | | | | |
| | (including | | | | | | | | | | | | | |
| | SSBE, and | | | | | | | | | | | | | |
| | non-dysplastic | | | | | | | | | | | | | |
| | BE) | | | | | | | | | | | | | |
| 10% | Sensitivity | 66% | 65% | 57% | 56% | 49% | 71% | 63% | 66% | 65% | 62% | 62% | 70% | 70% |
| | EAC | | | | | | | | | | | | | |
| 10% | Sensitivity | 43% | 36% | 29% | 14% | 36% | 50% | 36% | 43% | 36% | 36% | 36% | 50% | 50% |
| | JCA | | | | | | | | | | | | | |
| 10% | Sensitivity | 29% | 38% | 29% | 38% | 14% | 29% | 29% | 29% | 38% | 29% | 29% | 29% | 29% |
| | LGD | | | | | | | | | | | | | |
| 10% | Sensitivity | 67% | 78% | 44% | 56% | 44% | 78% | 56% | 67% | 78% | 56% | 56% | 78% | 78% |
| | HGD | | | | | | | | | | | | | |

[0211] Table 8 shows the performance of selected combinations of methylated DNA markers (Up3, Up10, Up27, Up35-1, Up35-2) plus testing for mutations in TP53 (p53) for detection of different sample types in the esophageal brushings samples presented in Tables 6 and 7. Samples are scored as detected if any member of the marker combination panel scores the sample as methylated or if analysis for TP53 mutations scores the sample as TP53 mutant. Shown is the performance of the marker panel in which samples are scored as detected if any methylation marker is detected as methylated at greater than or equal to 1% of DNA reads, or if TP53 is detected as mutant at greater than or equal to 3% or at greater than or equal to 10% of the DNA sequence reads. Also shown is the performance of the marker panel in which samples are scored as detected if any methylation marker is detected as methylated at greater than or equal to 10% of DNA reads, or if TP53 is detected as mutant at greater than or equal to 3% or at greater than or equal to 10% of the DNA sequence reads. Marker combination with greater than 90% specificity in all BE without dysplasia are preferred yellow. Marker combinations that additionally show superior sensitivity for EAC are further preferred. Particularly preferred marker combinations are: Up35-2 methylation plus TP53 mutation; Up35-2 methylation plus Up3 methylation plus TP53 mutation; Up10 methylation plus Up3 methylation plus TP53 mutation; Up35-2 methylation plus Up10 methylation plus TP53 mutation; Up10 methylation plus Up27 methylation plus TP53 mutation; Up35-2 methylation plus Up3 methylation plus Up10 methylation plus TP53 mutation.

TABLE 8A

| Methyl cut- | | | | | | | | | | |
|---|---|---|---|---|---|---|---|---|---|---|
| off (samples | | | | | | | | | | |
| are positive | | | | | | | | | | |
| if more than | | | | | | | | | | |
| this % of | | | | | | | | | | |
| reads are | | | | | | | | | | |
| methylated | | | | | | | | | Up3 | Up3 |
| at the | | | | | | | | Up3 | and | and |
| required | | | | Up35-1 | Up35-2 | | | Up35-2 | Up10 | Up27 |
| number of | P53 | | Up-3 | and | and | Up10 | Up27 | and | and | and |
| CpGs) | cut-off | Category | and p53 | p53 | p53 | and p53 | and p53 | p53 | p53 | p53 |
| 1% | 1% | Sensitivity EAC | 81% | 84% | 86% | 75% | 80% | 88% | 85% | 85% |
| 1% | 1% | Sensitivity JCA | 50% | 64% | 50% | 57% | 57% | 50% | 57% | 57% |
| 1% | 1% | Sensitivity LGD | 25% | 38% | 25% | 14% | 13% | 38% | 14% | 25% |
| 1% | 1% | Sensitivity HGD | 78% | 78% | 70% | 33% | 50% | 89% | 78% | 78% |
| 1% | 1% | Specificity normal | 98% | 98% | 98% | 98% | 100% | 98% | 97% | 98% |
| | | GEJ | | | | | | | | |
| 1% | 1% | Specificity for non- | 95% | 100% | 100% | 100% | 95% | 95% | 95% | 90% |
| | | dysplastic BE | | | | | | | | |
| 1% | 1% | Specificity all BE | 94% | 82% | 91% | 97% | 91% | 91% | 94% | 88% |
| | | without dysplasia | | | | | | | | |
| | | (Including SSBE, | | | | | | | | |
| | | and non-dysplastic | | | | | | | | |
| | | BE) | | | | | | | | |
| 1% | 3% | Sensitivity EAC | 77% | 82% | 84% | 73% | 78% | 85% | 83% | 83% |
| 1% | 3% | Sensitivity JCA | 50% | 64% | 50% | 57% | 57% | 50% | 57% | 57% |
| 1% | 3% | Sensitivity LGD | 25% | 38% | 25% | 14% | 13% | 38% | 14% | 25% |
| 1% | 3% | Sensitivity HGD | 78% | 78% | 70% | 33% | 50% | 89% | 78% | 78% |
| 10% | 3% | Sensitivity EAC | 69% | 82% | 80% | 71% | 71% | 79% | 79% | 75% |
| 10% | 3% | Sensitivity JCA | 50% | 57% | 50% | 57% | 50% | 50% | 57% | 50% |
| 10% | 3% | Sensitivity LGD | 25% | 38% | 25% | 14% | 13% | 38% | 14% | 25% |
| 10% | 3% | Sensitivity HGD | 44% | 78% | 60% | 33% | 50% | 56% | 44% | 56% |
| 10% | 10% | Sensitivity EAC | 60% | 73% | 69% | 60% | 65% | 71% | 70% | 69% |
| 10% | 10% | Sensitivity JCA | 29% | 43% | 29% | 43% | 29% | 29% | 43% | 29% |
| 10% | 10% | Sensitivity LGD | 13% | 38% | 25% | 0% | 13% | 38% | 0% | 25% |
| 10% | 10% | Sensitivity HGD | 44% | 78% | 60% | 33% | 50% | 56% | 44% | 56% |

TABLE 8B

| Methyl cut- | | | | | | | | | | | |
|---|---|---|---|---|---|---|---|---|---|---|---|
| off (samples | | | | | | | | | | | |
| are positive | | | | | | | | | | | |
| if more than | | | | | | | | | | | |
| this % of | | | | | | | | | | | |
| reads are | | | | | | | | | | Up35-1, | Up3, |
| methylated | | | Up35-2 | Up35-2 | Up10 | Up3. | Up3. | Up3. | Up35-2, | Up35-2, | Up35-2, |
| at the | | | and | and | and | Up35-2, | Up35-2, | Up10, | Up10, | Up10 | Up10 |
| required | P53 | | Up10 | Up27 | Up27 | Up10 | Up27 | Up27 | up27 | Up27 | Up27 |
| number of | cut- | | and | and | and | and | and | and | and | and | and |
| CpGs) | off | Category | p53 | p53 | p53 | p53 | p53 | p53 | p53 | p53 | p53 |
| 1% | 1% | Sensitivity EAC | 92% | 90% | 85% | 91% | 92% | 87% | 94% | 94% | 94% |
| 1% | 1% | Sensitivity JCA | 57% | 57% | 57% | 57% | 57% | 57% | 57% | 57% | 57% |
| 1% | 1% | Sensitivity LGD | 29% | 25% | 14% | 29% | 38% | 14% | 29% | 29% | 29% |
| 1% | 1% | Sensitivity HGD | 67% | 80% | 44% | 89% | 89% | 78% | 78% | 89% | 89% |
| 1% | 1% | Specificity normal GEJ | 97% | 98% | 98% | 97% | 98% | 97% | 97% | 97% | 97% |
| 1% | 1% | Specificity for non- | 100% | 95% | 95% | 95% | 90% | 90% | 95% | 90% | 90% |
| | | dysplastic BE | | | | | | | | | |
| 1% | 1% | Specificity all BE without | 91% | 88% | 91% | 91% | 88% | 88% | 88% | 88% | 88% |
| | | dysplasia (including | | | | | | | | | |
| | | SSBE, and non-dysplastic | | | | | | | | | |
| | | BE) | | | | | | | | | |
| 1% | 3% | Sensitivity EAC | 90% | 88% | 83% | 89% | 90% | 85% | 92% | 91% | 91% |
| 1% | 3% | Sensitivity JCA | 57% | 57% | 57% | 57% | 57% | 57% | 57% | 57% | 57% |
| 1% | 3% | Sensitivity LGD | 29% | 25% | 14% | 29% | 38% | 14% | 29% | 29% | 29% |
| 1% | 3% | Sensitivity HGD | 67% | 80% | 44% | 89% | 89% | 78% | 78% | 89% | 89% |
| 10% | 3% | Sensitivity EAC | 85% | 86% | 77% | 85% | 85% | 81% | 88% | 87% | 87% |
| 10% | 3% | Sensitivity JCA | 57% | 50% | 57% | 57% | 50% | 57% | 57% | 57% | 57% |
| 10% | 3% | Sensitivity LGD | 29% | 25% | 14% | 29% | 38% | 14% | 29% | 29% | 29% |
| 10% | 3% | Sensitivity HGD | 56% | 70% | 44% | 56% | 67% | 56% | 67% | 67% | 67% |
| 10% | 10% | Sensitivity EAC | 77% | 80% | 71% | 77% | 79% | 74% | 81% | 81% | 81% |
| 10% | 10% | Sensitivity JCA | 43% | 29% | 43% | 43% | 29% | 43% | 43% | 43% | 43% |
| 10% | 10% | Sensitivity LGD | 29% | 25% | 14% | 29% | 38% | 14% | 29% | 29% | 29% |
| 10% | 10% | Sensitivity HGD | 56% | 70% | 44% | 56% | 67% | 56% | 67% | 67% | 67% |

### Example 4: Analysis of Esophageal Cancer Informative Loci in Formalin Fixed Paraffin Embedded Tissues

[0212] Additional studies were performed on DNAs extracted from formalin fixed paraffin embedded (FFPE) tissue samples of the stomach and esophagus that capture different diagnostic categories other than Barrett's with high grade dysplasia and esophageal adenocarcinoma. Bisulfite converted DNAs from each sample were amplified with bisulfite specific methylation indifferent primers corresponding to selected amplicons and the amplicons were then analyzed by bisulfite sequencing to determine methylation status on the parental DNA templates.

[0213] Table 9 summarizes the side by side comparison of 8 methylated DNA markers in FFPE tissue samples of the stomach and esophagus that capture different diagnostic categories other than Barrett's with high grade dysplasia and esophageal adenocarcinoma. Intestinal metaplasia is abbreviated as IM. Table 9 denotes for each marker the number of methylated cytosine bases required to be detected on a DNA sequence read to classify that read as methylated. Samples are detected as methylated if greater than or equal to 1% of DNA sequence reads are classified as methylated.

TABLE 9A

| | Marker | | | | | | | |
|---|---|---|---|---|---|---|---|---|
| | VIM | | SqBE5 | | SqBE Up7 | | SqBE11-2 | |
| Value (% positive | CpG cut-off | | | | | | | |
| samples or total | 6+ | | 13+ | | 23+ | | 5+ | |
| number of samples | % | Total | % | Total | % | Total | % | Total |
| sequenced) | positive | number | positive | number | positive | number | positive | number |
| BE (IM) | 90% | 30 | 50% | 12 | 50% | 16 | 83% | 30 |
| GEJ/Cardia with IM | 82% | 11 | 0% | 5 | 33% | 6 | 100% | 11 |
| GEJ/Cardia without | 0% | 58 | 0% | 33 | 2% | 47 | 31% | 58 |
| IM | | | | | | | | |
| columnar mucosa | 30% | 10 | 0% | 4 | 20% | 5 | 30% | 10 |
| without IM taken from | | | | | | | | |
| patients with | | | | | | | | |
| concurrent IM at the | | | | | | | | |
| same endoscopy | | | | | | | | |
| Normal Distal | 9% | 23 | 8% | 13 | 0% | 16 | 13% | 23 |
| Esophagus-Squamous | | | | | | | | |
| Squamous Mucosa | 0% | 10 | 0% | 6 | 0% | 5 | 0% | 10 |
| with REFLUX | | | | | | | | |
| Esophagus | | | | | | | | |
| Eosinophilic | 0% | 15 | 0% | 5 | 0% | 11 | 0% | 15 |
| Eosphagitis | | | | | | | | |
| Gastic Mucosa with | 22% | 9 | 0% | 2 | 20% | 5 | 44% | 9 |
| IM | | | | | | | | |
| Gastric Fundic Mucosa | 0% | 24 | 0% | 14 | 5% | 21 | 8% | 24 |
| without IM | | | | | | | | |
| Helicobacter Pylori | 8% | 13 | 22% | 9 | 13% | 8 | 69% | 13 |
| Gastritis without IM | | | | | | | | |

TABLE 9B

| | Marker | | | | | | | |
|---|---|---|---|---|---|---|---|---|
| | SqBE14-2 | | SqBE16 | | SqBE17 | | SqBE18 | |
| Value (% positive | CpG cut-off | | | | | | | |
| samples or total | 20+ | | 14+ | | 17+ | | 16+ | |
| number of samples | % | Total | % | Total | % | Total | % | Total |
| sequenced) | positive | number | positive | number | positive | number | positive | number |
| BE (IM) | 50% | 16 | 50% | 26 | 69% | 26 | 86% | 29 |
| GEJ/Cardia with IM | 22% | 9 | 18% | 11 | 73% | 11 | 70% | 10 |
| GEJ/Cardia without IM | 2% | 43 | 2% | 55 | 7% | 55 | 0% | 57 |
| columnar mucosa without | 0% | 5 | 11% | 9 | 11% | 9 | 11% | 9 |
| IM taken from patients | | | | | | | | |
| with concurrent IM at the | | | | | | | | |
| same endoscopy | | | | | | | | |
| Normal Distal | 10% | 20 | 5% | 22 | 4% | 23 | 4% | 23 |
| Esophagus-Squamous | | | | | | | | |
| Squamous Mucosa with | 17% | 6 | 0% | 8 | 0% | 9 | 0% | 10 |
| REFLUX Esophagus | | | | | | | | |
| Eosinophilic Eosphagitis | 0% | 8 | 0% | 12 | 8% | 13 | 0% | 12 |
| Gastic Mucosa with IM | 0% | 5 | 0% | 7 | 25% | 8 | 14% | 7 |
| Gastric Fundic Mucosa | 0% | 14 | 0% | 24 | 0% | 24 | 8% | 24 |
| without IM | | | | | | | | |
| Helicobacter Pylori | 14% | 7 | 8% | 13 | 46% | 13 | 15% | 13 |
| Gastritis without IM | | | | | | | | |

[0214] Table 10 summarizes the side by side comparison of 8 methylated DNA markers in FFPE tissue samples of the stomach and esophagus that capture different diagnostic categories other than Barrett's with high grade dysplasia and esophageal adenocarcinoma. Intestinal metaplasia is abbreviated as IM. Table 10 denotes for each marker the number of methylated cytosine bases required to be detected on a DNA sequence read to classify that read as methylated. Samples are detected as methylated if greater than or equal to 10% of DNA sequence reads are classified as methylated.

TABLE 10A

| Value (% | Marker | | | | | | | |
|---|---|---|---|---|---|---|---|---|
| positive | VIM | | SqBE5 | | SqBE Up7 | | SqBE11-2 | |
| samples or | CpG cut-off | | | | | | | |
| total number | 6+ | | 13+ | | 23+ | | 5+ | |
| of samples | % | Total | % | Total | % | Total | % | Total |
| sequenced) | positive | number | positive | number | positive | number | positive | number |
| BE (IM) | 87% | 30 | 50% | 12 | 44% | 16 | 70% | 30 |
| GEJ/Cardia | 82% | 11 | 0% | 5 | 33% | 6 | 91% | 11 |
| with IM | | | | | | | | |
| GEJ/Cardia | 0% | 58 | 0% | 33 | 2% | 47 | 16% | 58 |
| without IM | | | | | | | | |
| columnar | 0% | 10 | 0% | 4 | 0% | 5 | 10% | 10 |
| mucosa without | | | | | | | | |
| IM taken from | | | | | | | | |
| patients with | | | | | | | | |
| concurrent IM at | | | | | | | | |
| the same | | | | | | | | |
| endoscopy | | | | | | | | |
| Normal Distal | 9% | 23 | 8% | 13 | 0% | 16 | 13% | 23 |
| Esophagus- | | | | | | | | |
| Squamous | | | | | | | | |
| Squamous | 0% | 10 | 0% | 6 | 0% | 5 | 0% | 10 |
| Mucosa with | | | | | | | | |
| REFLUX | | | | | | | | |
| Esophagus | | | | | | | | |
| Eosinophilic | 0% | 15 | 0% | 5 | 0% | 11 | 0% | 15 |
| Eosphagitis | | | | | | | | |
| Gastic Mucosa | 11% | 9 | 0% | 2 | 20% | 5 | 22% | 9 |
| with IM | | | | | | | | |
| Gastric Fundic | 0% | 24 | 0% | 14 | 5% | 21 | 4% | 24 |
| Mucosa without | | | | | | | | |
| IM | | | | | | | | |
| Helicobacter | 8% | 13 | 22% | 9 | 13% | 8 | 46% | 13 |
| Pylori Gastritis | | | | | | | | |
| without IM | | | | | | | | |

TABLE 10B

| | Marker | | | | | | | |
|---|---|---|---|---|---|---|---|---|
| Value (% | SqBE14-2 | | SqBE16 | | SqBE17 | | SqBE18 | |
| positive | CpG cut-off | | | | | | | |
| samples or | 20+ | | 14+ | | 17+ | | 16+ | |
| total number of | % | Total | % | Total | % | Total | % | Total |
| samples sequenced) | positive | number | positive | number | positive | number | positive | number |
| BE (IM) | 50% | 16 | 42% | 26 | 62% | 26 | 76% | 29 |
| GEJ/Cardia with | 22% | 9 | 18% | 11 | 64% | 11 | 70% | 10 |
| IM | | | | | | | | |
| GEJ/Cardia | 2% | 43 | 2% | 55 | 0% | 55 | 0% | 57 |
| without IM | | | | | | | | |
| columnar mucosa | 0% | 5 | 0% | 9 | 11% | 9 | 11% | 9 |
| without IM taken | | | | | | | | |
| from patients with | | | | | | | | |
| concurrent IM at | | | | | | | | |
| the same | | | | | | | | |
| endoscopy | | | | | | | | |
| Normal Distal | 10% | 20 | 5% | 22 | 4% | 23 | 4% | 23 |
| Esophagus- | | | | | | | | |
| Squamous | | | | | | | | |
| Squamous | 17% | 6 | 0% | 8 | 0% | 9 | 0% | 10 |
| Mucosa with | | | | | | | | |
| REFLUX | | | | | | | | |
| Esophagus | | | | | | | | |
| Eosinophilic | 0% | 8 | 0% | 12 | 0% | 13 | 0% | 12 |
| Eosphagitis | | | | | | | | |
| Gastic Mucosa | 0% | 5 | 0% | 7 | 13% | 8 | 14% | 7 |
| with IM | | | | | | | | |
| Gastric Fundic | 0% | 14 | 0% | 24 | 0% | 24 | 0% | 24 |
| Mucosa without | | | | | | | | |
| IM | | | | | | | | |
| Helicobacter | 14% | 7 | 8% | 13 | 46% | 13 | 8% | 13 |
| Pylori Gastritis | | | | | | | | |
| without IM | | | | | | | | |

[0215] Table 11 summarizes performance of different panels comprised of combinations of methylated DNA markers in FFPE tissue samples of the stomach and esophagus that capture different diagnostic categories other than Barrett's with high grade dysplasia and esophageal adenocarcinoma. Intestinal metaplasia is abbreviated as IM. Tables 9 and 10 denote for each marker the number of methylated cytosine bases required to be detected on a DNA sequence read to classify that read as methylated. Samples are detected as methylated if greater than or equal to 1% of DNA sequence reads are classified as methylated for any member of the marker panel.

TABLE 11A

| | Marker combinations | | | | | | |
|---|---|---|---|---|---|---|---|
| | VIM | VIM | VIM | VIM | VIM | SqBE5 | SqBE5 |
| | SqBE5 | SqBE7 | SqBE16 | SqBE17 | SqBE18 | SqBE7 | SqBE16 |
| BE (IM) | 92% | 88% | 92% | 88% | 97% | 71% | 70% |
| GEJ/Cardia with IM | 60% | 83% | 82% | 91% | 80% | 50% | 0% |
| GEJ/Cardia without IM | 0% | 2% | 2% | 7% | 0% | 3% | 3% |
| columnar mucosa without IM taken from | 25% | 40% | 33% | 33% | 33% | 25% | 0% |
| patients with concurrent IM at the same | | | | | | | |
| endoscopy | | | | | | | |
| Normal Distal Esophagus-Squamous | 8% | 6% | 9% | 9% | 9% | 8% | 8% |
| Squamous Mucosa with REFLUX | 0% | 0% | 0% | 0% | 0% | 0% | 0% |
| Esophagus | | | | | | | |
| Eosinophilic Eosphagitis | 0% | 0% | 0% | 8% | 0% | 0% | 0% |
| Gastic Mucosa with IM | 0% | 40% | 14% | 38% | 43% | 0% | 0% |
| Gastric Fundic Mucosa without IM | 0% | 5% | 0% | 0% | 8% | 7% | 0% |
| Helicobacter Pylori Gastritis without IM | 33% | 13% | 15% | 46% | 15% | 29% | 22% |

TABLE 11B

| | Marker combinations | | | | | | |
|---|---|---|---|---|---|---|---|
| | SqBE5 | SqBE5 | SqBE7 | SqBE7 | SqBE7 | SqBE16 | SqBE16 |
| | SqBE17 | SqBE18 | SqBE16 | SqBE17 | SqBE18 | SqBE17 | SqBE18 |
| BE (IM) | 80% | 91% | 57% | 79% | 94% | 78% | 92% |
| GEJ/Cardia with IM | 80% | 40% | 33% | 50% | 83% | 73% | 70% |
| GEJ/Cardia without IM | 9% | 0% | 2% | 9% | 2% | 8% | 2% |
| columnar mucosa without IM taken from | 25% | 0% | 40% | 20% | 20% | 22% | 22% |
| patients with concurrent IM at the same | | | | | | | |
| endoscopy | | | | | | | |
| Normal Distal Esophagus-Squamous | 8% | 8% | 6% | 0% | 6% | 9% | 5% |
| Squamous Mucosa with REFLUX | 0% | 0% | 0% | 0% | 0% | 0% | 0% |
| Esophagus | | | | | | | |
| Eosinophilic Eosphagitis | 20% | 0% | 0% | 10% | 0% | 10% | 0% |
| Gastic Mucosa with IM | 50% | 0% | 25% | 40% | 20% | 33% | 17% |
| Gastric Fundic Mucosa without IM | 0% | 7% | 5% | 5% | 5% | 0% | 8% |
| Helicobacter Pylori Gastritis | 44% | 44% | 25% | 50% | 25% | 46% | 23% |
| without IM | | | | | | | |

[0216] Table 12 summarizes performance of different panels comprised of combinations of methylated DNA markers in FFPE tissue samples of the stomach and esophagus that capture different diagnostic categories other than Barrett's with high grade dysplasia and esophageal adenocarcinoma. Intestinal metaplasia is abbreviated as IM. Tables 9 and 10 denote for each marker the number of methylated cytosine bases required to be detected on a DNA sequence read to classify that read as methylated. Samples are detected as methylated if greater than or equal to 10% of DNA sequence reads are classified as methylated for any member of the marker panel.

TABLE 12A

| | Marker combinations | | | | | | |
|---|---|---|---|---|---|---|---|
| | VIM | VIM | VIM | VIM | VIM | SqBE5 | SqBE5 |
| | SqBE5 | SqBE7 | SqBE16 | SqBE17 | SqBE18 | SqBE7 | SqBE16 |
| BE (IM) | 92% | 81% | 88% | 85% | 90% | 71% | 60% |
| GEJ/Cardia with IM | 60% | 83% | 82% | 91% | 80% | 50% | 0% |
| GEJ/Cardia without IM | 0% | 2% | 2% | 0% | 0% | 3% | 3% |
| columnar mucosa without IM | 0% | 0% | 0% | 11% | 11% | 0% | 0% |
| taken from patients with | | | | | | | |
| concurrent IM at the same | | | | | | | |
| endoscopy | | | | | | | |
| Normal Distal Esophagus- | 8% | 6% | 9% | 9% | 9% | 8% | 8% |
| Squamous | | | | | | | |
| Squamous Mucosa with | 0% | 0% | 0% | 0% | 0% | 0% | 0% |
| REFLUX Esophagus | | | | | | | |
| Eosinophilic Eosphagitis | 0% | 0% | 0% | 0% | 0% | 0% | 0% |
| Gastic Mucosa with IM | 0% | 20% | 14% | 13% | 29% | 0% | 0% |
| Gastric Fundic Mucosa | 0% | 5% | 0% | 0% | 0% | 7% | 0% |
| without IM | | | | | | | |
| Helicobacter Pylori Gastritis | 33% | 13% | 15% | 46% | 15% | 29% | 22% |
| without IM | | | | | | | |

TABLE 12B

| | Marker combinations | | | | | | |
|---|---|---|---|---|---|---|---|
| | SqBE5 | SqBE5 | SqBE7 | SqBE7 | SqBE7 | SqBE16 | SqBE16 |
| | SqBE17 | SqBE18 | SqBE16 | SqBE17 | SqBE18 | SqBE17 | SqBE18 |
| BE (IM) | 70% | 91% | 57% | 71% | 81% | 74% | 81% |
| GEJ/Cardia with IM | 80% | 40% | 33% | 50% | 83% | 64% | 70% |
| GEJ/Cardia without IM | 0% | 0% | 2% | 2% | 2% | 2% | 2% |
| columnar mucosa without IM | 25% | 0% | 0% | 20% | 0% | 11% | 11% |
| taken from patients with | | | | | | | |
| concurrent IM at the same | | | | | | | |
| endoscopy | | | | | | | |
| Normal Distal Esophagus- | 8% | 8% | 6% | 0% | 6% | 9% | 5% |
| Squamous | | | | | | | |
| Squamous Mucosa with | 0% | 0% | 0% | 0% | 0% | 0% | 0% |
| REFLUX Esophagus | | | | | | | |
| Eosinophilic Eosphagitis | 0% | 0% | 0% | 0% | 0% | 0% | 0% |
| Gastic Mucosa with IM | 0% | 0% | 25% | 20% | 20% | 17% | 17% |
| Gastric Fundic Mucosa | 0% | 0% | 5% | 5% | 5% | 0% | 0% |
| without IM | | | | | | | |
| Helicobacter Pylori Gastritis | 44% | 33% | 25% | 50% | 25% | 46% | 15% |
| without IM | | | | | | | |

### Methodologies

[0217] Somatic mutations in TP53 were detected using the following method. TP53 exons 2-11 were amplified using a multiplexed series of primer pairs covering all coding sequences and splice junctions. The primers contained additional 5′ end sequences that were then used for secondary amplification that introduced barcode sequences and Illumina 15 and 17 sequences into the final PCR products. PCR products were mixed, purified and analyzed on an Illumina MiSeq instrument. Data analysis was performed using CLCBio software (Qiagen) and VariantStudio software (Illumina).

1-104. (canceled)

105. A bisulfite converted DNA molecule consisting of a nucleotide sequence that is at least 95%, 96%, 97%, 98%, 99% or 100% identical to SEQ ID NO: 8318, or a reverse complement or fragment thereof, wherein the nucleotide sequence comprises at least one nucleotide converted by bisulfite from cytosine (C) to thymine (T).

106. The bisulfite converted DNA molecule of claim 105, wherein the DNA molecule comprises a sequence having at least 96%, 97%, 98%, 99% or 100% identity to SEQ ID NOs: 8318.

107. The bisulfite converted DNA molecule of claim 105, wherein the DNA molecule comprises a sequence having at least 97%, 98%, 99% or 100% identity to 8318.

108. The bisulfite converted DNA molecule of claim 105, wherein the DNA molecule comprises a sequence having at least 96%, 97%, 98%, 99% or 100% identity to SEQ ID NOs: 8234.

109. The bisulfite converted DNA molecule of claim 105, wherein the DNA molecule comprises a sequence having at least 97%, 98%, 99% or 100% identity to 8234.

110. The bisulfite converted DNA molecule of claim 105, wherein the DNA molecule has a length of up to 1000 nucleotides.

The application's sequence listing, which the Patent Office published only in electronic form, follows.

SEQUENCE LISTING (16204 sequences)

SEQ ID NO: 1 - DNA, 1017 bp, Homo sapiens
  source 1..1017: mol_type = unassigned DNA
cggcgaccccggcccccgcaaggtggggcggcgagcaggagccggggccaggccaggggctcgagctcccgttcgaggggcggggaaggcgggtgacgtgagccgggccgggcgggcggagttgggaccggctccgggaggcgggggcgagcgcgcggagaggcagacgcgaggagggaggcggctgagcagcgcgggcggctctgcggcgggcgcggtgggcgcgggcggcggggccccgggatccccgcgcgcctcctccgcgcggcgccgccgccgcgcgtccccacgccccgcgctccacggcgccctcgccccgcgcgcctctcgtgcccgcctcctgccagtctccgggccgcggccgtctgcagagcgagcgctcagacggagcccccgggcaacttgagtggcgccgatcggcggcggagcctctggcagagccccccgacccggcagcgcggaggggactcgcgtccgtccgcgtcgcgtcaccccaaaccctaagcagcgccgccccatcggcgcggagctccggctggaggcaagagccgcgcgccgggagacacgcaccgtgagcggcagcgccgccggcctccctcctcgccgccccggagggcgaagccgcggctccccagccctttgctgcgccgcgacagcgccggaacacgccccgcctcgctgccgccttcgctgtgccgccggcggagggggccgcgagccccgcgccccggccggaggatgtgcgcccccgcgggccgcccagcctgagccatgcgccccaacggcggcggcgcgccggccggcatggagccccgcgcggccgcgctctgactcgctgtgcgccccgcggccggcgggcggcgggaggcggcggaccgagagccggagaccggcgccgcgggacggaagcgagcgggcgcgggcgccgcgcagatggcctgggcgagccaggtctgaggccccgctccccgaaacgtgaccatgtggattcaacagcttttaggactcaggtgagcg

SEQ ID NO: 2 - DNA, 166 bp, Homo sapiens
  source 1..166: mol_type = unassigned DNA
cgctcggagcgcgggcggggtcagcttgggcagccgcgggtcgctgctgcgtcggaagtctccgtcgccagggagccccttgggcgccaggtcctgggcccctgggcgaagtcgacgccagaacatgcttggccccgcactcagctcaccgcaccctcagcgcgcg

SEQ ID NO: 3-8 - skipped (6 entries)

SEQ ID NO: 9 - DNA, 14 bp, Homo sapiens
  source 1..14: mol_type = unassigned DNA
cgcgtctcagcgcg

SEQ ID NO: 10-12 - skipped (3 entries)

SEQ ID NO: 13 - DNA, 125 bp, Homo sapiens
  source 1..125: mol_type = unassigned DNA
cggctccacttacctgctccgaagagtggccccagctctgcgcctcttcctgcgaccccacacacagggacagccccaggcacagccccagcagcaggagcatggcggggcgagggcgcgggacg

SEQ ID NO: 14 - skipped

SEQ ID NO: 15 - DNA, 131 bp, Homo sapiens
  source 1..131: mol_type = unassigned DNA
cggggtgtgaagtggcggcgggcagaggggctcgcaggggctgggatccgcgtgcccctctctgcctcggtgcggagcacgatgtgcccgggcgggggcgaggacgtccgggaggggctgggctgcgcacg

SEQ ID NO: 16 - DNA, 94 bp, Homo sapiens
  source 1..94: mol_type = unassigned DNA
cgggcctgtcctcggctccgctcggagggtgtgcgggttcccgctccgctggccccgcttgcccaccacggcgcgcccaaacccacgcggcccg

SEQ ID NO: 17-18 - skipped (2 entries)

SEQ ID NO: 19 - DNA, 27 bp, Homo sapiens
  source 1..27: mol_type = unassigned DNA
cgcgatggggaggggaatacttgcgcg

SEQ ID NO: 20 - DNA, 164 bp, Homo sapiens
  source 1..164: mol_type = unassigned DNA
cgagattagaggggaaatccgaaaaagcaagcccctgcggcagcagccaggaaacactcgccaggaactggctgcgaccccaactccagcggtccgaagccctagcctccccacccccaccgcggcagagccgccttcgcagacacctcccgaggagaatcgcg

SEQ ID NO: 21-22 - skipped (2 entries)

SEQ ID NO: 23 - DNA, 68 bp, Homo sapiens
  source 1..68: mol_type = unassigned DNA
cgctgggcccgccgaggtcggggctttcccatgggagggaggtggctgcggcggaattttcagatgcg

SEQ ID NO: 24 - DNA, 508 bp, Homo sapiens
  source 1..508: mol_type = unassigned DNA
cggcggcagcgggagcccgagcgctgcgcgcccaccatggccgcccagggagagcccggctacctggcggcgcagtcggaccccggctccaacagcgagcgcagcaccgactccccagtgcccggctccgaggacgacttggtcgccggggcgaccctgcacagcccggagtggagcgaggagcgcttccgcgtggacaggaagaaacttgaggccatgttacaaggtaggcatccctcgtgttctcggactctccgactgagcctctaactccttttcggacatccccaccgcgcgctccggcgcccgctactccagcctacggccggccggtttagctccaggcccgctcccccgcggagccggaggacacccagggactggagacttcgcgggactccccacccttccacgcctctcagatttccaggcgctgggggccctgtgcgaacttgactggcttcagaaaagccgaaggccgagtttgtactggcgcgcccaagttgcg

SEQ ID NO: 25-34 - skipped (10 entries)

SEQ ID NO: 35 - DNA, 396 bp, Homo sapiens
  source 1..396: mol_type = unassigned DNA
cgaggacgaggaggaagaggaggaggaagaagaagaagaggaagaggaggaggaggaggaggaggacgcgtctaggctgagatggttcgcgtggatattgctactcattctaagactgctgcctccgccgccgccgccgccgccgctgctgccgccgccgccgccgccaccatttgccatagctagcaacgggcagccggcgcaggggctcgggggagctcctcccgccgccagcgccaccccaaacacccatcaacagccatattgctgctactgctgccgccgccgccgccgccgcggagcgcgggaggggggcggggaggcgcctgggctcggggcgctgtgcgcgacctggcggggtgcgccgagatatatacagcgagccgccgccgcccg

SEQ ID NO: 36 - skipped

SEQ ID NO: 37 - DNA, 70 bp, Homo sapiens
  source 1..70: mol_type = unassigned DNA
cgggccgccatttgtctacttgtcccatccaggacatctccctaaataatctctaagtggaaaaatcacg

SEQ ID NO: 38 - skipped

SEQ ID NO: 39 - DNA, 68 bp, Homo sapiens
  source 1..68: mol_type = unassigned DNA
cgcgggggacgcggggcgcggcgcgctgagcgcgggtgccgaggctggagggcgcggccgggctcccg

SEQ ID NO: 40 - DNA, 88 bp, Homo sapiens
  source 1..88: mol_type = unassigned DNA
cgagggtcggctcgctcctggggacccgcggatgtcgcgagggggcgccgcgccactgaaggctgggacgggggcggtgcgcggggcg

SEQ ID NO: 41-42 - skipped (2 entries)

SEQ ID NO: 43 - DNA, 87 bp, Homo sapiens
  source 1..87: mol_type = unassigned DNA
cgagttgctccgtttcctcattttgggggcgaagaagggtcggggagtgggggaaagcgggaggcgccgcggcctgggaggcccccg

SEQ ID NO: 44 - DNA, 45 bp, Homo sapiens
  source 1..45: mol_type = unassigned DNA
cgagcttctgcgctgcctctgtcgtcggagcccgggtttgccacg

SEQ ID NO: 45 - skipped

SEQ ID NO: 46 - DNA, 173 bp, Homo sapiens
  source 1..173: mol_type = unassigned DNA
cggttggaattctcttaagcattgccctgagtctattttcaaatgaaagggggaaaaacccaaaccagattagaatctgaaacagctgaaacagctatcgatttccagcttgctttcaagtctggcagagactgtgaaagtcctaacttctccgcgatgtcagccacggcccg

SEQ ID NO: 47 - skipped

SEQ ID NO: 48 - DNA, 48 bp, Homo sapiens
  source 1..48: mol_type = unassigned DNA
cgaagacgagacgcagagctccaactgcagccagagacaaaggccccg

SEQ ID NO: 49-50 - skipped (2 entries)

SEQ ID NO: 51 - DNA, 36 bp, Homo sapiens
  source 1..36: mol_type = unassigned DNA
cgaccgtggcgccagcttcccgccccctctgccccg

SEQ ID NO: 52-56 - skipped (5 entries)

SEQ ID NO: 57 - DNA, 97 bp, Homo sapiens
  source 1..97: mol_type = unassigned DNA
cgcttgcaaggacgggagtcggggagggtgtagggcgagtttaaaggacgggcagagcaagccccgggaagaggcaggggttttccctcccgggtcg

SEQ ID NO: 58-59 - skipped (2 entries)

SEQ ID NO: 60 - DNA, 67 bp, Homo sapiens
  source 1..67: mol_type = unassigned DNA
cgccagactctcacagtccttcacacgccactcccactgcctcagggaaccacaagcacaggcatcg

SEQ ID NO: 61 - skipped

SEQ ID NO: 62 - DNA, 29 bp, Homo sapiens
  source 1..29: mol_type = unassigned DNA
cgacagggcagagggtcagcagtcacccg

SEQ ID NO: 63 - DNA, 49 bp, Homo sapiens
  source 1..49: mol_type = unassigned DNA
cggccgagcctaagtggctgaagcgcggacgaggatgcgcggggcctcg

SEQ ID NO: 64 - DNA, 188 bp, Homo sapiens
  source 1..188: mol_type = unassigned DNA
cgggagctcgaagtcgcctcgagcgggggtgggcggtgagcggacccccgggtgttgaccaggtgtttggtggtagagcagggaaggggggaacggacgtcgaccctagggatccctcacccgctcacgctccttggcgttggccacacgccgccgctccagcaccaactggaggttttcagtggacg

SEQ ID NO: 65-66 - skipped (2 entries)

SEQ ID NO: 67 - DNA, 113 bp, Homo sapiens
  source 1..113: mol_type = unassigned DNA
cggccgtgggcggctgcggcgcggccgcggcgaggggcgagcggggctggtctcgccgctcgggcgagagcatccctttgggggccaaccctgcggctccgccttcacccgcg

SEQ ID NO: 68 - DNA, 208 bp, Homo sapiens
  source 1..208: mol_type = unassigned DNA
cggcggatggagacgggagggaggctgcgaggtcgctcgaggagagactaaggctctagaaacggagaagcgggcgctctgcgggaggcggcggcgctgccgctggccgtcaagggcgggaagtgttctgggactctcattaggggccgcgagcctcgagcgtcaaattcccgcggcgtccgcctagcgcgctgctgtggcgggcgcg

SEQ ID NO: 69 - DNA, 96 bp, Homo sapiens
  source 1..96: mol_type = unassigned DNA
cggcccgcccgcccctcagcagccctggggtgcccggggcggccctgcaagcgggagagagcggcgaggcggcggcgccgagtgcggggggatgcg

SEQ ID NO: 70 - DNA, 236 bp, Homo sapiens
  source 1..236: mol_type = unassigned DNA
cggtgagtacccgccgtggggaagggtcctggggacccactggaggccgcggcccgcagcagccaggggccgagccacggccacggacgccctggtgtcccggtccgtgccgggcctccaggcggaggaggcgtccgctgggctcagatccccgactccagccccggttccccggcgcctgggctgcgcggagtccctgtcccgcgtcccggacccctacgcgcagcctccacgcg

SEQ ID NO: 71 - DNA, 211 bp, Homo sapiens
  source 1..211: mol_type = unassigned DNA
cgcccccagccgtgtcctggctgcgcagctggaaaggttgagcagctcactgctgtccctctgttcggccttggacacatcgcctgaactcctgggcgcctctgctgttaagtgggggacagcactatttactggggaggaaaactccaggaatgtggaccctggggccacgcaggggttgggaagtgaagggcagggaacgcgggcggcg

SEQ ID NO: 72 - DNA, 193 bp, Homo sapiens
  source 1..193: mol_type = unassigned DNA
cgcgcgccgaagctgtgacggtttactaagcagagacttgcgaggcacacagagagggaatgaggcggaaccgttcgggggctcgttgacactgcagagcctcccgcagcatcgctgccttaaatcccgcctttccaggcgtgcgcgcacagcgagccagaggaggctccgtcccgacctggggtcccccgcg

SEQ ID NO: 73 - skipped

SEQ ID NO: 74 - DNA, 199 bp, Homo sapiens
  source 1..199: mol_type = unassigned DNA
cgagcaggaggatctaacgaatccagcttgtggacatgccctaatttccatttccgcctcctccaggtctgttcaggtgaggatgatgggagggaaaagcggtgtacagccgtaacattggcaccctgcaagagccgccggggcactgacacagagggacaccgcattggagatgcggtgtctacggagatttattgcg

SEQ ID NO: 75 - DNA, 87 bp, Homo sapiens
  source 1..87: mol_type = unassigned DNA
cggctagcagaggcggcgcctggtcttggatgctgcagcggagacgccaaggagactgaatgcagggagcgaggcgtagcggccgcg

SEQ ID NO: 76 - DNA, 68 bp, Homo sapiens
  source 1..68: mol_type = unassigned DNA
cgcgcgagagtgcccagctgggaaatgcagctccgaattaacatcgtatgtttcataatcagtttacg

SEQ ID NO: 77 - DNA, 61 bp, Homo sapiens
  source 1..61: mol_type = unassigned DNA
cgcccctggcattcagggaatggtttgcaaatctcaatgcaccacagactagttttcaccg

SEQ ID NO: 78 - DNA, 40 bp, Homo sapiens
  source 1..40: mol_type = unassigned DNA
cgggtgctttgccgctgccgcttctgctgccgccgatccg

SEQ ID NO: 79 - DNA, 647 bp, Homo sapiens
  source 1..647: mol_type = unassigned DNA
cgagcggcgaggcgagggcgagcgcgccgaggaagggcgggagaggcgcggagcttggccgcgccgcgctgcgccgagcgccgggctctccccgcgagctccccgggcccgcgcgcgcgccccccactgcccccgccccccgcgcggcgcgtgccccccaccccccgccgcgcgccctcgcacccgcccggctccacgcggcgcgcgcctgccctggcggcagcggcggcggcggcggcgcgtcctcccccgaacgccgtctccagggctgctggctgcgctctccattgttccgcggctgctgcccggggtgggcggcgaggcgggggggaggtgtcggcttggccgccggggagggcttaccgctcgggcggaccctcactgcgagagcgatgcgggcccaggcgcggcgcgcgggggctgcagggcgcctagcactgggggttgccggcgcgcgggggcctcctcctggctcccaggcactcgctgctgctgggcgcccctcgcatcctcggttactatggatatctcgctcctccgccgccccctccgcgcactccgggaggccgccggggcggtagcagcggcgcggctccgcgggtgcccaggtgaccggctcggcagcggcagagcagtggcagcagccg

SEQ ID NO: 80 - DNA, 327 bp, Homo sapiens
  source 1..327: mol_type = unassigned DNA
cgcggaggagggtcgggctgactgccgccgctgagctgtccccggacgggagcgcctgtccacggcactcaccccctccagcggtggaaatgtggagaagtaagtgggaggcggtgtcgggaactgactcctcttaaaacggtcggcgccgctgctctgaaatgggcggctaagtgcttgtgggactaagggcggcctcagagatgcccggaaaatcgctgccacggccagagtgcggcgcagacgcggcagagttggaggtgtccgcggtgcaggctgctgcccacgccgctcaggccaggtgctgagggctcagcccgcgcctcg

SEQ ID NO: 81 - skipped

SEQ ID NO: 82 - DNA, 324 bp, Homo sapiens
  source 1..324: mol_type = unassigned DNA
cgcagctgctgcagccgctgcggctgccgccatctggcaggaggcatagggcatgggtgagggaggctgcggtagcggccacgagttgttgaggaagccagactgcaggtacttggggggcgccaggtagccgtagccgtcggccccggcgcccgccacgccgcacccgcctgcggcgcctccggccccgaagagccccttgccgggctggaagtgcgcgggcggcggccggaagggcctcttcatgcggcggcggcgccggtagttgcccttctcgaacatgtcttcgcaggccgggtccagcgtccagtagttgcccttgcg

SEQ ID NO: 83 - DNA, 77 bp, Homo sapiens
  source 1..77: mol_type = unassigned DNA
cggcgcagcggcgggaacccgaggccgagcgccgcggcggcagcgctagaagcgcacccatcgggcacggcgaggcg

SEQ ID NO: 84 - DNA, 158 bp, Homo sapiens
  source 1..158: mol_type = unassigned DNA
cgccctggattcccgaagtcagttccctgcgcagcggaccagagaggtccacccgcggacgtcaactcaacccctgggcggggtccgggggctgagcagaaggcgaggtctggggagtacggacaactttgagggctgtctgtgccggggtgggagcg

SEQ ID NO: 85 - DNA, 79 bp, Homo sapiens
  source 1..79: mol_type = unassigned DNA
cgctcctaaaaattaaataaatcaataagagaatcaattaataggcagcgctgcgaccgccaggagcgcggagcgcgcg

SEQ ID NO: 86 - DNA, 137 bp, Homo sapiens
  source 1..137: mol_type = unassigned DNA
cgtctcctctgacccccaaggtcagaaagatttattacttccttcgagagggcgcagccacagacccactagagagggcgggcagggtgtcggaagccagagaacggcgctccgcgtcctcccaccgctccagggcg

SEQ ID NO: 87 - DNA, 112 bp, Homo sapiens
  source 1..112: mol_type = unassigned DNA
cgcgggctatgcactgctgctggtgctcactatgctcaacctcctggactacaagtggcacaaggagccgctgcagcagtgcaaccccgatgggccgctgggtgccgcagcg

SEQ ID NO: 88-89 - skipped (2 entries)

SEQ ID NO: 90 - DNA, 282 bp, Homo sapiens
  source 1..282: mol_type = unassigned DNA
cgtgggcagggcgccgcagcctgcgcagccccgaggaccccgcgtcgctctcccgagccagggttctcaggagcgggccgcgcaggagacgttagagggggttgttagcggctgttgggagaacgggtcacggaaacagtcccttccaaagccggggccatcgtggggtgggcgagtccgccctcccaggccgggggcgcggaccagaggggacgtgtgcagacggccgcggtcagccccacctcgcccgggcggagacgcacagctggagctggagggccg

SEQ ID NO: 91 - DNA, 81 bp, Homo sapiens
  source 1..81: mol_type = unassigned DNA
cggctgccaactcgcccaacttgctgcgcgggtggccgctcagagccgcgggcttgcggggcgccccccgccgccgcgccg

SEQ ID NO: 92 - DNA, 53 bp, Homo sapiens
  source 1..53: mol_type = unassigned DNA
cggccgtggagaccctaaccgagctcacgctggcgcaaaaggcaaaagccgcg

SEQ ID NO: 93 - DNA, 40 bp, Homo sapiens
  source 1..40: mol_type = unassigned DNA
cgcgccgagggggcgccagcggggacgtgagctggcgccg

SEQ ID NO: 94 - DNA, 206 bp, Homo sapiens
  source 1..206: mol_type = unassigned DNA
cggcagcctgagcgccccggatggcccgcggcggggcggcctgcaagagcgacgcgcggctgctgctggggcgggacgcgctgcggccggcgcccgccctgctggcccccgccgtgctgctgggcgccgcgctcggcctcggcctcggcctttggcttggctgccgcgcgggccgccagcgcacgcgacaccaggtgggtcggccg

SEQ ID NO: 95 - DNA, 38 bp, Homo sapiens
  source 1..38: mol_type = unassigned DNA
cgagggcacggcggccgccgccccgcgcagcagcagcg

SEQ ID NO: 96 - skipped

SEQ ID NO: 97 - DNA, 25 bp, Homo sapiens
  source 1..25: mol_type = unassigned DNA
cgagcgaatgcaacgcgtacacacg

SEQ ID NO: 98 - DNA, 79 bp, Homo sapiens
  source 1..79: mol_type = unassigned DNA
cgcctctctctttttttaaaaaaaaaatttaaacaattcccaaataatatttaataggaaagaagaaggaaaaggagcg

SEQ ID NO: 99 - DNA, 33 bp, Homo sapiens
  source 1..33: mol_type = unassigned DNA
cgagggcaacggccgaggcgccacgcggggccg

SEQ ID NO: 100 - DNA, 132 bp, Homo sapiens
  source 1..132: mol_type = unassigned DNA
cgcaggccaggcggtcgtgggccgagctggccatgaccacctccccgcgggcgtcctgcttgggcgagtgctctccgtagcgcccgcactccgtcttctccgtgtgcagctccgcgccgccgccgcccgccg

SEQ ID NO: 101 - DNA, 32 bp, Homo sapiens
  source 1..32: mol_type = unassigned DNA
cgccctcggggcagaggagggggtgccaggcg

SEQ ID NO: 102-103 - skipped (2 entries)

SEQ ID NO: 104 - DNA, 20 bp, Homo sapiens
  source 1..20: mol_type = unassigned DNA
cggcgccgctggcatactcg

SEQ ID NO: 105 - DNA, 85 bp, Homo sapiens
  source 1..85: mol_type = unassigned DNA
cggcgggcgcaggggcagggcatgactgacgcgccctctgcctgcgcttatgtgagagaaagcggccgagggagggagcgtgccg

SEQ ID NO: 106 - DNA, 230 bp, Homo sapiens
  source 1..230: mol_type = unassigned DNA
cgcaggggccgagaaagtggcggagaggcggtggccgaggcccaggggcgagcgcgggctgagctggtccctgctgcgttcacgagcgacacccaccccttcgctgcggacgccccgcgggcgccaggctgggggccctgcgaccgacccctcccgcccccgaggtaccgccgggcccgcctggcaggcagcgcgtcccgcgagctggagggccgagtttcgcggggccg

SEQ ID NO: 107 - DNA, 84 bp, Homo sapiens
  source 1..84: mol_type = unassigned DNA
cgcaagagctggtcaaaatgccctcaggtgcgtgggggcttcggggccttagttggagcccgacaccctgagactggcggcccg

SEQ ID NO: 108 - DNA, 42 bp, Homo sapiens
  source 1..42: mol_type = unassigned DNA
cgcgcgagcttttccgtttggctgagtcaaaaagggatcgcg

SEQ ID NO: 109 - DNA, 45 bp, Homo sapiens
  source 1..45: mol_type = unassigned DNA
cggacgactctttctaccctttcgaggacgaggaggagcacggcg

SEQ ID NO: 110 - DNA, 26 bp, Homo sapiens
  source 1..26: mol_type = unassigned DNA
cgcgggacaagggatgctggcgggcg

SEQ ID NO: 111 - DNA, 50 bp, Homo sapiens
  source 1..50: mol_type = unassigned DNA
cgaggctcctcccgcggcgcgcggcagcctcagcctccacctaaacctcg

SEQ ID NO: 112 - DNA, 56 bp, Homo sapiens
  source 1..56: mol_type = unassigned DNA
cgctggcccacccgcgtgcacgcccaccccccacgcgcgtccctggctcagaagcg

SEQ ID NO: 113 - DNA, 44 bp, Homo sapiens
  source 1..44: mol_type = unassigned DNA
cgagcgtgtgcgcgcgcgaggggagcgcgtgcgcggtgaggacg

SEQ ID NO: 114-115 - skipped (2 entries)

SEQ ID NO: 116 - DNA, 58 bp, Homo sapiens
  source 1..58: mol_type = unassigned DNA
cgcccgcctacccgccaggcaggcggtggtgtcgatccacttgagcagctgccccgcg

SEQ ID NO: 117 - DNA, 151 bp, Homo sapiens
  source 1..151: mol_type = unassigned DNA
cgcactggcttcccccgctcccgcccgcacgaaagccctgcccgacgtctgcagtcagcatcgcccgcactgcctagggagggtttgcgccgagacccagtggccgagtgagccacagagtcgctggtcctggggacgctgtcttctaccg

SEQ ID NO: 118 - DNA, 17 bp, Homo sapiens
  source 1..17: mol_type = unassigned DNA
cggtcctggggagtccg

SEQ ID NO: 119 - DNA, 70 bp, Homo sapiens
  source 1..70: mol_type = unassigned DNA
cgcagaggggccagcaattccatgggtggtggggccctccatccctggacgcagcggggagcagcgggcg

SEQ ID NO: 120 - DNA, 59 bp, Homo sapiens
  source 1..59: mol_type = unassigned DNA
cggcgcccagcgcccaagcgctaacccgctgaaagtttctcagcgaaatctcagggacg

SEQ ID NO: 121 - DNA, 25 bp, Homo sapiens
  source 1..25: mol_type = unassigned DNA
cggctcggatagaggttacccagcg

SEQ ID NO: 122 - DNA, 57 bp, Homo sapiens
  source 1..57: mol_type = unassigned DNA
cgtcttccgctacctgacaccagccaggcagcccccagggccagagcgtcagcgccg

SEQ ID NO: 123 - DNA, 111 bp, Homo sapiens
  source 1..111: mol_type = unassigned DNA
cgttcagggttggggctcggtgggaacctccccgtgcccgaagggacgaccccgtcagagagtcccccgacccttgcacctaccgtccttggcaggacgtggagctgctcg

SEQ ID NO: 124 - DNA, 211 bp, Homo sapiens
  source 1..211: mol_type = unassigned DNA
cgctactgtcgtcgttggcgctttgcttctggaacctcccagcaagatggcactcactgtctgttcccttccgattagcacccccagccgcgctccctcctccccgggatacgtattagtcacatactgtggggagaagatgggctatgtaaatgtaagtcaacgcgctttcccagccacctttgcataatgcaacaggaacagcgacccg

SEQ ID NO: 125 - DNA, 75 bp, Homo sapiens
  source 1..75: mol_type = unassigned DNA
cgctcctactactctttcaaacactgcagcaagttgcagcaaggcgggcaaataccgacagcgcgcgtgggggcg

SEQ ID NO: 126 - skipped

SEQ ID NO: 127 - DNA, 66 bp, Homo sapiens
  source 1..66: mol_type = unassigned DNA
cggccacctgtcctccgccctcggggcgccgcccagcttcgcgccaggcgccttctccagcgcccg

SEQ ID NO: 128 - skipped

SEQ ID NO: 129 - DNA, 163 bp, Homo sapiens
  source 1..163: mol_type = unassigned DNA
cgcgcgctcctcggcgggtcggcgggtccggaagctccgctgcccgggccgggtccccaagcccgcagccgctttgactaaaataggcatcgcgacggcggcggcaggcggcggcagccagggctggggccgcaccgcgcacgcgcatgcgcccgccgccccg

SEQ ID NO: 130 - DNA, 99 bp, Homo sapiens
  source 1..99: mol_type = unassigned DNA
cgcttctgccctggagcgcggtcgggagtaaaatcgcaggagtgggagggtagcgagccagctggattccgagccgcggagcgcgctggctttgctccg

SEQ ID NO: 131 - DNA, 96 bp, Homo sapiens
  source 1..96: mol_type = unassigned DNA
cgcgcctccgcaggcggcactgcccgcggcgcggcgtgtgcaccgagcgagtgaaggtatgtgtggcgggcgcggctggagctgccgccgccgccg

SEQ ID NO: 132 - skipped

SEQ ID NO: 133 - DNA, 16 bp, Homo sapiens
  source 1..16: mol_type = unassigned DNA
cggcgagattggcacg

SEQ ID NO: 134 - skipped

SEQ ID NO: 135 - DNA, 141 bp, Homo sapiens
  source 1..141: mol_type = unassigned DNA
cgcggctgatggctgacgcgctgcgcggctgcgtgcctgccttccacggcgtggtggagcgcgacggcgaaagctacctgcagctgcaggacctgctcgatggcttcgacggaccttgtgtgctcgactgcaaaatgggcg

SEQ ID NO: 136 - skipped

SEQ ID NO: 137 - DNA, 37 bp, Homo sapiens
  source 1..37: mol_type = unassigned DNA
cgttcccaaccaaccgcacaaaacccgcaacacctcg

SEQ ID NO: 138 - DNA, 52 bp, Homo sapiens
  source 1..52: mol_type = unassigned DNA
cgggtcggggcacttggcgccctgtgtgggtggcgggagcggggacgcctcg

SEQ ID NO: 139-142 - skipped (4 entries)

SEQ ID NO: 143 - DNA, 17 bp, Homo sapiens
  source 1..17: mol_type = unassigned DNA
cgagttggggcgggacg

SEQ ID NO: 144 - DNA, 136 bp, Homo sapiens
  source 1..136: mol_type = unassigned DNA
cgcgagtcccctgacgcggggaccagttatgaatcgggggtgtgtgtttgcctccagagacctggcaaggtgcggagccctccagaagtgcggtcaagcggcagcggagacggcgagccaggaacctccccccgcg

SEQ ID NO: 145 - DNA, 31 bp, Homo sapiens
  source 1..31: mol_type = unassigned DNA
cgcgcccagcgccccgctcactccctggccg

SEQ ID NO: 146 - DNA, 25 bp, Homo sapiens
  source 1..25: mol_type = unassigned DNA
cgtgcaccctgaggtctggttggcg

SEQ ID NO: 147 - DNA, 12 bp, Homo sapiens
  source 1..12: mol_type = unassigned DNA
cgttgacgagcg

SEQ ID NO: 148 - skipped

SEQ ID NO: 149 - DNA, 199 bp, Homo sapiens
  source 1..199: mol_type = unassigned DNA
cgcgcccgcggccgcggccgctgcatggcgctgagatggcgggggcgccgcgcggcggaggcggcggcggaggcggcgcgggcgagcccgggggcgccgagcgggcggccgggacaagccgccggcgcgggctccgggcgtgcgacgaggagttcgcttgcccagagctggaggcgctgttccgcggctacacgctgcg

SEQ ID NO: 150 - DNA, 91 bp, Homo sapiens
  source 1..91: mol_type = unassigned DNA
cggccccgggtgcagggtggcgggcccggcggcgcgcgtccccctccccctcctggcggcccgcacgtgtcgcccgcgccgcgcccccacg

SEQ ID NO: 151 - DNA, 108 bp, Homo sapiens
  source 1..108: mol_type = unassigned DNA
cgcgtctccactgttccatctcctccgttcctggagttcctcggtgactctactatagcttctgttatcctgtgacctgcaggtactgggagatccatagggaggacg

SEQ ID NO: 152 - DNA, 13 bp, Homo sapiens
  source 1..13: mol_type = unassigned DNA
cgcaccgatttcg

SEQ ID NO: 153 - DNA, 176 bp, Homo sapiens
  source 1..176: mol_type = unassigned DNA
cggcccgctgggcaaggcgtccgagaaagcgcctggcgggaggaggtgcgcggctttctgctccaggcggcccgggtgcccgctttatgcggggcgagcgtccggccgacccccgccggggcggagcctgaggggtggctgattcatgcacggggactgtcaccccgccgcccccg

SEQ ID NO: 154 - skipped

SEQ ID NO: 155 - DNA, 157 bp, Homo sapiens
  source 1..157: mol_type = unassigned DNA
cgagaagttccgcgggagacggcggctcccaaagttactttgggccgcgggagcgcgggaccggggctgcgggcgccgagagcgcgtcgtctgccgcctccgtgcgccgccgccgcctctgcgcgacgcccctcggccaggcctgggaaagcgcccg

SEQ ID NO: 156 - DNA, 66 bp, Homo sapiens
  source 1..66: mol_type = unassigned DNA
cgcgaaccgctaggggccctcgcgctcccttcccacccaggccccctgtccctcccgccgcggccg

SEQ ID NO: 157 - DNA, 498 bp, Homo sapiens
  source 1..498: mol_type = unassigned DNA
cgccgccgcgccgaccggccgcgcccccgggaccccctgggccggccgcgcccccggccccctctcccgccgcgcctgtgcgcacgcgcagacgccgcaagctctacgagctgcacgcggccggcgccccgccccccccgccgcccggccacgcccccgcgcccgagtcgccgcggcccggaagcggaagcggaagcggccccggcctcgcccctgcgcgctcgcccggccccgcggccgacggccccatcgacctgagcaagaagccgcggcgcccgctccccggagccccggcaccggcgctggccgactaccacgagtgcacggcctgccgcgtgagcttccacagcctcgaggcctacctggcgcacaagaagtactcgtgccccgctgcgccaccgcccggcgcgctcggcctgcccgccgccgcctgcccctactgccccccgaacggcccggtgcgcggggacctgctggagcatttccgcctggcgcacg

SEQ ID NO: 158 - DNA, 27 bp, Homo sapiens
  source 1..27: mol_type = unassigned DNA
cgcgggtccgaacgcccttcgcgctcg

SEQ ID NO: 159-160 - skipped (2 entries)

SEQ ID NO: 161 - DNA, 16 bp, Homo sapiens
  source 1..16: mol_type = unassigned DNA
cgtcgcctgcctcgcg

SEQ ID NO: 162 - DNA, 53 bp, Homo sapiens
  source 1..53: mol_type = unassigned DNA
cgcggagggcgccgaatcagagcctgcggggcttgacagcttctcttgcggcg

SEQ ID NO: 163-166 - skipped (4 entries)

SEQ ID NO: 167 - DNA, 14 bp, Homo sapiens
  source 1..14: mol_type = unassigned DNA
cgtgtccacctacg

SEQ ID NO: 168 - DNA, 186 bp, Homo sapiens
  source 1..186: mol_type = unassigned DNA
cggcgggaaggcctgggtgttcacagatagagctggagttccccggtgggtggcacagacaattagctggggctgcctcacatgtaatctaattacaggggaaacaggctcaaacaccgggtgataagcagcgcaactgtttcgggtgactctgtaatttttcctccattaattttctccataacg

SEQ ID NO: 169 - DNA, 79 bp, Homo sapiens
  source 1..79: mol_type = unassigned DNA
cggggtacgctcgccctcggcggggcccctcgctccgctgtgggagtggcagtgggtgtcggggtggagaaagtacgcg

SEQ ID NO: 170 - DNA, 49 bp, Homo sapiens
  source 1..49: mol_type = unassigned DNA
cgccgcgtccgcgccgcgctccctgcaggcaacgggagacgcccccgcg

SEQ ID NO: 171 - DNA, 17 bp, Homo sapiens
  source 1..17: mol_type = unassigned DNA
cggatgaaccgttcgcg

SEQ ID NO: 172-174 - skipped (3 entries)

SEQ ID NO: 175 - DNA, 165 bp, Homo sapiens
  source 1..165: mol_type = unassigned DNA
cgggaacgctgcagtttggttgagcgtgacttttaggctctgtgaggaaaagtcgagcgcgccacatcgaggcgctagccgtttattctaccacaaggtaaaagattcatgctgtcctagttaccctaaagctgggagatacactgcacttcctaccagaccccg

SEQ ID NO: 176 - DNA, 14 bp, Homo sapiens
  source 1..14: mol_type = unassigned DNA
cgcgcgggtcagcg

SEQ ID NO: 177-178 - skipped (2 entries)

SEQ ID NO: 179 - DNA, 97 bp, Homo sapiens
  source 1..97: mol_type = unassigned DNA
cgtgtgcccagggccagcagcacgcacaagtgccagcgcacggccgccgcgcccatgctcaatgcgggccccgctgggcgtgcgggcgtgcggggcg

SEQ ID NO: 180 - skipped

SEQ ID NO: 181 - DNA, 98 bp, Homo sapiens
  source 1..98: mol_type = unassigned DNA
cgcggatcgcgcgctcccgccgctctgcccctaaacttctgccgtagctccctttcaagccagcgaatttattccttaaaaccagaaactgaacctcg

SEQ ID NO: 182 - DNA, 69 bp, Homo sapiens
  source 1..69: mol_type = unassigned DNA
cggaggggcggaggaggtgctggcggcggcactgagcggcggcggcgcagggcgcgcgggccttccgcg

SEQ ID NO: 183-186 - skipped (4 entries)

SEQ ID NO: 187 - DNA, 103 bp, Homo sapiens
  source 1..103: mol_type = unassigned DNA
cggccccaggacggcagggaccgcgatggagcggcttcgggggcggccgggggacggcgcggtggcggtcggccagcccgctcctccgggggcggcgggcgcg

SEQ ID NO: 188 - skipped

SEQ ID NO: 189 - DNA, 21 bp, Homo sapiens
  source 1..21: mol_type = unassigned DNA
cggctctcggcggcggcggcg

SEQ ID NO: 190 - DNA, 148 bp, Homo sapiens
  source 1..148: mol_type = unassigned DNA
cggcgcctcaaaggggaggaccctgcggcgcgggtaagaggcggcgggagcgcgcggcccgggagtgtggctgcagtgcgccgggacaccagggctccgcgctccgcactcaagaggctcccgcgtcccaacccctcgcgcccgcgcg

SEQ ID NO: 191-192 - skipped (2 entries)

SEQ ID NO: 193 - DNA, 26 bp, Homo sapiens
  source 1..26: mol_type = unassigned DNA
cgccgagaggcagcgcgtgatggccg

SEQ ID NO: 194 - DNA, 119 bp, Homo sapiens
  source 1..119: mol_type = unassigned DNA
cgcacgcccaagtgcgcgcgctgccgcaaccatggcgtcctgtcctggctcaagggccacaagcgttactgccgcttcaaggactgcacctgcgagaagtgcatcctcatcatcgagcg

SEQ ID NO: 195 - DNA, 66 bp, Homo sapiens
  source 1..66: mol_type = unassigned DNA
cggcccgacctttcccgcccagcctgggtcagaggaagccgaaagcggcctcagcaaggtgaggcg

SEQ ID NO: 196 - DNA, 60 bp, Homo sapiens
  source 1..60: mol_type = unassigned DNA
cgagcgaagtcgtcgtgtctgggcagaaggcgctccaggaggcgcgaggccccagccgcg

SEQ ID NO: 197 - skipped

SEQ ID NO: 198 - DNA, 124 bp, Homo sapiens
  source 1..124: mol_type = unassigned DNA
cgctcggagcgggacctgcttgctccagtgcacgccgcggagcgaaccatcgggctggcgggggtggaggggtgcaggcgtgggggctgcgggccgctcgggccttgggcttctcctgccgccg

SEQ ID NO: 199 - skipped

SEQ ID NO: 200 - DNA, 156 bp, Homo sapiens
  source 1..156: mol_type = unassigned DNA
cggggcaccgcggcgctcgccgccgcctccccgcaggtgatcatcctcctgcaggtgtcctcgggtctcaggtggctgcgtgtctgcgccatggttgacattctgggcgagcggcacctggtgacctgtaagggcgcgacggtggaggccgaggcg

SEQ ID NO: 201 - skipped

SEQ ID NO: 202 - DNA, 91 bp, Homo sapiens
  source 1..91: mol_type = unassigned DNA
cgcgcgccgccgaaaccttgcctccgccgccgctcaccgacaggctgtggagaaggtcatcgaccgatgtcaccgagtcattcctgaagcg

SEQ ID NO: 203-204 - skipped (2 entries)

SEQ ID NO: 205 - DNA, 89 bp, Homo sapiens
  source 1..89: mol_type = unassigned DNA
cgttactcgcgtgccagcagttgggcgctccgacctctcagaccgcgtgagcccagcaaagcggttaggcgcgcgcctgcagctcggcg

SEQ ID NO: 206 - DNA, 13 bp, Homo sapiens
  source 1..13: mol_type = unassigned DNA
cgtctttaatccg

SEQ ID NO: 207 - skipped

SEQ ID NO: 208 - DNA, 47 bp, Homo sapiens
  source 1..47: mol_type = unassigned DNA
cgagcgccagaccccagcaacaaaaggccaggcgaggccacatcgcg

SEQ ID NO: 209-210 - skipped (2 entries)

SEQ ID NO: 211 - DNA, 159 bp, Homo sapiens
  source 1..159: mol_type = unassigned DNA
cgatgcccgcggcgtgaaagcgcccgcggcgggcgccgacctctgtcctagtctcctgctccccccgccccgcttgtcccgtgcccttgtgaccctggctttggcgccgtcgcccaggcgccccgcaatgtagctgcccctgcgcctcggcgggaggcg

SEQ ID NO: 212-214 - skipped (3 entries)

SEQ ID NO: 215 - DNA, 78 bp, Homo sapiens
  source 1..78: mol_type = unassigned DNA
cgggcgccgaggcttgggctttagccgtggcgctcgcctcggcgcagtggggagccgcgggcgtcggagaagcggccg

SEQ ID NO: 216 - skipped

SEQ ID NO: 217 - DNA, 48 bp, Homo sapiens
  source 1..48: mol_type = unassigned DNA
cgcggaggagtttcgcacccgaccgtgcacagcgaccgagttggcgcg

SEQ ID NO: 218-220 - skipped (3 entries)

SEQ ID NO: 221 - DNA, 157 bp, Homo sapiens
  source 1..157: mol_type = unassigned DNA
cgcttctatagttttgctttgacagctaaggaaaaaatctgccaaaaaccagaggcgctgctgagtgttggcgtgggaatgctagtttagtcagagccttgctctgggccatttaaataaaaacagacatgttggtggcaaatgccagttgaacacg

SEQ ID NO: 222 - skipped

SEQ ID NO: 223 - DNA, 82 bp, Homo sapiens
  source 1..82: mol_type = unassigned DNA
cgcgcgccagtttcccgccccgtggaagcgcccctctcccgacttcggctgatccccgctcgccgccctccccgcgggtgcg

SEQ ID NO: 224 - DNA, 23 bp, Homo sapiens
  source 1..23: mol_type = unassigned DNA
cgcctggccgcctcacctggccg

SEQ ID NO: 225 - DNA, 38 bp, Homo sapiens
  source 1..38: mol_type = unassigned DNA
cgagttcccgcgcgtctacgagcagctttgcgagttcg

SEQ ID NO: 226 - skipped

SEQ ID NO: 227 - DNA, 165 bp, Homo sapiens
  source 1..165: mol_type = unassigned DNA
cgtgccctcctccagcgagcgcagcgagttgttcctgaagtccaggtagaccaggtcgccgtagaagatgaagaagtcctcggggatccgctggatgcggttgccggccaccagcagcttgcgcacgtccagggggaaagggtctggcacgctgggcagcccgcg

SEQ ID NO: 228-230 - skipped (3 entries)

SEQ ID NO: 231 - DNA, 23 bp, Homo sapiens
  source 1..23: mol_type = unassigned DNA
cggtgtccgggggccgcctgtcg

SEQ ID NO: 232 - skipped

SEQ ID NO: 233 - DNA, 66 bp, Homo sapiens
  source 1..66: mol_type = unassigned DNA
cggccgtggcgggctccctggggcggcagctctaggcgcgggcgcgcagcagccccgaaggcgccg

SEQ ID NO: 234 - DNA, 43 bp, Homo sapiens
  source 1..43: mol_type = unassigned DNA
cgaacaaaaagagtccaggccgcgcgggcgggctgcgcgcccg

SEQ ID NO: 235 - skipped

SEQ ID NO: 236 - DNA, 62 bp, Homo sapiens
  source 1..62: mol_type = unassigned DNA
cgcccagatgcggcggcggcgacggctccagctgcgcctcgtggccatcctcgtgcagcgcg

SEQ ID NO: 237 - skipped

SEQ ID NO: 238 - DNA, 138 bp, Homo sapiens
  source 1..138: mol_type = unassigned DNA
cgaaagattcgaaactccaaaagctccactgcgtgcctctgggaggggagggggcgcgccaggaaaggagtggaaaaaagtgggcgaggaggagcgttgaaaatttcctgacaagtagtttccgtgcgcccgagagcg

SEQ ID NO: 239-242 - skipped (4 entries)

SEQ ID NO: 243 - DNA, 187 bp, Homo sapiens
  source 1..187: mol_type = unassigned DNA
cggcagaagtgggaggtacacgaggagttactggaaacggcgcttctgtggaggagccgggggggatggggagtagagggagggggccctgttgcctcagcgccccgaggtcgtggagcggcagcagctgcagccggagcagcaccagcaacagcaacagcgagcgggacggagttaggaccgctcg

SEQ ID NO: 244-245 - skipped (2 entries)

SEQ ID NO: 246 - DNA, 110 bp, Homo sapiens
  source 1..110: mol_type = unassigned DNA
cgcggcgtgcagctcggcggatgctgccaggtcaggcgactccgccgcccctggagcgcgagcgcgcttcagcttgtagcgatgattctggaaccagatcttgacctgcg

SEQ ID NO: 247 - skipped

SEQ ID NO: 248 - DNA, 189 bp, Homo sapiens
  source 1..189: mol_type = unassigned DNA
cgggaggctctgcccgctcggtggctgccgcggcctcctccgcgctgctctccacgcctggcttattatgcacgaggcaggcaatttgccttcctccccggggacccatctcggagacaagaaggtagtttgttctctgtaatggcttctgctggagtgcggcggggcccaggcgcgagcgggggcacg

SEQ ID NO: 249 - DNA, 42 bp, Homo sapiens
  source 1..42: mol_type = unassigned DNA
cgctgaaggtgggtggaacgagggcgcttgagtgcactcgcg

SEQ ID NO: 250 - DNA, 33 bp, Homo sapiens
  source 1..33: mol_type = unassigned DNA
cgcgcgggggcttcaggcactttgcgctccacg

SEQ ID NO: 251 - DNA, 15 bp, Homo sapiens
  source 1..15: mol_type = unassigned DNA
cgcgccagccgaacg

SEQ ID NO: 252 - DNA, 51 bp, Homo sapiens
  source 1..51: mol_type = unassigned DNA
cgctgggacagagctgcctgctggagctgccgcagatcgccgtggtgggcg

SEQ ID NO: 253 - skipped

SEQ ID NO: 254 - DNA, 268 bp, Homo sapiens
  source 1..268: mol_type = unassigned DNA
cggagcgcgcagcccgtctctgaataagaagtgagtacaatggcgtgtttgtaaaaaaaagcttcaagtccgtctttttcaaaaaacattttgaatgctgcatgcctcatgcttcccagcgcctcgcgggagagacccggctatagagcaggaggtgagaccccccctccggtacccccacccctctggccgcacgctctcctgccccagccttttctgggaggactgcaaatgccccctctcagcaagcggccgtttcccatcttcg

SEQ ID NO: 255 - skipped

SEQ ID NO: 256 - DNA, 33 bp, Homo sapiens
  source 1..33: mol_type = unassigned DNA
cggagcccccaggagcagtcagaccgatcaccg

SEQ ID NO: 257 - DNA, 23 bp, Homo sapiens
  source 1..23: mol_type = unassigned DNA
cgcccactagcccgagactttcg

SEQ ID NO: 258 - DNA, 40 bp, Homo sapiens
  source 1..40: mol_type = unassigned DNA
cgccccgacccgacgcctccccgcccgaccaggtgcctcg

SEQ ID NO: 259 - DNA, 10 bp, Homo sapiens
  source 1..10: mol_type = unassigned DNA
cgcggctccg

SEQ ID NO: 260 - DNA, 181 bp, Homo sapiens
  source 1..181: mol_type = unassigned DNA
cggctgctgaccgcccctcccgcgctcgccagggcccctgccccgcgtcagccaccgcgcgccttccccctgcccatgccgcagcccccgtggcttttgttctggactcgggatgccaggttgagacacgtcctgcaaacctctggcagaaatgggcgcaagggggtggatttcgttttcg

SEQ ID NO: 261 - DNA, 195 bp, Homo sapiens
  source 1..195: mol_type = unassigned DNA
cgacctaggacgtcggcgcctgccaggatcccctcgcctgccccccgcgccccgcgcgcgctcatgccaccaccacggggagggtgcatgcggcaggtgcctggccgaggcccccgggagcgagtcgcccttacgtgctccagcttgtctttcctccgaagccagacgctggcgctgtagtcctgctgcttgacg

SEQ ID NO: 262 - skipped

SEQ ID NO: 263 - DNA, 358 bp, Homo sapiens
  source 1..358: mol_type = unassigned DNA
cggcgtccgagtgaccctgtctagcctcgttctgcgctcctgcaaaccacgttgctgcgctaactacaaacctggccaacatgtctttgtaaccctatcatttaaaaacgcttccaggcacctggccgctgccagatcaggttcgcgggcccggaggaggtcctcccacctgcccccgccagccccggggaccgtgcgcggcctccgtgtggcccccgcccacgaggtccctcgggcaggaaccgccgcgcgacctctgttcagcggccgcgtcctggccacgggcgacccctgtcgggaaccctgttcccggctaagctgcgttcccgcattccggtggctctcacccgagctcgcg

SEQ ID NO: 264 - DNA, 13 bp, Homo sapiens
  source 1..13: mol_type = unassigned DNA
cgcagttgtggcg

SEQ ID NO: 265-266 - skipped (2 entries)

SEQ ID NO: 267 - DNA, 95 bp, Homo sapiens
  source 1..95: mol_type = unassigned DNA
cgcgcggggtcacctgaaggttggggcgcggaagctcaactccgtgctgattgggctccaagttttctgcgccctcgcctcgtcccgagtgcccg

SEQ ID NO: 268 - DNA, 45 bp, Homo sapiens
  source 1..45: mol_type = unassigned DNA
cggcagcaggttggagcgcaccgtgcgcgtcctgccctctcggcg

SEQ ID NO: 269 - DNA, 104 bp, Homo sapiens
  source 1..104: mol_type = unassigned DNA
cggctgagtcggagcccacgcggcgcgcgcctcccgcgaggaacttttcggcttgtaggctgcttgtcactctcgctttccgacgcgcctccccctggctcgcg

SEQ ID NO: 270 - DNA, 87 bp, Homo sapiens
  source 1..87: mol_type = unassigned DNA
cgctttcgcccccgctgacactttgcaaagccgcggcggcagcggcggggaccacgctgcggtgcaccaccttccgccaccctcccg

SEQ ID NO: 271 - DNA, 62 bp, Homo sapiens
  source 1..62: mol_type = unassigned DNA
cgacagtttgcgagcctcggctgcaagtggcctctcctccccgcggttgttgttcagtgtcg

SEQ ID NO: 272-279 - skipped (8 entries)

SEQ ID NO: 280 - DNA, 145 bp, Homo sapiens
  source 1..145: mol_type = unassigned DNA
cgccggtttgctggcgacctggcgcatctgcccgcgcgccctggtctcagctgtcgcaggttcctcctgcacccacttccagtcttcaaagccagtgcagtcagcaccgtccacctggagccccaatcctctcctgcgattcccg

SEQ ID NO: 281 - skipped

SEQ ID NO: 282 - DNA, 19 bp, Homo sapiens
  source 1..19: mol_type = unassigned DNA
cgcccaccgccaggagccg

SEQ ID NO: 283 - DNA, 35 bp, Homo sapiens
  source 1..35: mol_type = unassigned DNA
cggcggcggcggcggccccattagcggagcctccg

SEQ ID NO: 284-285 - skipped (2 entries)

SEQ ID NO: 286 - DNA, 36 bp, Homo sapiens
  source 1..36: mol_type = unassigned DNA
cgagctggcgctggtccgctggctgcaggagagccg

SEQ ID NO: 287 - skipped

SEQ ID NO: 288 - DNA, 42 bp, Homo sapiens
  source 1..42: mol_type = unassigned DNA
cggctgagccttcgcctgcctaatcccatttgccattgtacg

SEQ ID NO: 289-290 - skipped (2 entries)

SEQ ID NO: 291 - DNA, 18 bp, Homo sapiens
  source 1..18: mol_type = unassigned DNA
cgcgcagcgcccgcgccg

SEQ ID NO: 292-294 - skipped (3 entries)

SEQ ID NO: 295 - DNA, 118 bp, Homo sapiens
  source 1..118: mol_type = unassigned DNA
cgtgccagaccccggctccgcgacccaggtgagtgccgccaccgccgcctggagggacctaagggccctgggctgggacttggggccgcaccggggcctgaggcagaacagcgacgcg

SEQ ID NO: 296 - DNA, 22 bp, Homo sapiens
  source 1..22: mol_type = unassigned DNA
cgaaccgcgggcggcgcggacg

SEQ ID NO: 297-300 - skipped (4 entries)

SEQ ID NO: 301 - DNA, 31 bp, Homo sapiens
  source 1..31: mol_type = unassigned DNA
cgacaagagctcggtgctgagatgtgttacg

SEQ ID NO: 302-310 - skipped (9 entries)

SEQ ID NO: 311 - DNA, 69 bp, Homo sapiens
  source 1..69: mol_type = unassigned DNA
cgctaggggcggccagcggccgtttggctggcgtgtcggcggcgctcggggagggcgggccggggggcg

SEQ ID NO: 312 - DNA, 415 bp, Homo sapiens
  source 1..415: mol_type = unassigned DNA
cgcctcttctcttggcccgactggctctggtttccttcacgttcccagcctccaaattggcgtccgccccatggctcgtgtaggacgctaaaagcacggtaaatcccagggcgatctccagcagacgccctcgacgcatgatgccgagccgccaccggctcccgccgcctcttgccgcgcccggggctcggtctgcggccgccgctgcgccctgaagcgcaccgcgccgccggggtcccgctatcccgccgcccgtcccccgggccgggctcctcccgccttctccaggcgctgctcccacttcaggcggcccctgccagctgcaacacagagacaaatccccgaggcggggagactttcagggcatcgggatgctgaagcctcgcggtccccattcccaagcccaacccgtgcg

SEQ ID NO: 313-317 - skipped (5 entries)

SEQ ID NO: 318 - DNA, 62 bp, Homo sapiens
  source 1..62: mol_type = unassigned DNA
cgcgcccgccgctagctcgcacagcgcctcgcacactcccgcacgcgcttgaaatgcgcacg

SEQ ID NO: 319-322 - skipped (4 entries)

SEQ ID NO: 323 - DNA, 20 bp, Homo sapiens
  source 1..20: mol_type = unassigned DNA
cgcaaacgcaaaagcctccg

SEQ ID NO: 324 - DNA, 69 bp, Homo sapiens
  source 1..69: mol_type = unassigned DNA
cgccccctggggcccctggctgccgagtcccgctaaggcaaagacgccagcaagcgaggaagcgcagcg

SEQ ID NO: 325 - skipped

SEQ ID NO: 326 - DNA, 318 bp, Homo sapiens
  source 1..318: mol_type = unassigned DNA
cgtcccgcggtagtgtcagttccctggggaccaggaagggcgactcttgcctgggagtcagtgcttgggccgtcgggtccgggtaagcgctgggggtttggctcgagaagatgcggataggtggcctagggcgccgcggatctccgccctctgcgggcaccgggagcccagggtcgaggcgcgccgccccgaggggccccttctcctaacaatgcgcccggaatggagtccgcgccctgacagcgcgggtcagcccgaaaccgcccagaatccgcttcgatgagtgggtgagccgctctgggagtctgccgcgtctcg

SEQ ID NO: 327 - DNA, 27 bp, Homo sapiens
  source 1..27: mol_type = unassigned DNA
cgtggtggctccccgagcggaggcgcg

SEQ ID NO: 328 - skipped

SEQ ID NO: 329 - DNA, 13 bp, Homo sapiens
  source 1..13: mol_type = unassigned DNA
cgagctccccgcg

SEQ ID NO: 330 - DNA, 189 bp, Homo sapiens
  source 1..189: mol_type = unassigned DNA
cggtgacgatgtgcagagccttctggcacagactgttcactccgtcctccttgtggaaactcatcgtttggcttttctttcgttttctctttttttcccagttagccgtcttttcctcttcccgtacctctaacccctctggcgccctaagccatagtccgcccgcggtgactttggctggagattgcg

SEQ ID NO: 331-332 - skipped (2 entries)

SEQ ID NO: 333 - DNA, 13 bp, Homo sapiens
  source 1..13: mol_type = unassigned DNA
cgggggctgagcg

SEQ ID NO: 334 - DNA, 51 bp, Homo sapiens
  source 1..51: mol_type = unassigned DNA
cggcgtgtgccgtgcgtggggtggggtgcgggctgggcggcctcgccttcg

SEQ ID NO: 335 - DNA, 289 bp, Homo sapiens
  source 1..289: mol_type = unassigned DNA
cgcccgcccgcaccccgcttccttcggcccttccttcaaatcccaaacgcaccgccgtgctccaaagaaggtgtccacgtcgcccccagaccccggagcgccccctctccacccccgggacttcccaggtcgctcactcctcccgccccccgcccagatctgagagggaccgaaaacacacccccgactcgggcagccagggccgaaactgtcaagaggagaaaaggtaaagcggaaggagggtggccataaacagatttttttgccccttcttaaaaggacactgccg

SEQ ID NO: 336 - skipped

SEQ ID NO: 337 - DNA, 165 bp, Homo sapiens
  source 1..165: mol_type = unassigned DNA
cggacttgtccccgcagccgttgcggacctcccggtcgtcatggcgactgtgaaatgtggggtggggcgcatgcgttggaagccattcgcgcgggcagtccctgagtgtcccctcacgtgctccccagcgcgagcagcacccccgcctctgcgcttcccagagcg

SEQ ID NO: 338 - DNA, 21 bp, Homo sapiens
  source 1..21: mol_type = unassigned DNA
cgccgcccctgcaccacttcg

SEQ ID NO: 339-341 - skipped (3 entries)

SEQ ID NO: 342 - DNA, 159 bp, Homo sapiens
  source 1..159: mol_type = unassigned DNA
cggctgcgctggccgcactgtccctctacaacatgagcagcgccggcggcgaccgcctgggccgcggcaagtcggcccgctgcggcctcaccttctccgtgggccgcgtgtatcgctggatggtggacagccgcgtggcgctgcgcatccacgagcacg

SEQ ID NO: 343 - skipped

SEQ ID NO: 344 - DNA, 129 bp, Homo sapiens
  source 1..129: mol_type = unassigned DNA
cggggggcggaattcagagaggtaaagtgacccgcccccaaatcgcaataccaggaggacagcagggctagatggaatctttcggttcacagtccccgacctcgggcaagtgccccactcgggcgcacg

SEQ ID NO: 345 - skipped

SEQ ID NO: 346 - DNA, 120 bp, Homo sapiens
  source 1..120: mol_type = unassigned DNA
cgctggagatggcgagctccgagactccctctatcttctgttttcagagcaactctatggtaccaaaaaaaaaaaaaaaaaaaaaaaaaaaaaaaaaaaaaaaaaaagaaggagaaggcg

SEQ ID NO: 347 - skipped

SEQ ID NO: 348 - DNA, 171 bp, Homo sapiens
  source 1..171: mol_type = unassigned DNA
cgcggacgctgacgatctcctccacgtccgacaagtcctcgttctcgtcgtatcgctggcggtcaatcgggcgctgcgaggacccaaaccagagagcccgggacattattgtgggggctggaggtcgcctctcaacctgggcccagcactaacaggtgcagcagccgagcg

SEQ ID NO: 349-351 - skipped (3 entries)

SEQ ID NO: 352 - DNA, 64 bp, Homo sapiens
  source 1..64: mol_type = unassigned DNA
cggcaggtgagcggcgcggctgcaggtgagcagcagcctcggctcgcgcgcccagctttccccg

SEQ ID NO: 353-356 - skipped (4 entries)

SEQ ID NO: 357 - DNA, 16 bp, Homo sapiens
  source 1..16: mol_type = unassigned DNA
cgctccgcagggctcg

SEQ ID NO: 358-360 - skipped (3 entries)

SEQ ID NO: 361 - DNA, 18 bp, Homo sapiens
  source 1..18: mol_type = unassigned DNA
cgcattccctcggccgcg

SEQ ID NO: 362 - DNA, 118 bp, Homo sapiens
  source 1..118: mol_type = unassigned DNA
cgggcggatgggggtcaccgaggcggctcgtctccaggcgcacacttcgcacatctctttgctaagtgaaggggccaaaatgcacagatgggggagtctacccaggaacagaggcgcg

SEQ ID NO: 363-367 - skipped (5 entries)

SEQ ID NO: 368 - DNA, 22 bp, Homo sapiens
  source 1..22: mol_type = unassigned DNA
cgcgccgccccagaggagtccg

SEQ ID NO: 369 - DNA, 112 bp, Homo sapiens
  source 1..112: mol_type = unassigned DNA
cgggagcgcacgagtgtgtgtgtgtgtgtgtgtgttcgcggtgtgcccgcggctcggtgcacacgcgcgcgggttgtaaagtcaggagctgcgggagcgcctccctgcctcg

SEQ ID NO: 370 - DNA, 109 bp, Homo sapiens
  source 1..109: mol_type = unassigned DNA
cgctctgcctgggctgggcccacttacgttctgggtggggctcaggaactgcgtgcgggcgtagcgggtgagcatgctgatgatgaccacctggccccactcctccacg

SEQ ID NO: 371-373 - skipped (3 entries)

SEQ ID NO: 374 - DNA, 431 bp, Homo sapiens
  source 1..431: mol_type = unassigned DNA
cgagggggctctgggaccgagcggcctcgcagcggcgacagaaatacatattttacgaaaaagaaaaaaaaaaaaacgagtcgcgcgaacccgtcaagtcagatgtgcgcggcttgaagcggaggaggctctgacgtcagccccacctcgcgcagcccggcctggccgcagactcgccggtcactcgccggcggctcaggccgggaggggccaggacagtcccggccgcgcggtggacggaggggccattcctccgggcgttagcaaataaattccatccgagtcaatatcgcccagcgaacggtgtttctctttagtcacccgagaacgagaggcacttttaattagaaattaattaatgagcagctgctccttcccgccccactgtaatcattcgtctcaattacaaatgagacctatgaaaggacacg

SEQ ID NO: 375 - skipped

SEQ ID NO: 376 - DNA, 40 bp, Homo sapiens
  source 1..40: mol_type = unassigned DNA
cgccgcgccccgctgtagctccgctggagagatggggacg

SEQ ID NO: 377 - skipped

SEQ ID NO: 378 - DNA, 22 bp, Homo sapiens
  source 1..22: mol_type = unassigned DNA
cgccagcaggttcagggccacg

SEQ ID NO: 379 - skipped

SEQ ID NO: 380 - DNA, 47 bp, Homo sapiens
  source 1..47: mol_type = unassigned DNA
cgggcatcttgcattgcacgcagtacatgctgtggttctccagctcg

SEQ ID NO: 381 - DNA, 24 bp, Homo sapiens
  source 1..24: mol_type = unassigned DNA
cgccgttgggggacttctggcacg

SEQ ID NO: 382 - skipped

SEQ ID NO: 383 - DNA, 45 bp, Homo sapiens
  source 1..45: mol_type = unassigned DNA
cgggactccaggcccacccagcaagctaattggctgaggccctcg

SEQ ID NO: 384 - skipped

SEQ ID NO: 385 - DNA, 258 bp, Homo sapiens
  source 1..258: mol_type = unassigned DNA
cgaagcggcgggagtcggtgcagcctcaacttctactgcgtgtcccaggtcgccaaccagctttgctcgcgtgccgttggcccggaggctgccgcgccagtctctgcgtgcgcctgagcgcgctggagcatttgcgaggccagggctgccgacggcgagaggatactttgaggaacacggtgcttcagtcccgcccccgctctccgcccgagctggaggttggggcgcgctgagccgcagcgcctggacaagtgcgcg

SEQ ID NO: 386 - DNA, 45 bp, Homo sapiens
  source 1..45: mol_type = unassigned DNA
cgccctggcggctccgagggacctgggctcgggcttgcggtcgcg

SEQ ID NO: 387-388 - skipped (2 entries)

SEQ ID NO: 389 - DNA, 67 bp, Homo sapiens
  source 1..67: mol_type = unassigned DNA
cggggcgccaacagctcaggacttgggttgcaggctggttcttgcaccaaccagcggggcggcctcg

SEQ ID NO: 390 - DNA, 43 bp, Homo sapiens
  source 1..43: mol_type = unassigned DNA
cggctgacccgcagcggcagcggcagcagcgaggactcgagcg

SEQ ID NO: 391-392 - skipped (2 entries)

SEQ ID NO: 393 - DNA, 113 bp, Homo sapiens
  source 1..113: mol_type = unassigned DNA
cgtgtgtttagctgaattcagtatatttttctcgcacttctcgcttttttttttttctttctgaatctgctcttctgctttgcgggcccctaatctctcccgaatctcgggcg

SEQ ID NO: 394-395 - skipped (2 entries)

SEQ ID NO: 396 - DNA, 84 bp, Homo sapiens
  source 1..84: mol_type = unassigned DNA
cgctgcgcgccgcctccgcggagccgagcggcggtggctgcggaagcgactggggctgcgcggacaccagcgccccagagcccg

SEQ ID NO: 397 - skipped

SEQ ID NO: 398 - DNA, 48 bp, Homo sapiens
  source 1..48: mol_type = unassigned DNA
cgcgcttcatcttgtagcggtggttctggaaccagatcttgacctgcg

SEQ ID NO: 399 - DNA, 228 bp, Homo sapiens
  source 1..228: mol_type = unassigned DNA
cgggccgcgcgcttacctgcgtcctcgtcgtcgaaggagttcatgcacgggaagtagatggcgagcgcctcgaaggaggcggacagactgaggcggctctgcgagcgctccatgcccgcgccggcgccgggcgcctcggccgcggcggcggcggcggcggcgggcggcttgggcagcttggccgccccattcttgacgcggagtacggcgcgcggcgtggtggcggcg

SEQ ID NO: 400 - DNA, 47 bp, Homo sapiens
  source 1..47: mol_type = unassigned DNA
cgcaccttggccgtaacaagcgcgctccacgccgccacgcaccagcg

SEQ ID NO: 401 - DNA, 185 bp, Homo sapiens
  source 1..185: mol_type = unassigned DNA
cgcgcagggggcgggctctacctccccctcgcccccgcttcggttttaagccgcggaggcgcccggtgggacctcgctgctgtccaatcaggggggaccgggtgagctcctcttcctggagccgggctccaccagcgccgcaggctcacaggccgggggtgggggctctggaccgaggggcggcg

SEQ ID NO: 402 - DNA, 216 bp, Homo sapiens
  source 1..216: mol_type = unassigned DNA
cgggggcgctaatcccgggagcaggaggccgggctccagccgccgggccttgcgcgcctgcttcttgcggcgcggccggtacttgtagttggggtggtcgcgcaagtgctgcacgcgcagccgttcggcttcctccacgaagggccgcttctccgccgcgttcagctccttccacgctttgcctgcgggccgtgggcgccagtgagtggaacgccg

SEQ ID NO: 403 - DNA, 344 bp, Homo sapiens
  source 1..344: mol_type = unassigned DNA
cgtggtcccgtgtcccggggcgcgctccagctccggcaccactagctcctcgtcctcctcggaggggcgcccgagtgcgtccgacacggccagtagcgccgcggcgagcagcagcagcgtgggtactggcccaaagctccgagaccccggagcccgctccgcgttccccatgtcgctgcccagcttgcgccttccgaacccctcgggcacagctcgctgcattggagccccaggagacaccgctcgtagcagcgcacggagcgagggacctttagttcgggtcgggagagcaaagcctcgttggcctgctctggattgttaaaattaacaatttctattattcg

SEQ ID NO: 404 - DNA, 28 bp, Homo sapiens
  source 1..28: mol_type = unassigned DNA
cgttctgtttggcagccaggccgagacg

SEQ ID NO: 405 - DNA, 124 bp, Homo sapiens
  source 1..124: mol_type = unassigned DNA
cgtggggcgctggacttaccgagaggttagcgccgccgtcgggggagggcgtgtcccgcacgtgtgtgtccgcgcgtgtccgcgcccgcgtgtgccagcgcgcgtgccttggccgtgcgcgccg

SEQ ID NO: 406 - DNA, 80 bp, Homo sapiens
  source 1..80: mol_type = unassigned DNA
cgcccgccagggtcacgaagagcgcaacgaacgccagcagcacggcgctcacggtgagcgcccgcgccgcctgcacctcg

SEQ ID NO: 407 - DNA, 62 bp, Homo sapiens
  source 1..62: mol_type = unassigned DNA
cggacaggccccgcagtgagcaggtaagggtcgccccgccgcggctgcccctccacgcctcg

SEQ ID NO: 408 - DNA, 165 bp, Homo sapiens
  source 1..165: mol_type = unassigned DNA
cgaccgtatgcgccgatttgtcgctgggcgtccgtttcctcttgctggggctgggcgcggcctcggagcctggcggcggtggtgagggcgcacggccagctgcagcggcgctgtgcttgccgtggatccaggacaccttaggcttggtggcggggtcaggtggcg

SEQ ID NO: 409 - DNA, 43 bp, Homo sapiens
  source 1..43: mol_type = unassigned DNA
cgtccctgtgcttctggtggttccggcgcttcctcggagcgcg

SEQ ID NO: 410 - DNA, 86 bp, Homo sapiens
  source 1..86: mol_type = unassigned DNA
cgccgccgccttcgccgggagccaagcccgccgggccggcccggtcccaggtgggcagctcggcttgcagctggttggaggtggcg

SEQ ID NO: 411 - DNA, 23 bp, Homo sapiens
  source 1..23: mol_type = unassigned DNA
cgagcccgtgggataagggggcg

SEQ ID NO: 412 - skipped

SEQ ID NO: 413 - DNA, 99 bp, Homo sapiens
  source 1..99: mol_type = unassigned DNA
cgcggccatgcaattggtggatttttttaaaccgttttggaggggggagcgcggcgttgggggcgggagagcgctcctggctgtgagctgctcctgccg

SEQ ID NO: 414 - DNA, 73 bp, Homo sapiens
  source 1..73: mol_type = unassigned DNA
cgtggaactcgtgagccccacgcaacgcctccctgccgcccagggtgggctcctagaagcacagaaatggtcg

SEQ ID NO: 415 - skipped

SEQ ID NO: 416 - DNA, 52 bp, Homo sapiens
  source 1..52: mol_type = unassigned DNA
cggggcgggcagggaccgagtcaggagagagcgggcgggggtcctgggagcg

SEQ ID NO: 417 - DNA, 50 bp, Homo sapiens
  source 1..50: mol_type = unassigned DNA
cgcgagcaggagggcgcactccatggtcaggtgcggacgcggcggctgcg

SEQ ID NO: 418 - DNA, 50 bp, Homo sapiens
  source 1..50: mol_type = unassigned DNA
cgggtcggggcatcacaggcgcgggaatccacgtgtggactctgcgttcg

SEQ ID NO: 419-420 - skipped (2 entries)

SEQ ID NO: 421 - DNA, 52 bp, Homo sapiens
  source 1..52: mol_type = unassigned DNA
cggggtagcgcaggagcaggcaggggctcgcggctcgcgtgggccccaggcg

SEQ ID NO: 422-424 - skipped (3 entries)

SEQ ID NO: 425 - DNA, 138 bp, Homo sapiens
  source 1..138: mol_type = unassigned DNA
cgagtggcagcagcaggagcggggtgacgaacaagatcacgaaggacttgaacttggagacatagctcagcgccgaggccatcgcgcgggagggagactggcgggcgagacgagtgaggggcagctagaggcgccgcg

SEQ ID NO: 426-428 - skipped (3 entries)

SEQ ID NO: 429 - DNA, 1017 bp, Homo sapiens
  source 1..1017: mol_type = unassigned DNA
cgctcacctgagtcctaaaagctgttgaatccacatggtcacgtttcggggagcggggcctcagacctggctcgcccaggccatctgcgcggcgcccgcgcccgctcgcttccgtcccgcggcgccggtctccggctctcggtccgccgcctcccgccgcccgccggccgcggggcgcacagcgagtcagagcgcggccgcgcggggctccatgccggccggcgcgccgccgccgttggggcgcatggctcaggctgggcggcccgcgggggcgcacatcctccggccggggcgcggggctcgcggccccctccgccggcggcacagcgaaggcggcagcgaggcggggcgtgttccggcgctgtcgcggcgcagcaaagggctggggagccgcggcttcgccctccggggcggcgaggagggaggccggcggcgctgccgctcacggtgcgtgtctcccggcgcgcggctcttgcctccagccggagctccgcgccgatggggcggcgctgcttagggtttggggtgacgcgacgcggacggacgcgagtcccctccgcgctgccgggtcggggggctctgccagaggctccgccgccgatcggcgccactcaagttgcccgggggctccgtctgagcgctcgctctgcagacggccgcggcccggagactggcaggaggcgggcacgagaggcgcgcggggcgagggcgccgtggagcgcggggcgtggggacgcgcggcggcggcgccgcgcggaggaggcgcgcggggatcccggggccccgccgcccgcgcccaccgcgcccgccgcagagccgcccgcgctgctcagccgcctccctcctcgcgtctgcctctccgcgcgctcgcccccgcctcccggagccggtcccaactccgcccgcccggcccggctcacgtcacccgccttccccgcccctcgaacgggagctcgagcccctggcctggccccggctcctgctcgccgccccaccttgcgggggccggggtcgccg

SEQ ID NO: 430 - DNA, 166 bp, Homo sapiens
  source 1..166: mol_type = unassigned DNA
cgcgcgctgagggtgcggtgagctgagtgcggggccaagcatgttctggcgtcgacttcgcccaggggcccaggacctggcgcccaaggggctccctggcgacggagacttccgacgcagcagcgacccgcggctgcccaagctgaccccgcccgcgctccgagcg

SEQ ID NO: 431-436 - skipped (6 entries)

SEQ ID NO: 437 - DNA, 14 bp, Homo sapiens
  source 1..14: mol_type = unassigned DNA
cgcgctgagacgcg

SEQ ID NO: 438-440 - skipped (3 entries)

SEQ ID NO: 441 - DNA, 125 bp, Homo sapiens
  source 1..125: mol_type = unassigned DNA
cgtcccgcgccctcgccccgccatgctcctgctgctggggctgtgcctggggctgtccctgtgtgtggggtcgcaggaagaggcgcagagctggggccactcttcggagcaggtaagtggagccg

SEQ ID NO: 442 - skipped

SEQ ID NO: 443 - DNA, 131 bp, Homo sapiens
  source 1..131: mol_type = unassigned DNA
cgtgcgcagcccagcccctcccggacgtcctcgcccccgcccgggcacatcgtgctccgcaccgaggcagagaggggcacgcggatcccagcccctgcgagcccctctgcccgccgccacttcacaccccg

SEQ ID NO: 444 - DNA, 94 bp, Homo sapiens
  source 1..94: mol_type = unassigned DNA
cgggccgcgtgggtttgggcgcgccgtggtgggcaagcggggccagcggagcgggaacccgcacaccctccgagcggagccgaggacaggcccg

SEQ ID NO: 445-446 - skipped (2 entries)

SEQ ID NO: 447 - DNA, 27 bp, Homo sapiens
  source 1..27: mol_type = unassigned DNA
cgcgcaagtattcccctccccatcgcg

SEQ ID NO: 448 - DNA, 164 bp, Homo sapiens
  source 1..164: mol_type = unassigned DNA
cgcgattctcctcgggaggtgtctgcgaaggcggctctgccgcggtgggggtggggaggctagggcttcggaccgctggagttggggtcgcagccagttcctggcgagtgtttcctggctgctgccgcaggggcttgctttttcggatttcccctctaatctcg

SEQ ID NO: 449-450 - skipped (2 entries)

SEQ ID NO: 451 - DNA, 68 bp, Homo sapiens
  source 1..68: mol_type = unassigned DNA
cgcatctgaaaattccgccgcagccacctccctcccatgggaaagccccgacctcggcgggcccagcg

SEQ ID NO: 452 - DNA, 508 bp, Homo sapiens
  source 1..508: mol_type = unassigned DNA
cgcaacttgggcgcgccagtacaaactcggccttcggcttttctgaagccagtcaagttcgcacagggcccccagcgcctggaaatctgagaggcgtggaagggtggggagtcccgcgaagtctccagtccctgggtgtcctccggctccgcgggggagcgggcctggagctaaaccggccggccgtaggctggagtagcgggcgccggagcgcgcggtggggatgtccgaaaaggagttagaggctcagtcggagagtccgagaacacgagggatgcctaccttgtaacatggcctcaagtttcttcctgtccacgcggaagcgctcctcgctccactccgggctgtgcagggtcgccccggcgaccaagtcgtcctcggagccgggcactggggagtcggtgctgcgctcgctgttggagccggggtccgactgcgccgccaggtagccgggctctccctgggcggccatggtgggcgcgcagcgctcgggctcccgctgccgccg

SEQ ID NO: 453-462 - skipped (10 entries)

SEQ ID NO: 463 - DNA, 396 bp, Homo sapiens
  source 1..396: mol_type = unassigned DNA
cgggcggcggcggctcgctgtatatatctcggcgcaccccgccaggtcgcgcacagcgccccgagcccaggcgcctccccgcccccctcccgcgctccgcggcggcggcggcggcggcagcagtagcagcaatatggctgttgatgggtgtttggggtggcgctggcggcgggaggagctcccccgagcccctgcgccggctgcccgttgctagctatggcaaatggtggcggcggcggcggcggcagcagcggcggcggcggcggcggcggaggcagcagtcttagaatgagtagcaatatccacgcgaaccatctcagcctagacgcgtcctcctcctcctcctcctcctcttcctcttcttcttcttcctcctcctcttcctcctcgtcctcg

SEQ ID NO: 464 - skipped

SEQ ID NO: 465 - DNA, 70 bp, Homo sapiens
  source 1..70: mol_type = unassigned DNA
cgtgatttttccacttagagattatttagggagatgtcctggatgggacaagtagacaaatggcggcccg

SEQ ID NO: 466 - skipped

SEQ ID NO: 467 - DNA, 68 bp, Homo sapiens
  source 1..68: mol_type = unassigned DNA
cgggagcccggccgcgccctccagcctcggcacccgcgctcagcgcgccgcgccccgcgtcccccgcg

SEQ ID NO: 468 - DNA, 88 bp, Homo sapiens
  source 1..88: mol_type = unassigned DNA
cgccccgcgcaccgcccccgtcccagccttcagtggcgcggcgccccctcgcgacatccgcgggtccccaggagcgagccgaccctcg

SEQ ID NO: 469-470 - skipped (2 entries)

SEQ ID NO: 471 - DNA, 87 bp, Homo sapiens
  source 1..87: mol_type = unassigned DNA
cgggggcctcccaggccgcggcgcctcccgctttcccccactccccgacccttcttcgcccccaaaatgaggaaacggagcaactcg

SEQ ID NO: 472 - DNA, 45 bp, Homo sapiens
  source 1..45: mol_type = unassigned DNA
cgtggcaaacccgggctccgacgacagaggcagcgcagaagctcg

SEQ ID NO: 473 - skipped

SEQ ID NO: 474 - DNA, 173 bp, Homo sapiens
  source 1..173: mol_type = unassigned DNA
cgggccgtggctgacatcgcggagaagttaggactttcacagtctctgccagacttgaaagcaagctggaaatcgatagctgtttcagctgtttcagattctaatctggtttgggtttttccccctttcatttgaaaatagactcagggcaatgcttaagagaattccaaccg

SEQ ID NO: 475 - skipped

SEQ ID NO: 476 - DNA, 48 bp, Homo sapiens
  source 1..48: mol_type = unassigned DNA
cggggcctttgtctctggctgcagttggagctctgcgtctcgtcttcg

SEQ ID NO: 477-478 - skipped (2 entries)

SEQ ID NO: 479 - DNA, 36 bp, Homo sapiens
  source 1..36: mol_type = unassigned DNA
cggggcagagggggcgggaagctggcgccacggtcg

SEQ ID NO: 480-484 - skipped (5 entries)

SEQ ID NO: 485 - DNA, 97 bp, Homo sapiens
  source 1..97: mol_type = unassigned DNA
cgacccgggagggaaaacccctgcctcttcccggggcttgctctgcccgtcctttaaactcgccctacaccctccccgactcccgtccttgcaagcg

SEQ ID NO: 486-487 - skipped (2 entries)

SEQ ID NO: 488 - DNA, 67 bp, Homo sapiens
  source 1..67: mol_type = unassigned DNA
cgatgcctgtgcttgtggttccctgaggcagtgggagtggcgtgtgaaggactgtgagagtctggcg

SEQ ID NO: 489 - skipped

SEQ ID NO: 490 - DNA, 29 bp, Homo sapiens
  source 1..29: mol_type = unassigned DNA
cgggtgactgctgaccctctgccctgtcg

SEQ ID NO: 491 - DNA, 49 bp, Homo sapiens
  source 1..49: mol_type = unassigned DNA
cgaggccccgcgcatcctcgtccgcgcttcagccacttaggctcggccg

SEQ ID NO: 492 - DNA, 188 bp, Homo sapiens
  source 1..188: mol_type = unassigned DNA
cgtccactgaaaacctccagttggtgctggagcggcggcgtgtggccaacgccaaggagcgtgagcgggtgagggatccctagggtcgacgtccgttccccccttccctgctctaccaccaaacacctggtcaacacccgggggtccgctcaccgcccacccccgctcgaggcgacttcgagctcccg

SEQ ID NO: 493-494 - skipped (2 entries)

SEQ ID NO: 495 - DNA, 113 bp, Homo sapiens
  source 1..113: mol_type = unassigned DNA
cgcgggtgaaggcggagccgcagggttggcccccaaagggatgctctcgcccgagcggcgagaccagccccgctcgcccctcgccgcggccgcgccgcagccgcccacggccg

SEQ ID NO: 496 - DNA, 208 bp, Homo sapiens
  source 1..208: mol_type = unassigned DNA
cgcgcccgccacagcagcgcgctaggcggacgccgcgggaatttgacgctcgaggctcgcggcccctaatgagagtcccagaacacttcccgcccttgacggccagcggcagcgccgccgcctcccgcagagcgcccgcttctccgtttctagagccttagtctctcctcgagcgacctcgcagcctccctcccgtctccatccgccg

SEQ ID NO: 497 - DNA, 96 bp, Homo sapiens
  source 1..96: mol_type = unassigned DNA
cgcatccccccgcactcggcgccgccgcctcgccgctctctcccgcttgcagggccgccccgggcaccccagggctgctgaggggcgggcgggccg

SEQ ID NO: 498 - DNA, 236 bp, Homo sapiens
  source 1..236: mol_type = unassigned DNA
cgcgtggaggctgcgcgtaggggtccgggacgcgggacagggactccgcgcagcccaggcgccggggaaccggggctggagtcggggatctgagcccagcggacgcctcctccgcctggaggcccggcacggaccgggacaccagggcgtccgtggccgtggctcggcccctggctgctgcgggccgcggcctccagtgggtccccaggacccttccccacggcgggtactcaccg

SEQ ID NO: 499 - DNA, 211 bp, Homo sapiens
  source 1..211: mol_type = unassigned DNA
cgccgcccgcgttccctgcccttcacttcccaacccctgcgtggccccagggtccacattcctggagttttcctccccagtaaatagtgctgtcccccacttaacagcagaggcgcccaggagttcaggcgatgtgtccaaggccgaacagagggacagcagtgagctgctcaacctttccagctgcgcagccaggacacggctgggggcg

SEQ ID NO: 500 - DNA, 193 bp, Homo sapiens
  source 1..193: mol_type = unassigned DNA
cgcgggggaccccaggtcgggacggagcctcctctggctcgctgtgcgcgcacgcctggaaaggcgggatttaaggcagcgatgctgcgggaggctctgcagtgtcaacgagcccccgaacggttccgcctcattccctctctgtgtgcctcgcaagtctctgcttagtaaaccgtcacagcttcggcgcgcg

SEQ ID NO: 501 - skipped

SEQ ID NO: 502 - DNA, 199 bp, Homo sapiens
  source 1..199: mol_type = unassigned DNA
cgcaataaatctccgtagacaccgcatctccaatgcggtgtccctctgtgtcagtgccccggcggctcttgcagggtgccaatgttacggctgtacaccgcttttccctcccatcatcctcacctgaacagacctggaggaggcggaaatggaaattagggcatgtccacaagctggattcgttagatcctcctgctcg

SEQ ID NO: 503 - DNA, 87 bp, Homo sapiens
  source 1..87: mol_type = unassigned DNA
cgcggccgctacgcctcgctccctgcattcagtctccttggcgtctccgctgcagcatccaagaccaggcgccgcctctgctagccg

SEQ ID NO: 504 - DNA, 68 bp, Homo sapiens
  source 1..68: mol_type = unassigned DNA
cgtaaactgattatgaaacatacgatgttaattcggagctgcatttcccagctgggcactctcgcgcg

SEQ ID NO: 505 - DNA, 61 bp, Homo sapiens
  source 1..61: mol_type = unassigned DNA
cggtgaaaactagtctgtggtgcattgagatttgcaaaccattccctgaatgccaggggcg

SEQ ID NO: 506 - DNA, 40 bp, Homo sapiens
  source 1..40: mol_type = unassigned DNA
cggatcggcggcagcagaagcggcagcggcaaagcacccg

SEQ ID NO: 507 - DNA, 647 bp, Homo sapiens
  source 1..647: mol_type = unassigned DNA
cggctgctgccactgctctgccgctgccgagccggtcacctgggcacccgcggagccgcgccgctgctaccgccccggcggcctcccggagtgcgcggagggggcggcggaggagcgagatatccatagtaaccgaggatgcgaggggcgcccagcagcagcgagtgcctgggagccaggaggaggcccccgcgcgccggcaacccccagtgctaggcgccctgcagcccccgcgcgccgcgcctgggcccgcatcgctctcgcagtgagggtccgcccgagcggtaagccctccccggcggccaagccgacacctcccccccgcctcgccgcccaccccgggcagcagccgcggaacaatggagagcgcagccagcagccctggagacggcgttcgggggaggacgcgccgccgccgccgccgctgccgccagggcaggcgcgcgccgcgtggagccgggcgggtgcgagggcgcgcggcggggggtggggggcacgcgccgcgcggggggcgggggcagtggggggcgcgcgcgcgggcccggggagctcgcggggagagcccggcgctcggcgcagcgcggcgcggccaagctccgcgcctctcccgcccttcctcggcgcgctcgccctcgcctcgccgctcg

SEQ ID NO: 508 - DNA, 327 bp, Homo sapiens
  source 1..327: mol_type = unassigned DNA
cgaggcgcgggctgagccctcagcacctggcctgagcggcgtgggcagcagcctgcaccgcggacacctccaactctgccgcgtctgcgccgcactctggccgtggcagcgattttccgggcatctctgaggccgcccttagtcccacaagcacttagccgcccatttcagagcagcggcgccgaccgttttaagaggagtcagttcccgacaccgcctcccacttacttctccacatttccaccgctggagggggtgagtgccgtggacaggcgctcccgtccggggacagctcagcggcggcagtcagcccgaccctcctccgcg

SEQ ID NO: 509 - skipped

SEQ ID NO: 510 - DNA, 324 bp, Homo sapiens
  source 1..324: mol_type = unassigned DNA
cgcaagggcaactactggacgctggacccggcctgcgaagacatgttcgagaagggcaactaccggcgccgccgccgcatgaagaggcccttccggccgccgcccgcgcacttccagcccggcaaggggctcttcggggccggaggcgccgcaggcgggtgcggcgtggcgggcgccggggccgacggctacggctacctggcgccccccaagtacctgcagtctggcttcctcaacaactcgtggccgctaccgcagcctccctcacccatgccctatgcctcctgccagatggcggcagccgcagcggctgcagcagctgcg

SEQ ID NO: 511 - DNA, 77 bp, Homo sapiens
  source 1..77: mol_type = unassigned DNA
cgcctcgccgtgcccgatgggtgcgcttctagcgctgccgccgcggcgctcggcctcgggttcccgccgctgcgccg

SEQ ID NO: 512 - DNA, 158 bp, Homo sapiens
  source 1..158: mol_type = unassigned DNA
cgctcccaccccggcacagacagccctcaaagttgtccgtactccccagacctcgccttctgctcagcccccggaccccgcccaggggttgagttgacgtccgcgggtggacctctctggtccgctgcgcagggaactgacttcgggaatccagggcg

SEQ ID NO: 513 - DNA, 79 bp, Homo sapiens
  source 1..79: mol_type = unassigned DNA
cgcgcgctccgcgctcctggcggtcgcagcgctgcctattaattgattctcttattgatttatttaatttttaggagcg

SEQ ID NO: 514 - DNA, 137 bp, Homo sapiens
  source 1..137: mol_type = unassigned DNA
cgccctggagcggtgggaggacgcggagcgccgttctctggcttccgacaccctgcccgccctctctagtgggtctgtggctgcgccctctcgaaggaagtaataaatctttctgaccttgggggtcagaggagacg

SEQ ID NO: 515 - DNA, 112 bp, Homo sapiens
  source 1..112: mol_type = unassigned DNA
cgctgcggcacccagcggcccatcggggttgcactgctgcagcggctccttgtgccacttgtagtccaggaggttgagcatagtgagcaccagcagcagtgcatagcccgcg

SEQ ID NO: 516-517 - skipped (2 entries)

SEQ ID NO: 518 - DNA, 282 bp, Homo sapiens
  source 1..282: mol_type = unassigned DNA
cggccctccagctccagctgtgcgtctccgcccgggcgaggtggggctgaccgcggccgtctgcacacgtcccctctggtccgcgcccccggcctgggagggcggactcgcccaccccacgatggccccggctttggaagggactgtttccgtgacccgttctcccaacagccgctaacaaccccctctaacgtctcctgcgcggcccgctcctgagaaccctggctcgggagagcgacgcggggtcctcggggctgcgcaggctgcggcgccctgcccacg

SEQ ID NO: 519 - DNA, 81 bp, Homo sapiens
  source 1..81: mol_type = unassigned DNA
cggcgcggcggcggggggcgccccgcaagcccgcggctctgagcggccacccgcgcagcaagttgggcgagttggcagccg

SEQ ID NO: 520 - DNA, 53 bp, Homo sapiens
  source 1..53: mol_type = unassigned DNA
cgcggcttttgccttttgcgccagcgtgagctcggttagggtctccacggccg

SEQ ID NO: 521 - DNA, 40 bp, Homo sapiens
  source 1..40: mol_type = unassigned DNA
cggcgccagctcacgtccccgctggcgccccctcggcgcg

SEQ ID NO: 522 - DNA, 206 bp, Homo sapiens
  source 1..206: mol_type = unassigned DNA
cggccgacccacctggtgtcgcgtgcgctggcggcccgcgcggcagccaagccaaaggccgaggccgaggccgagcgcggcgcccagcagcacggcgggggccagcagggcgggcgccggccgcagcgcgtcccgccccagcagcagccgcgcgtcgctcttgcaggccgccccgccgcgggccatccggggcgctcaggctgccg

SEQ ID NO: 523 - DNA, 38 bp, Homo sapiens
  source 1..38: mol_type = unassigned DNA
cgctgctgctgcgcggggcggcggccgccgtgccctcg

SEQ ID NO: 524 - skipped

SEQ ID NO: 525 - DNA, 25 bp, Homo sapiens
  source 1..25: mol_type = unassigned DNA
cgtgtgtacgcgttgcattcgctcg

SEQ ID NO: 526 - DNA, 79 bp, Homo sapiens
  source 1..79: mol_type = unassigned DNA
cgctccttttccttcttctttcctattaaatattatttgggaattgtttaaattttttttttaaaaaaagagagaggcg

SEQ ID NO: 527 - DNA, 33 bp, Homo sapiens
  source 1..33: mol_type = unassigned DNA
cggccccgcgtggcgcctcggccgttgccctcg

SEQ ID NO: 528 - DNA, 132 bp, Homo sapiens
  source 1..132: mol_type = unassigned DNA
cggcgggcggcggcggcgcggagctgcacacggagaagacggagtgcgggcgctacggagagcactcgcccaagcaggacgcccgcggggaggtggtcatggccagctcggcccacgaccgcctggcctgcg

SEQ ID NO: 529 - DNA, 32 bp, Homo sapiens
  source 1..32: mol_type = unassigned DNA
cgcctggcaccccctcctctgccccgagggcg

SEQ ID NO: 530-531 - skipped (2 entries)

SEQ ID NO: 532 - DNA, 20 bp, Homo sapiens
  source 1..20: mol_type = unassigned DNA
cgagtatgccagcggcgccg

SEQ ID NO: 533 - DNA, 85 bp, Homo sapiens
  source 1..85: mol_type = unassigned DNA
cggcacgctccctccctcggccgctttctctcacataagcgcaggcagagggcgcgtcagtcatgccctgcccctgcgcccgccg

SEQ ID NO: 534 - DNA, 230 bp, Homo sapiens
  source 1..230: mol_type = unassigned DNA
cggccccgcgaaactcggccctccagctcgcgggacgcgctgcctgccaggcgggcccggcggtacctcgggggcgggaggggtcggtcgcagggcccccagcctggcgcccgcggggcgtccgcagcgaaggggtgggtgtcgctcgtgaacgcagcagggaccagctcagcccgcgctcgcccctgggcctcggccaccgcctctccgccactttctcggcccctgcg

SEQ ID NO: 535 - DNA, 84 bp, Homo sapiens
  source 1..84: mol_type = unassigned DNA
cgggccgccagtctcagggtgtcgggctccaactaaggccccgaagcccccacgcacctgagggcattttgaccagctcttgcg

SEQ ID NO: 536 - DNA, 42 bp, Homo sapiens
  source 1..42: mol_type = unassigned DNA
cgcgatccctttttgactcagccaaacggaaaagctcgcgcg

SEQ ID NO: 537 - DNA, 45 bp, Homo sapiens
  source 1..45: mol_type = unassigned DNA
cgccgtgctcctcctcgtcctcgaaagggtagaaagagtcgtccg

SEQ ID NO: 538 - DNA, 26 bp, Homo sapiens
  source 1..26: mol_type = unassigned DNA
cgcccgccagcatcccttgtcccgcg

SEQ ID NO: 539 - DNA, 50 bp, Homo sapiens
  source 1..50: mol_type = unassigned DNA
cgaggtttaggtggaggctgaggctgccgcgcgccgcgggaggagcctcg

SEQ ID NO: 540 - DNA, 56 bp, Homo sapiens
  source 1..56: mol_type = unassigned DNA
cgcttctgagccagggacgcgcgtggggggtgggcgtgcacgcgggtgggccagcg

SEQ ID NO: 541 - DNA, 44 bp, Homo sapiens
  source 1..44: mol_type = unassigned DNA
cgtcctcaccgcgcacgcgctcccctcgcgcgcgcacacgctcg

SEQ ID NO: 542-543 - skipped (2 entries)

SEQ ID NO: 544 - DNA, 58 bp, Homo sapiens
  source 1..58: mol_type = unassigned DNA
cgcggggcagctgctcaagtggatcgacaccaccgcctgcctggcgggtaggcgggcg

SEQ ID NO: 545 - DNA, 151 bp, Homo sapiens
  source 1..151: mol_type = unassigned DNA
cggtagaagacagcgtccccaggaccagcgactctgtggctcactcggccactgggtctcggcgcaaaccctccctaggcagtgcgggcgatgctgactgcagacgtcgggcagggctttcgtgcgggcgggagcgggggaagccagtgcg

SEQ ID NO: 546 - DNA, 17 bp, Homo sapiens
  source 1..17: mol_type = unassigned DNA
cggactccccaggaccg

SEQ ID NO: 547 - DNA, 70 bp, Homo sapiens
  source 1..70: mol_type = unassigned DNA
cgcccgctgctccccgctgcgtccagggatggagggccccaccacccatggaattgctggcccctctgcg

SEQ ID NO: 548 - DNA, 59 bp, Homo sapiens
  source 1..59: mol_type = unassigned DNA
cgtccctgagatttcgctgagaaactttcagcgggttagcgcttgggcgctgggcgccg

SEQ ID NO: 549 - DNA, 25 bp, Homo sapiens
  source 1..25: mol_type = unassigned DNA
cgctgggtaacctctatccgagccg

SEQ ID NO: 550 - DNA, 57 bp, Homo sapiens
  source 1..57: mol_type = unassigned DNA
cggcgctgacgctctggccctgggggctgcctggctggtgtcaggtagcggaagacg

SEQ ID NO: 551 - DNA, 111 bp, Homo sapiens
  source 1..111: mol_type = unassigned DNA
cgagcagctccacgtcctgccaaggacggtaggtgcaagggtcgggggactctctgacggggtcgtcccttcgggcacggggaggttcccaccgagccccaaccctgaacg

SEQ ID NO: 552 - DNA, 211 bp, Homo sapiens
  source 1..211: mol_type = unassigned DNA
cgggtcgctgttcctgttgcattatgcaaaggtggctgggaaagcgcgttgacttacatttacatagcccatcttctccccacagtatgtgactaatacgtatcccggggaggagggagcgcggctgggggtgctaatcggaagggaacagacagtgagtgccatcttgctgggaggttccagaagcaaagcgccaacgacgacagtagcg

SEQ ID NO: 553 - DNA, 75 bp, Homo sapiens
  source 1..75: mol_type = unassigned DNA
cgcccccacgcgcgctgtcggtatttgcccgccttgctgcaacttgctgcagtgtttgaaagagtagtaggagcg

SEQ ID NO: 554 - skipped

SEQ ID NO: 555 - DNA, 66 bp, Homo sapiens
  source 1..66: mol_type = unassigned DNA
cgggcgctggagaaggcgcctggcgcgaagctgggcggcgccccgagggcggaggacaggtggccg

SEQ ID NO: 556 - skipped

SEQ ID NO: 557 - DNA, 163 bp, Homo sapiens
  source 1..163: mol_type = unassigned DNA
cggggcggcgggcgcatgcgcgtgcgcggtgcggccccagccctggctgccgccgcctgccgccgccgtcgcgatgcctattttagtcaaagcggctgcgggcttggggacccggcccgggcagcggagcttccggacccgccgacccgccgaggagcgcgcg

SEQ ID NO: 558 - DNA, 99 bp, Homo sapiens
  source 1..99: mol_type = unassigned DNA
cggagcaaagccagcgcgctccgcggctcggaatccagctggctcgctaccctcccactcctgcgattttactcccgaccgcgctccagggcagaagcg

SEQ ID NO: 559 - DNA, 96 bp, Homo sapiens
  source 1..96: mol_type = unassigned DNA
cggcggcggcggcagctccagccgcgcccgccacacataccttcactcgctcggtgcacacgccgcgccgcgggcagtgccgcctgcggaggcgcg

SEQ ID NO: 560 - skipped

SEQ ID NO: 561 - DNA, 16 bp, Homo sapiens
  source 1..16: mol_type = unassigned DNA
cgtgccaatctcgccg

SEQ ID NO: 562 - skipped

SEQ ID NO: 563 - DNA, 141 bp, Homo sapiens
  source 1..141: mol_type = unassigned DNA
cgcccattttgcagtcgagcacacaaggtccgtcgaagccatcgagcaggtcctgcagctgcaggtagctttcgccgtcgcgctccaccacgccgtggaaggcaggcacgcagccgcgcagcgcgtcagccatcagccgcg

SEQ ID NO: 564 - skipped

SEQ ID NO: 565 - DNA, 37 bp, Homo sapiens
  source 1..37: mol_type = unassigned DNA
cgaggtgttgcgggttttgtgcggttggttgggaacg

SEQ ID NO: 566 - DNA, 52 bp, Homo sapiens
  source 1..52: mol_type = unassigned DNA
cgaggcgtccccgctcccgccacccacacagggcgccaagtgccccgacccg

SEQ ID NO: 567-570 - skipped (4 entries)

SEQ ID NO: 571 - DNA, 17 bp, Homo sapiens
  source 1..17: mol_type = unassigned DNA
cgtcccgccccaactcg

SEQ ID NO: 572 - DNA, 136 bp, Homo sapiens
  source 1..136: mol_type = unassigned DNA
cgcggggggaggttcctggctcgccgtctccgctgccgcttgaccgcacttctggagggctccgcaccttgccaggtctctggaggcaaacacacacccccgattcataactggtccccgcgtcaggggactcgcg

SEQ ID NO: 573 - DNA, 31 bp, Homo sapiens
  source 1..31: mol_type = unassigned DNA
cggccagggagtgagcggggcgctgggcgcg

SEQ ID NO: 574 - DNA, 25 bp, Homo sapiens
  source 1..25: mol_type = unassigned DNA
cgccaaccagacctcagggtgcacg

SEQ ID NO: 575 - DNA, 12 bp, Homo sapiens
  source 1..12: mol_type = unassigned DNA
cgctcgtcaacg

SEQ ID NO: 576 - skipped

SEQ ID NO: 577 - DNA, 199 bp, Homo sapiens
  source 1..199: mol_type = unassigned DNA
cgcagcgtgtagccgcggaacagcgcctccagctctgggcaagcgaactcctcgtcgcacgcccggagcccgcgccggcggcttgtcccggccgcccgctcggcgcccccgggctcgcccgcgccgcctccgccgccgcctccgccgcgcggcgcccccgccatctcagcgccatgcagcggccgcggccgcgggcgcg

SEQ ID NO: 578 - DNA, 91 bp, Homo sapiens
  source 1..91: mol_type = unassigned DNA
cgtgggggcgcggcgcgggcgacacgtgcgggccgccaggagggggagggggacgcgcgccgccgggcccgccaccctgcacccggggccg

SEQ ID NO: 579 - DNA, 108 bp, Homo sapiens
  source 1..108: mol_type = unassigned DNA
cgtcctccctatggatctcccagtacctgcaggtcacaggataacagaagctatagtagagtcaccgaggaactccaggaacggaggagatggaacagtggagacgcg

SEQ ID NO: 580 - DNA, 13 bp, Homo sapiens
  source 1..13: mol_type = unassigned DNA
cgaaatcggtgcg

SEQ ID NO: 581 - DNA, 176 bp, Homo sapiens
  source 1..176: mol_type = unassigned DNA
cgggggcggcggggtgacagtccccgtgcatgaatcagccacccctcaggctccgccccggcgggggtcggccggacgctcgccccgcataaagcgggcacccgggccgcctggagcagaaagccgcgcacctcctcccgccaggcgctttctcggacgccttgcccagcgggccg

SEQ ID NO: 582 - skipped

SEQ ID NO: 583 - DNA, 157 bp, Homo sapiens
  source 1..157: mol_type = unassigned DNA
cgggcgctttcccaggcctggccgaggggcgtcgcgcagaggcggcggcggcgcacggaggcggcagacgacgcgctctcggcgcccgcagccccggtcccgcgctcccgcggcccaaagtaactttgggagccgccgtctcccgcggaacttctcg

SEQ ID NO: 584 - DNA, 66 bp, Homo sapiens
  source 1..66: mol_type = unassigned DNA
cggccgcggcgggagggacagggggcctgggtgggaagggagcgcgagggcccctagcggttcgcg

SEQ ID NO: 585 - DNA, 498 bp, Homo sapiens
  source 1..498: mol_type = unassigned DNA
cgtgcgccaggcggaaatgctccagcaggtccccgcgcaccgggccgttcggggggcagtaggggcaggcggcggcgggcaggccgagcgcgccgggcggtggcgcagcggggcacgagtacttcttgtgcgccaggtaggcctcgaggctgtggaagctcacgcggcaggccgtgcactcgtggtagtcggccagcgccggtgccggggctccggggagcgggcgccgcggcttcttgctcaggtcgatggggccgtcggccgcggggccgggcgagcgcgcaggggcgaggccggggccgcttccgcttccgcttccgggccgcggcgactcgggcgcgggggcgtggccgggcggcggggggggcggggcgccggccgcgtgcagctcgtagagcttgcggcgtctgcgcgtgcgcacaggcgcggcgggagagggggccgggggcgcggccggcccagggggtcccgggggcgcggccggtcggcgcggcggcg

SEQ ID NO: 586 - DNA, 27 bp, Homo sapiens
  source 1..27: mol_type = unassigned DNA
cgagcgcgaagggcgttcggacccgcg

SEQ ID NO: 587-588 - skipped (2 entries)

SEQ ID NO: 589 - DNA, 16 bp, Homo sapiens
  source 1..16: mol_type = unassigned DNA
cgcgaggcaggcgacg

SEQ ID NO: 590 - DNA, 53 bp, Homo sapiens
  source 1..53: mol_type = unassigned DNA
cgccgcaagagaagctgtcaagccccgcaggctctgattcggcgccctccgcg

SEQ ID NO: 591-594 - skipped (4 entries)

SEQ ID NO: 595 - DNA, 14 bp, Homo sapiens
  source 1..14: mol_type = unassigned DNA
cgtaggtggacacg

SEQ ID NO: 596 - DNA, 186 bp, Homo sapiens
  source 1..186: mol_type = unassigned DNA
cgttatggagaaaattaatggaggaaaaattacagagtcacccgaaacagttgcgctgcttatcacccggtgtttgagcctgtttcccctgtaattagattacatgtgaggcagccccagctaattgtctgtgccacccaccggggaactccagctctatctgtgaacacccaggccttcccgccg

SEQ ID NO: 597 - DNA, 79 bp, Homo sapiens
  source 1..79: mol_type = unassigned DNA
cgcgtactttctccaccccgacacccactgccactcccacagcggagcgaggggccccgccgagggcgagcgtaccccg

SEQ ID NO: 598 - DNA, 49 bp, Homo sapiens
  source 1..49: mol_type = unassigned DNA
cgcgggggcgtctcccgttgcctgcagggagcgcggcgcggacgcggcg

SEQ ID NO: 599 - DNA, 17 bp, Homo sapiens
  source 1..17: mol_type = unassigned DNA
cgcgaacggttcatccg

SEQ ID NO: 600-602 - skipped (3 entries)

SEQ ID NO: 603 - DNA, 165 bp, Homo sapiens
  source 1..165: mol_type = unassigned DNA
cggggtctggtaggaagtgcagtgtatctcccagctttagggtaactaggacagcatgaatcttttaccttgtggtagaataaacggctagcgcctcgatgtggcgcgctcgacttttcctcacagagcctaaaagtcacgctcaaccaaactgcagcgttcccg

SEQ ID NO: 604 - DNA, 14 bp, Homo sapiens
  source 1..14: mol_type = unassigned DNA
cgctgacccgcgcg

SEQ ID NO: 605-606 - skipped (2 entries)

SEQ ID NO: 607 - DNA, 97 bp, Homo sapiens
  source 1..97: mol_type = unassigned DNA
cgccccgcacgcccgcacgcccagcggggcccgcattgagcatgggcgcggcggccgtgcgctggcacttgtgcgtgctgctggccctgggcacacg

SEQ ID NO: 608 - skipped

SEQ ID NO: 609 - DNA, 98 bp, Homo sapiens
  source 1..98: mol_type = unassigned DNA
cgaggttcagtttctggttttaaggaataaattcgctggcttgaaagggagctacggcagaagtttaggggcagagcggcgggagcgcgcgatccgcg

SEQ ID NO: 610 - DNA, 69 bp, Homo sapiens
  source 1..69: mol_type = unassigned DNA
cgcggaaggcccgcgcgccctgcgccgccgccgctcagtgccgccgccagcacctcctccgcccctccg

SEQ ID NO: 611-614 - skipped (4 entries)

SEQ ID NO: 615 - DNA, 103 bp, Homo sapiens
  source 1..103: mol_type = unassigned DNA
cgcgcccgccgcccccggaggagcgggctggccgaccgccaccgcgccgtcccccggccgcccccgaagccgctccatcgcggtccctgccgtcctggggccg

SEQ ID NO: 616 - skipped

SEQ ID NO: 617 - DNA, 21 bp, Homo sapiens
  source 1..21: mol_type = unassigned DNA
cgccgccgccgccgagagccg

SEQ ID NO: 618 - DNA, 148 bp, Homo sapiens
  source 1..148: mol_type = unassigned DNA
cgcgcgggcgcgaggggttgggacgcgggagcctcttgagtgcggagcgcggagccctggtgtcccggcgcactgcagccacactcccgggccgcgcgctcccgccgcctcttacccgcgccgcagggtcctcccctttgaggcgccg

SEQ ID NO: 619-620 - skipped (2 entries)

SEQ ID NO: 621 - DNA, 26 bp, Homo sapiens
  source 1..26: mol_type = unassigned DNA
cggccatcacgcgctgcctctcggcg

SEQ ID NO: 622 - DNA, 119 bp, Homo sapiens
  source 1..119: mol_type = unassigned DNA
cgctcgatgatgaggatgcacttctcgcaggtgcagtccttgaagcggcagtaacgcttgtggcccttgagccaggacaggacgccatggttgcggcagcgcgcgcacttgggcgtgcg

SEQ ID NO: 623 - DNA, 66 bp, Homo sapiens
  source 1..66: mol_type = unassigned DNA
cgcctcaccttgctgaggccgctttcggcttcctctgacccaggctgggcgggaaaggtcgggccg

SEQ ID NO: 624 - DNA, 60 bp, Homo sapiens
  source 1..60: mol_type = unassigned DNA
cgcggctggggcctcgcgcctcctggagcgccttctgcccagacacgacgacttcgctcg

SEQ ID NO: 625 - skipped

SEQ ID NO: 626 - DNA, 124 bp, Homo sapiens
  source 1..124: mol_type = unassigned DNA
cggcggcaggagaagcccaaggcccgagcggcccgcagcccccacgcctgcacccctccacccccgccagcccgatggttcgctccgcggcgtgcactggagcaagcaggtcccgctccgagcg

SEQ ID NO: 627 - skipped

SEQ ID NO: 628 - DNA, 156 bp, Homo sapiens
  source 1..156: mol_type = unassigned DNA
cgcctcggcctccaccgtcgcgcccttacaggtcaccaggtgccgctcgcccagaatgtcaaccatggcgcagacacgcagccacctgagacccgaggacacctgcaggaggatgatcacctgcggggaggcggcggcgagcgccgcggtgccccg

SEQ ID NO: 629 - skipped

SEQ ID NO: 630 - DNA, 91 bp, Homo sapiens
  source 1..91: mol_type = unassigned DNA
cgcttcaggaatgactcggtgacatcggtcgatgaccttctccacagcctgtcggtgagcggcggcggaggcaaggtttcggcggcgcgcg

SEQ ID NO: 631-632 - skipped (2 entries)

SEQ ID NO: 633 - DNA, 89 bp, Homo sapiens
  source 1..89: mol_type = unassigned DNA
cgccgagctgcaggcgcgcgcctaaccgctttgctgggctcacgcggtctgagaggtcggagcgcccaactgctggcacgcgagtaacg

SEQ ID NO: 634 - DNA, 13 bp, Homo sapiens
  source 1..13: mol_type = unassigned DNA
cggattaaagacg

SEQ ID NO: 635 - skipped

SEQ ID NO: 636 - DNA, 47 bp, Homo sapiens
  source 1..47: mol_type = unassigned DNA
cgcgatgtggcctcgcctggccttttgttgctggggtctggcgctcg

SEQ ID NO: 637-638 - skipped (2 entries)

SEQ ID NO: 639 - DNA, 159 bp, Homo sapiens
  source 1..159: mol_type = unassigned DNA
cgcctcccgccgaggcgcaggggcagctacattgcggggcgcctgggcgacggcgccaaagccagggtcacaagggcacgggacaagcggggcggggggagcaggagactaggacagaggtcggcgcccgccgcgggcgctttcacgccgcgggcatcg

SEQ ID NO: 640-642 - skipped (3 entries)

SEQ ID NO: 643 - DNA, 78 bp, Homo sapiens
  source 1..78: mol_type = unassigned DNA
cggccgcttctccgacgcccgcggctccccactgcgccgaggcgagcgccacggctaaagcccaagcctcggcgcccg

SEQ ID NO: 644 - skipped

SEQ ID NO: 645 - DNA, 48 bp, Homo sapiens
  source 1..48: mol_type = unassigned DNA
cgcgccaactcggtcgctgtgcacggtcgggtgcgaaactcctccgcg

SEQ ID NO: 646-648 - skipped (3 entries)

SEQ ID NO: 649 - DNA, 157 bp, Homo sapiens
  source 1..157: mol_type = unassigned DNA
cgtgttcaactggcatttgccaccaacatgtctgtttttatttaaatggcccagagcaaggctctgactaaactagcattcccacgccaacactcagcagcgcctctggtttttggcagattttttccttagctgtcaaagcaaaactatagaagcg

SEQ ID NO: 650 - skipped

SEQ ID NO: 651 - DNA, 82 bp, Homo sapiens
  source 1..82: mol_type = unassigned DNA
cgcacccgcggggagggcggcgagcggggatcagccgaagtcgggagaggggcgcttccacggggcgggaaactggcgcgcg

SEQ ID NO: 652 - DNA, 23 bp, Homo sapiens
  source 1..23: mol_type = unassigned DNA
cggccaggtgaggcggccaggcg

SEQ ID NO: 653 - DNA, 38 bp, Homo sapiens
  source 1..38: mol_type = unassigned DNA
cgaactcgcaaagctgctcgtagacgcgcgggaactcg

SEQ ID NO: 654 - skipped

SEQ ID NO: 655 - DNA, 165 bp, Homo sapiens
  source 1..165: mol_type = unassigned DNA
cgcgggctgcccagcgtgccagaccctttccccctggacgtgcgcaagctgctggtggccggcaaccgcatccagcggatccccgaggacttcttcatcttctacggcgacctggtctacctggacttcaggaacaactcgctgcgctcgctggaggagggcacg

SEQ ID NO: 656-658 - skipped (3 entries)

SEQ ID NO: 659 - DNA, 23 bp, Homo sapiens
  source 1..23: mol_type = unassigned DNA
cgacaggcggcccccggacaccg

SEQ ID NO: 660 - skipped

SEQ ID NO: 661 - DNA, 66 bp, Homo sapiens
  source 1..66: mol_type = unassigned DNA
cggcgccttcggggctgctgcgcgcccgcgcctagagctgccgccccagggagcccgccacggccg

SEQ ID NO: 662 - DNA, 43 bp, Homo sapiens
  source 1..43: mol_type = unassigned DNA
cgggcgcgcagcccgcccgcgcggcctggactctttttgttcg

SEQ ID NO: 663 - skipped

SEQ ID NO: 664 - DNA, 62 bp, Homo sapiens
  source 1..62: mol_type = unassigned DNA
cgcgctgcacgaggatggccacgaggcgcagctggagccgtcgccgccgccgcatctgggcg

SEQ ID NO: 665 - skipped

SEQ ID NO: 666 - DNA, 138 bp, Homo sapiens
  source 1..138: mol_type = unassigned DNA
cgctctcgggcgcacggaaactacttgtcaggaaattttcaacgctcctcctcgcccacttttttccactcctttcctggcgcgccccctcccctcccagaggcacgcagtggagcttttggagtttcgaatctttcg

SEQ ID NO: 667-670 - skipped (4 entries)

SEQ ID NO: 671 - DNA, 187 bp, Homo sapiens
  source 1..187: mol_type = unassigned DNA
cgagcggtcctaactccgtcccgctcgctgttgctgttgctggtgctgctccggctgcagctgctgccgctccacgacctcggggcgctgaggcaacagggccccctccctctactccccatcccccccggctcctccacagaagcgccgtttccagtaactcctcgtgtacctcccacttctgccg

SEQ ID NO: 672-673 - skipped (2 entries)

SEQ ID NO: 674 - DNA, 110 bp, Homo sapiens
  source 1..110: mol_type = unassigned DNA
cgcaggtcaagatctggttccagaatcatcgctacaagctgaagcgcgctcgcgctccaggggcggcggagtcgcctgacctggcagcatccgccgagctgcacgccgcg

SEQ ID NO: 675 - skipped

SEQ ID NO: 676 - DNA, 189 bp, Homo sapiens
  source 1..189: mol_type = unassigned DNA
cgtgcccccgctcgcgcctgggccccgccgcactccagcagaagccattacagagaacaaactaccttcttgtctccgagatgggtccccggggaggaaggcaaattgcctgcctcgtgcataataagccaggcgtggagagcagcgcggaggaggccgcggcagccaccgagcgggcagagcctcccg

SEQ ID NO: 677 - DNA, 42 bp, Homo sapiens
  source 1..42: mol_type = unassigned DNA
cgcgagtgcactcaagcgccctcgttccacccaccttcagcg

SEQ ID NO: 678 - DNA, 33 bp, Homo sapiens
  source 1..33: mol_type = unassigned DNA
cgtggagcgcaaagtgcctgaagcccccgcgcg

SEQ ID NO: 679 - DNA, 15 bp, Homo sapiens
  source 1..15: mol_type = unassigned DNA
cgttcggctggcgcg

SEQ ID NO: 680 - DNA, 51 bp, Homo sapiens
  source 1..51: mol_type = unassigned DNA
cgcccaccacggcgatctgcggcagctccagcaggcagctctgtcccagcg

SEQ ID NO: 681 - skipped

SEQ ID NO: 682 - DNA, 268 bp, Homo sapiens
  source 1..268: mol_type = unassigned DNA
cgaagatgggaaacggccgcttgctgagagggggcatttgcagtcctcccagaaaaggctggggcaggagagcgtgcggccagaggggtgggggtaccggagggggggtctcacctcctgctctatagccgggtctctcccgcgaggcgctgggaagcatgaggcatgcagcattcaaaatgttttttgaaaaagacggacttgaagcttttttttacaaacacgccattgtactcacttcttattcagagacgggctgcgcgctccg

SEQ ID NO: 683 - skipped

SEQ ID NO: 684 - DNA, 33 bp, Homo sapiens
  source 1..33: mol_type = unassigned DNA
cggtgatcggtctgactgctcctgggggctccg

SEQ ID NO: 685 - DNA, 23 bp, Homo sapiens
  source 1..23: mol_type = unassigned DNA
cgaaagtctcgggctagtgggcg

SEQ ID NO: 686 - DNA, 40 bp, Homo sapiens
  source 1..40: mol_type = unassigned DNA
cgaggcacctggtcgggcggggaggcgtcgggtcggggcg

SEQ ID NO: 687 - DNA, 10 bp, Homo sapiens
  source 1..10: mol_type = unassigned DNA
cggagccgcg

SEQ ID NO: 688 - DNA, 181 bp, Homo sapiens
  source 1..181: mol_type = unassigned DNA
cgaaaacgaaatccacccccttgcgcccatttctgccagaggtttgcaggacgtgtctcaacctggcatcccgagtccagaacaaaagccacgggggctgcggcatgggcagggggaaggcgcgcggtggctgacgcggggcaggggccctggcgagcgcgggaggggcggtcagcagccg

SEQ ID NO: 689 - DNA, 195 bp, Homo sapiens
  source 1..195: mol_type = unassigned DNA
cgtcaagcagcaggactacagcgccagcgtctggcttcggaggaaagacaagctggagcacgtaagggcgactcgctcccgggggcctcggccaggcacctgccgcatgcaccctccccgtggtggtggcatgagcgcgcgcggggcgcggggggcaggcgaggggatcctggcaggcgccgacgtcctaggtcg

SEQ ID NO: 690 - skipped

SEQ ID NO: 691 - DNA, 358 bp, Homo sapiens
  source 1..358: mol_type = unassigned DNA
cgcgagctcgggtgagagccaccggaatgcgggaacgcagcttagccgggaacagggttcccgacaggggtcgcccgtggccaggacgcggccgctgaacagaggtcgcgcggcggttcctgcccgagggacctcgtgggcgggggccacacggaggccgcgcacggtccccggggctggcgggggcaggtgggaggacctcctccgggcccgcgaacctgatctggcagcggccaggtgcctggaagcgtttttaaatgatagggttacaaagacatgttggccaggtttgtagttagcgcagcaacgtggtttgcaggagcgcagaacgaggctagacagggtcactcggacgccg

SEQ ID NO: 692 - DNA, 13 bp, Homo sapiens
  source 1..13: mol_type = unassigned DNA
cgccacaactgcg

SEQ ID NO: 693-694 - skipped (2 entries)

SEQ ID NO: 695 - DNA, 95 bp, Homo sapiens
  source 1..95: mol_type = unassigned DNA
cgggcactcgggacgaggcgagggcgcagaaaacttggagcccaatcagcacggagttgagcttccgcgccccaaccttcaggtgaccccgcgcg

SEQ ID NO: 696 - DNA, 45 bp, Homo sapiens
  source 1..45: mol_type = unassigned DNA
cgccgagagggcaggacgcgcacggtgcgctccaacctgctgccg

SEQ ID NO: 697 - DNA, 104 bp, Homo sapiens
  source 1..104: mol_type = unassigned DNA
cgcgagccagggggaggcgcgtcggaaagcgagagtgacaagcagcctacaagccgaaaagttcctcgcgggaggcgcgcgccgcgtgggctccgactcagccg

SEQ ID NO: 698 - DNA, 87 bp, Homo sapiens
  source 1..87: mol_type = unassigned DNA
cgggagggtggcggaaggtggtgcaccgcagcgtggtccccgccgctgccgccgcggctttgcaaagtgtcagcgggggcgaaagcg

SEQ ID NO: 699 - DNA, 62 bp, Homo sapiens
  source 1..62: mol_type = unassigned DNA
cgacactgaacaacaaccgcggggaggagaggccacttgcagccgaggctcgcaaactgtcg

SEQ ID NO: 700-707 - skipped (8 entries)

SEQ ID NO: 708 - DNA, 145 bp, Homo sapiens
  source 1..145: mol_type = unassigned DNA
cgggaatcgcaggagaggattggggctccaggtggacggtgctgactgcactggctttgaagactggaagtgggtgcaggaggaacctgcgacagctgagaccagggcgcgcgggcagatgcgccaggtcgccagcaaaccggcg

SEQ ID NO: 709 - skipped

SEQ ID NO: 710 - DNA, 19 bp, Homo sapiens
  source 1..19: mol_type = unassigned DNA
cggctcctggcggtgggcg

SEQ ID NO: 711 - DNA, 35 bp, Homo sapiens
  source 1..35: mol_type = unassigned DNA
cggaggctccgctaatggggccgccgccgccgccg

SEQ ID NO: 712-713 - skipped (2 entries)

SEQ ID NO: 714 - DNA, 36 bp, Homo sapiens
  source 1..36: mol_type = unassigned DNA
cggctctcctgcagccagcggaccagcgccagctcg

SEQ ID NO: 715 - skipped

SEQ ID NO: 716 - DNA, 42 bp, Homo sapiens
  source 1..42: mol_type = unassigned DNA
cgtacaatggcaaatgggattaggcaggcgaaggctcagccg

SEQ ID NO: 717-718 - skipped (2 entries)

SEQ ID NO: 719 - DNA, 18 bp, Homo sapiens
  source 1..18: mol_type = unassigned DNA
cggcgcgggcgctgcgcg

SEQ ID NO: 720-722 - skipped (3 entries)

SEQ ID NO: 723 - DNA, 118 bp, Homo sapiens
  source 1..118: mol_type = unassigned DNA
cgcgtcgctgttctgcctcaggccccggtgcggccccaagtcccagcccagggcccttaggtccctccaggcggcggtggcggcactcacctgggtcgcggagccggggtctggcacg

SEQ ID NO: 724 - DNA, 22 bp, Homo sapiens
  source 1..22: mol_type = unassigned DNA
cgtccgcgccgcccgcggttcg

SEQ ID NO: 725-728 - skipped (4 entries)

SEQ ID NO: 729 - DNA, 31 bp, Homo sapiens
  source 1..31: mol_type = unassigned DNA
cgtaacacatctcagcaccgagctcttgtcg

SEQ ID NO: 730-738 - skipped (9 entries)

SEQ ID NO: 739 - DNA, 69 bp, Homo sapiens
  source 1..69: mol_type = unassigned DNA
cgccccccggcccgccctccccgagcgccgccgacacgccagccaaacggccgctggccgcccctagcg

SEQ ID NO: 740 - DNA, 415 bp, Homo sapiens
  source 1..415: mol_type = unassigned DNA
cgcacgggttgggcttgggaatggggaccgcgaggcttcagcatcccgatgccctgaaagtctccccgcctcggggatttgtctctgtgttgcagctggcaggggccgcctgaagtgggagcagcgcctggagaaggcgggaggagcccggcccgggggacgggcggcgggatagcgggaccccggcggcgcggtgcgcttcagggcgcagcggcggccgcagaccgagccccgggcgcggcaagaggcggcgggagccggtggcggctcggcatcatgcgtcgagggcgtctgctggagatcgccctgggatttaccgtgcttttagcgtcctacacgagccatggggcggacgccaatttggaggctgggaacgtgaaggaaaccagagccagtcgggccaagagaagaggcg

SEQ ID NO: 741-745 - skipped (5 entries)

SEQ ID NO: 746 - DNA, 62 bp, Homo sapiens
  source 1..62: mol_type = unassigned DNA
cgtgcgcatttcaagcgcgtgcgggagtgtgcgaggcgctgtgcgagctagcggcgggcgcg

SEQ ID NO: 747-750 - skipped (4 entries)

SEQ ID NO: 751 - DNA, 20 bp, Homo sapiens
  source 1..20: mol_type = unassigned DNA
cggaggcttttgcgtttgcg

SEQ ID NO: 752 - DNA, 69 bp, Homo sapiens
  source 1..69: mol_type = unassigned DNA
cgctgcgcttcctcgcttgctggcgtctttgccttagcgggactcggcagccaggggccccagggggcg

SEQ ID NO: 753 - skipped

SEQ ID NO: 754 - DNA, 318 bp, Homo sapiens
  source 1..318: mol_type = unassigned DNA
cgagacgcggcagactcccagagcggctcacccactcatcgaagcggattctgggcggtttcgggctgacccgcgctgtcagggcgcggactccattccgggcgcattgttaggagaaggggcccctcggggcggcgcgcctcgaccctgggctcccggtgcccgcagagggcggagatccgcggcgccctaggccacctatccgcatcttctcgagccaaacccccagcgcttacccggacccgacggcccaagcactgactcccaggcaagagtcgcccttcctggtccccagggaactgacactaccgcgggacg

SEQ ID NO: 755 - DNA, 27 bp, Homo sapiens
  source 1..27: mol_type = unassigned DNA
cgcgcctccgctcggggagccaccacg

SEQ ID NO: 756 - skipped

SEQ ID NO: 757 - DNA, 13 bp, Homo sapiens
  source 1..13: mol_type = unassigned DNA
cgcggggagctcg

SEQ ID NO: 758 - DNA, 189 bp, Homo sapiens
  source 1..189: mol_type = unassigned DNA
cgcaatctccagccaaagtcaccgcgggcggactatggcttagggcgccagaggggttagaggtacgggaagaggaaaagacggctaactgggaaaaaaagagaaaacgaaagaaaagccaaacgatgagtttccacaaggaggacggagtgaacagtctgtgccagaaggctctgcacatcgtcaccg

SEQ ID NO: 759-760 - skipped (2 entries)

SEQ ID NO: 761 - DNA, 13 bp, Homo sapiens
  source 1..13: mol_type = unassigned DNA
cgctcagcccccg

SEQ ID NO: 762 - DNA, 51 bp, Homo sapiens
  source 1..51: mol_type = unassigned DNA
cgaaggcgaggccgcccagcccgcaccccaccccacgcacggcacacgccg

SEQ ID NO: 763 - DNA, 289 bp, Homo sapiens
  source 1..289: mol_type = unassigned DNA
cggcagtgtccttttaagaaggggcaaaaaaatctgtttatggccaccctccttccgctttaccttttctcctcttgacagtttcggccctggctgcccgagtcgggggtgtgttttcggtccctctcagatctgggcggggggcgggaggagtgagcgacctgggaagtcccgggggtggagagggggcgctccggggtctgggggcgacgtggacaccttctttggagcacggcggtgcgtttgggatttgaaggaagggccgaaggaagcggggtgcgggcgggcg

SEQ ID NO: 764 - skipped

SEQ ID NO: 765 - DNA, 165 bp, Homo sapiens
  source 1..165: mol_type = unassigned DNA
cgctctgggaagcgcagaggcgggggtgctgctcgcgctggggagcacgtgaggggacactcagggactgcccgcgcgaatggcttccaacgcatgcgccccaccccacatttcacagtcgccatgacgaccgggaggtccgcaacggctgcggggacaagtccg

SEQ ID NO: 766 - DNA, 21 bp, Homo sapiens
  source 1..21: mol_type = unassigned DNA
cgaagtggtgcaggggcggcg

SEQ ID NO: 767-769 - skipped (3 entries)

SEQ ID NO: 770 - DNA, 159 bp, Homo sapiens
  source 1..159: mol_type = unassigned DNA
cgtgctcgtggatgcgcagcgccacgcggctgtccaccatccagcgatacacgcggcccacggagaaggtgaggccgcagcgggccgacttgccgcggcccaggcggtcgccgccggcgctgctcatgttgtagagggacagtgcggccagcgcagccg

SEQ ID NO: 771 - skipped

SEQ ID NO: 772 - DNA, 129 bp, Homo sapiens
  source 1..129: mol_type = unassigned DNA
cgtgcgcccgagtggggcacttgcccgaggtcggggactgtgaaccgaaagattccatctagccctgctgtcctcctggtattgcgatttgggggcgggtcactttacctctctgaattccgccccccg

SEQ ID NO: 773 - skipped

SEQ ID NO: 774 - DNA, 120 bp, Homo sapiens
  source 1..120: mol_type = unassigned DNA
cgccttctccttctttttttttttttttttttttttttttttttttttttttttttggtaccatagagttgctctgaaaacagaagatagagggagtctcggagctcgccatctccagcg

SEQ ID NO: 775 - skipped

SEQ ID NO: 776 - DNA, 171 bp, Homo sapiens
  source 1..171: mol_type = unassigned DNA
cgctcggctgctgcacctgttagtgctgggcccaggttgagaggcgacctccagcccccacaataatgtcccgggctctctggtttgggtcctcgcagcgcccgattgaccgccagcgatacgacgagaacgaggacttgtcggacgtggaggagatcgtcagcgtccgcg

SEQ ID NO: 777-779 - skipped (3 entries)

SEQ ID NO: 780 - DNA, 64 bp, Homo sapiens
  source 1..64: mol_type = unassigned DNA
cggggaaagctgggcgcgcgagccgaggctgctgctcacctgcagccgcgccgctcacctgccg

SEQ ID NO: 781-784 - skipped (4 entries)

SEQ ID NO: 785 - DNA, 16 bp, Homo sapiens
  source 1..16: mol_type = unassigned DNA
cgagccctgcggagcg

SEQ ID NO: 786-788 - skipped (3 entries)

SEQ ID NO: 789 - DNA, 18 bp, Homo sapiens
  source 1..18: mol_type = unassigned DNA
cgcggccgagggaatgcg

SEQ ID NO: 790 - DNA, 118 bp, Homo sapiens
  source 1..118: mol_type = unassigned DNA
cgcgcctctgttcctgggtagactcccccatctgtgcattttggccccttcacttagcaaagagatgtgcgaagtgtgcgcctggagacgagccgcctcggtgacccccatccgcccg

SEQ ID NO: 791-795 - skipped (5 entries)

SEQ ID NO: 796 - DNA, 22 bp, Homo sapiens
  source 1..22: mol_type = unassigned DNA
cggactcctctggggcggcgcg

SEQ ID NO: 797 - DNA, 112 bp, Homo sapiens
  source 1..112: mol_type = unassigned DNA
cgaggcagggaggcgctcccgcagctcctgactttacaacccgcgcgcgtgtgcaccgagccgcgggcacaccgcgaacacacacacacacacacacactcgtgcgctcccg

SEQ ID NO: 798 - DNA, 109 bp, Homo sapiens
  source 1..109: mol_type = unassigned DNA
cgtggaggagtggggccaggtggtcatcatcagcatgctcacccgctacgcccgcacgcagttcctgagccccacccagaacgtaagtgggcccagcccaggcagagcg

SEQ ID NO: 799-801 - skipped (3 entries)

SEQ ID NO: 802 - DNA, 431 bp, Homo sapiens
  source 1..431: mol_type = unassigned DNA
cgtgtcctttcataggtctcatttgtaattgagacgaatgattacagtggggcgggaaggagcagctgctcattaattaatttctaattaaaagtgcctctcgttctcgggtgactaaagagaaacaccgttcgctgggcgatattgactcggatggaatttatttgctaacgcccggaggaatggcccctccgtccaccgcgcggccgggactgtcctggcccctcccggcctgagccgccggcgagtgaccggcgagtctgcggccaggccgggctgcgcgaggtggggctgacgtcagagcctcctccgcttcaagccgcgcacatctgacttgacgggttcgcgcgactcgtttttttttttttctttttcgtaaaatatgtatttctgtcgccgctgcgaggccgctcggtcccagagccccctcg

SEQ ID NO: 803 - skipped

SEQ ID NO: 804 - DNA, 40 bp, Homo sapiens
  source 1..40: mol_type = unassigned DNA
cgtccccatctctccagcggagctacagcggggcgcggcg

SEQ ID NO: 805 - skipped

SEQ ID NO: 806 - DNA, 22 bp, Homo sapiens
  source 1..22: mol_type = unassigned DNA
cgtggccctgaacctgctggcg

SEQ ID NO: 807 - skipped

SEQ ID NO: 808 - DNA, 47 bp, Homo sapiens
  source 1..47: mol_type = unassigned DNA
cgagctggagaaccacagcatgtactgcgtgcaatgcaagatgcccg

SEQ ID NO: 809 - DNA, 24 bp, Homo sapiens
  source 1..24: mol_type = unassigned DNA
cgtgccagaagtcccccaacggcg

SEQ ID NO: 810 - skipped

SEQ ID NO: 811 - DNA, 45 bp, Homo sapiens
  source 1..45: mol_type = unassigned DNA
cgagggcctcagccaattagcttgctgggtgggcctggagtcccg

SEQ ID NO: 812 - skipped

SEQ ID NO: 813 - DNA, 258 bp, Homo sapiens
  source 1..258: mol_type = unassigned DNA
cgcgcacttgtccaggcgctgcggctcagcgcgccccaacctccagctcgggcggagagcgggggcgggactgaagcaccgtgttcctcaaagtatcctctcgccgtcggcagccctggcctcgcaaatgctccagcgcgctcaggcgcacgcagagactggcgcggcagcctccgggccaacggcacgcgagcaaagctggttggcgacctgggacacgcagtagaagttgaggctgcaccgactcccgccgcttcg

SEQ ID NO: 814 - DNA, 45 bp, Homo sapiens
  source 1..45: mol_type = unassigned DNA
cgcgaccgcaagcccgagcccaggtccctcggagccgccagggcg

SEQ ID NO: 815-816 - skipped (2 entries)

SEQ ID NO: 817 - DNA, 67 bp, Homo sapiens
  source 1..67: mol_type = unassigned DNA
cgaggccgccccgctggttggtgcaagaaccagcctgcaacccaagtcctgagctgttggcgccccg

SEQ ID NO: 818 - DNA, 43 bp, Homo sapiens
  source 1..43: mol_type = unassigned DNA
cgctcgagtcctcgctgctgccgctgccgctgcgggtcagccg

SEQ ID NO: 819-820 - skipped (2 entries)

SEQ ID NO: 821 - DNA, 113 bp, Homo sapiens
  source 1..113: mol_type = unassigned DNA
cgcccgagattcgggagagattaggggcccgcaaagcagaagagcagattcagaaagaaaaaaaaaaaagcgagaagtgcgagaaaaatatactgaattcagctaaacacacg

SEQ ID NO: 822-823 - skipped (2 entries)

SEQ ID NO: 824 - DNA, 84 bp, Homo sapiens
  source 1..84: mol_type = unassigned DNA
cgggctctggggcgctggtgtccgcgcagccccagtcgcttccgcagccaccgccgctcggctccgcggaggcggcgcgcagcg

SEQ ID NO: 825 - skipped

SEQ ID NO: 826 - DNA, 48 bp, Homo sapiens
  source 1..48: mol_type = unassigned DNA
cgcaggtcaagatctggttccagaaccaccgctacaagatgaagcgcg

SEQ ID NO: 827 - DNA, 228 bp, Homo sapiens
  source 1..228: mol_type = unassigned DNA
cgccgccaccacgccgcgcgccgtactccgcgtcaagaatggggcggccaagctgcccaagccgcccgccgccgccgccgccgccgcggccgaggcgcccggcgccggcgcgggcatggagcgctcgcagagccgcctcagtctgtccgcctccttcgaggcgctcgccatctacttcccgtgcatgaactccttcgacgacgaggacgcaggtaagcgcgcggcccg

SEQ ID NO: 828 - DNA, 47 bp, Homo sapiens
  source 1..47: mol_type = unassigned DNA
cgctggtgcgtggcggcgtggagcgcgcttgttacggccaaggtgcg

SEQ ID NO: 829 - DNA, 185 bp, Homo sapiens
  source 1..185: mol_type = unassigned DNA
cgccgcccctcggtccagagcccccacccccggcctgtgagcctgcggcgctggtggagcccggctccaggaagaggagctcacccggtcccccctgattggacagcagcgaggtcccaccgggcgcctccgcggcttaaaaccgaagcgggggcgagggggaggtagagcccgccccctgcgcg

SEQ ID NO: 830 - DNA, 216 bp, Homo sapiens
  source 1..216: mol_type = unassigned DNA
cggcgttccactcactggcgcccacggcccgcaggcaaagcgtggaaggagctgaacgcggcggagaagcggcccttcgtggaggaagccgaacggctgcgcgtgcagcacttgcgcgaccaccccaactacaagtaccggccgcgccgcaagaagcaggcgcgcaaggcccggcggctggagcccggcctcctgctcccgggattagcgcccccg

SEQ ID NO: 831 - DNA, 344 bp, Homo sapiens
  source 1..344: mol_type = unassigned DNA
cgaataatagaaattgttaattttaacaatccagagcaggccaacgaggctttgctctcccgacccgaactaaaggtccctcgctccgtgcgctgctacgagcggtgtctcctggggctccaatgcagcgagctgtgcccgaggggttcggaaggcgcaagctgggcagcgacatggggaacgcggagcgggctccggggtctcggagctttgggccagtacccacgctgctgctgctcgccgcggcgctactggccgtgtcggacgcactcgggcgcccctccgaggaggacgaggagctagtggtgccggagctggagcgcgccccgggacacgggaccacg

SEQ ID NO: 832 - DNA, 28 bp, Homo sapiens
  source 1..28: mol_type = unassigned DNA
cgtctcggcctggctgccaaacagaacg

SEQ ID NO: 833 - DNA, 124 bp, Homo sapiens
  source 1..124: mol_type = unassigned DNA
cggcgcgcacggccaaggcacgcgcgctggcacacgcgggcgcggacacgcgcggacacacacgtgcgggacacgccctcccccgacggcggcgctaacctctcggtaagtccagcgccccacg

SEQ ID NO: 834 - DNA, 80 bp, Homo sapiens
  source 1..80: mol_type = unassigned DNA
cgaggtgcaggcggcgcgggcgctcaccgtgagcgccgtgctgctggcgttcgttgcgctcttcgtgaccctggcgggcg

SEQ ID NO: 835 - DNA, 62 bp, Homo sapiens
  source 1..62: mol_type = unassigned DNA
cgaggcgtggaggggcagccgcggcggggcgacccttacctgctcactgcggggcctgtccg

SEQ ID NO: 836 - DNA, 165 bp, Homo sapiens
  source 1..165: mol_type = unassigned DNA
cgccacctgaccccgccaccaagcctaaggtgtcctggatccacggcaagcacagcgccgctgcagctggccgtgcgccctcaccaccgccgccaggctccgaggccgcgcccagccccagcaagaggaaacggacgcccagcgacaaatcggcgcatacggtcg

SEQ ID NO: 837 - DNA, 43 bp, Homo sapiens
  source 1..43: mol_type = unassigned DNA
cgcgctccgaggaagcgccggaaccaccagaagcacagggacg

SEQ ID NO: 838 - DNA, 86 bp, Homo sapiens
  source 1..86: mol_type = unassigned DNA
cgccacctccaaccagctgcaagccgagctgcccacctgggaccgggccggcccggcgggcttggctcccggcgaaggcggcggcg

SEQ ID NO: 839 - DNA, 23 bp, Homo sapiens
  source 1..23: mol_type = unassigned DNA
cgcccccttatcccacgggctcg

SEQ ID NO: 840 - skipped

SEQ ID NO: 841 - DNA, 99 bp, Homo sapiens
  source 1..99: mol_type = unassigned DNA
cggcaggagcagctcacagccaggagcgctctcccgcccccaacgccgcgctcccccctccaaaacggtttaaaaaaatccaccaattgcatggccgcg

SEQ ID NO: 842 - DNA, 73 bp, Homo sapiens
  source 1..73: mol_type = unassigned DNA
cgaccatttctgtgcttctaggagcccaccctgggcggcagggaggcgttgcgtggggctcacgagttccacg

SEQ ID NO: 843 - skipped

SEQ ID NO: 844 - DNA, 52 bp, Homo sapiens
  source 1..52: mol_type = unassigned DNA
cgctcccaggacccccgcccgctctctcctgactcggtccctgcccgccccg

SEQ ID NO: 845 - DNA, 50 bp, Homo sapiens
  source 1..50: mol_type = unassigned DNA
cgcagccgccgcgtccgcacctgaccatggagtgcgccctcctgctcgcg

SEQ ID NO: 846 - DNA, 50 bp, Homo sapiens
  source 1..50: mol_type = unassigned DNA
cgaacgcagagtccacacgtggattcccgcgcctgtgatgccccgacccg

SEQ ID NO: 847-848 - skipped (2 entries)

SEQ ID NO: 849 - DNA, 52 bp, Homo sapiens
  source 1..52: mol_type = unassigned DNA
cgcctggggcccacgcgagccgcgagcccctgcctgctcctgcgctaccccg

SEQ ID NO: 850-852 - skipped (3 entries)

SEQ ID NO: 853 - DNA, 138 bp, Homo sapiens
  source 1..138: mol_type = unassigned DNA
cgcggcgcctctagctgcccctcactcgtctcgcccgccagtctccctcccgcgcgatggcctcggcgctgagctatgtctccaagttcaagtccttcgtgatcttgttcgtcaccccgctcctgctgctgccactcg

SEQ ID NO: 854-856 - skipped (3 entries)

SEQ ID NO: 857 - DNA, 1017 bp, synthetic construct
  misc_feature 1..1017: note = Description of Artificial Sequence: Synthetic polynucleotide
  source 1..1017: mol_type = other DNA
yggygatttyggttttygtaaggtggggyggygagtaggagtyggggttaggttaggggttygagttttygttygaggggyggggaaggygggtgaygtgagtygggtygggygggyggagttgggatyggtttygggaggygggggygagygygyggagaggtagaygygaggagggaggyggttgagtagygygggyggttttgyggygggygyggtgggygygggyggyggggtttygggattttygygygtttttttygygyggygtygtygtygygygtttttaygtttygygttttayggygttttygtttygygygtttttygtgttygttttttgttagttttygggtygyggtygtttgtagagygagygtttagayggagttttygggtaatttgagtggygtygatyggyggyggagtttttggtagagtttttygattyggtagygyggaggggattygygttygttygygtygygttattttaaattttaagtagygtygttttatyggygyggagtttyggttggaggtaagagtygygygtygggagataygtatygtgagyggtagygtygtyggttttttttttygtygtttyggagggygaagtygyggttttttagttttttgttgygtygygatagygtyggaataygtttygtttygttgtygttttygttgtgtygtyggyggagggggtygygagtttygygtttyggtyggaggatgtgygttttygygggtygtttagtttgagttatgygttttaayggyggyggygygtyggtyggtatggagtttygygyggtygygttttgattygttgtgygtttygyggtyggygggyggygggaggyggyggatygagagtyggagatyggygtygygggayggaagygagygggygygggygtygygtagatggtttgggygagttaggtttgaggtttygtttttygaaaygtgattatgtggatttaatagtttttaggatttaggtgagyg

SEQ ID NO: 858 - DNA, 166 bp, synthetic construct
  misc_feature 1..166: note = Description of Artificial Sequence: Synthetic polynucleotide
  source 1..166: mol_type = other DNA
ygttyggagygygggyggggttagtttgggtagtygygggtygttgttgygtyggaagttttygtygttagggagttttttgggygttaggttttgggtttttgggygaagtygaygttagaatatgtttggtttygtatttagtttatygtatttttagygygyg

SEQ ID NO: 859-864 - skipped (6 entries)

SEQ ID NO: 865 - DNA, 14 bp, synthetic construct
  misc_feature 1..14: note = Description of Artificial Sequence: Synthetic oligonucleotide
  source 1..14: mol_type = other DNA
ygygttttagygyg

SEQ ID NO: 866-868 - skipped (3 entries)

SEQ ID NO: 869 - DNA, 125 bp, synthetic construct
  misc_feature 1..125: note = Description of Artificial Sequence: Synthetic polynucleotide
  source 1..125: mol_type = other DNA
yggttttatttatttgtttygaagagtggttttagttttgygtttttttttgygattttatatatagggatagttttaggtatagttttagtagtaggagtatggyggggygagggygygggayg

SEQ ID NO: 870 - skipped

SEQ ID NO: 871 - DNA, 131 bp, synthetic construct
  misc_feature 1..131: note = Description of Artificial Sequence: Synthetic polynucleotide
  source 1..131: mol_type = other DNA
yggggtgtgaagtggyggygggtagaggggttygtaggggttgggattygygtgtttttttttgtttyggtgyggagtaygatgtgttygggygggggygaggaygttygggaggggttgggttgygtayg

SEQ ID NO: 872 - DNA, 94 bp, synthetic construct
  misc_feature 1..94: note = Description of Artificial Sequence: Synthetic oligonucleotide
  source 1..94: mol_type = other DNA
ygggtttgttttyggtttygttyggagggtgtgygggttttygtttygttggtttygtttgtttattayggygygtttaaatttaygyggttyg

SEQ ID NO: 873-874 - skipped (2 entries)

SEQ ID NO: 875 - DNA, 27 bp, synthetic construct
  misc_feature 1..27: note = Description of Artificial Sequence: Synthetic oligonucleotide
  source 1..27: mol_type = other DNA
ygygatggggaggggaatatttgygyg

SEQ ID NO: 876 - DNA, 164 bp, synthetic construct
  misc_feature 1..164: note = Description of Artificial Sequence: Synthetic polynucleotide
  source 1..164: mol_type = other DNA
ygagattagaggggaaattygaaaaagtaagtttttgyggtagtagttaggaaatattygttaggaattggttgygattttaattttagyggttygaagttttagtttttttatttttatygyggtagagtygttttygtagatatttttygaggagaatygyg

SEQ ID NO: 877-878 - skipped (2 entries)

SEQ ID NO: 879 - DNA, 68 bp, synthetic construct
  misc_feature 1..68: note = Description of Artificial Sequence: Synthetic oligonucleotide
  source 1..68: mol_type = other DNA
ygttgggttygtygaggtyggggtttttttatgggagggaggtggttgyggyggaatttttagatgyg

SEQ ID NO: 880 - DNA, 508 bp, synthetic construct
  misc_feature 1..508: note = Description of Artificial Sequence: Synthetic polynucleotide
  source 1..508: mol_type = other DNA
yggyggtagygggagttygagygttgygygtttattatggtygtttagggagagttyggttatttggyggygtagtyggatttyggttttaatagygagygtagtatygattttttagtgttyggtttygaggaygatttggtygtyggggygattttgtatagttyggagtggagygaggagygttttygygtggataggaagaaatttgaggttatgttataaggtaggtatttttygtgttttyggatttttygattgagtttttaattttttttyggatatttttatygygygtttyggygttygttattttagtttayggtyggtyggtttagttttaggttygttttttygyggagtyggaggatatttagggattggagatttygygggattttttatttttttaygttttttagatttttaggygttgggggttttgtgygaatttgattggttttagaaaagtygaaggtygagtttgtattggygygtttaagttgyg

SEQ ID NO: 881-890 - skipped (10 entries)

SEQ ID NO: 891 - DNA, 396 bp, synthetic construct
  misc_feature 1..396: note = Description of Artificial Sequence: Synthetic polynucleotide
  source 1..396: mol_type = other DNA
tgaggaygaggaggaagaggaggaggaagaagaagaagaggaagaggaggaggaggaggaggaggaygygtttaggttgagatggttygygtggatattgttatttattttaagattgttgttttygtygtygtygtygtygtygttgttgtygtygtygtygtygttattatttgttatagttagtaaygggtagtyggygtaggggttygggggagtttttttygtygttagygttattttaaatatttattaatagttatattgttgttattgttgtygtygtygtygtygtygtggagygygggaggggggyggggaggygtttgggttyggggygttgtgygygatttggyggggtgygtygagatatatatagygagtygtygtygttyg

SEQ ID NO: 892 - skipped

SEQ ID NO: 893 - DNA, 70 bp, synthetic construct
  misc_feature 1..70: note = Description of Artificial Sequence: Synthetic oligonucleotide
  source 1..70: mol_type = other DNA
ygggtygttatttgtttatttgttttatttaggatatttttttaaataatttttaagtggaaaaattayg

SEQ ID NO: 894 - skipped

SEQ ID NO: 895 - DNA, 68 bp, synthetic construct
  misc_feature 1..68: note = Description of Artificial Sequence: Synthetic oligonucleotide
  source 1..68: mol_type = other DNA
ygygggggaygyggggygyggygygttgagygygggtgtygaggttggagggygyggtygggttttyg

SEQ ID NO: 896 - DNA, 88 bp, synthetic construct
  misc_feature 1..88: note = Description of Artificial Sequence: Synthetic oligonucleotide
  source 1..88: mol_type = other DNA
ygagggtyggttygtttttggggattygyggatgtygygagggggygtygygttattgaaggttgggaygggggyggtgygyggggyg

SEQ ID NO: 897-898 - skipped (2 entries)

SEQ ID NO: 899 - DNA, 87 bp, synthetic construct
  misc_feature 1..87: note = Description of Artificial Sequence: Synthetic oligonucleotide
  source 1..87: mol_type = other DNA
ygagttgtttygtttttttattttgggggygaagaagggtyggggagtgggggaaagygggaggygtygyggtttgggaggttttyg

SEQ ID NO: 900 - DNA, 45 bp, synthetic construct
  misc_feature 1..45: note = Description of Artificial Sequence: Synthetic oligonucleotide
  source 1..45: mol_type = other DNA
ygagtttttgygttgtttttgtygtyggagttygggtttgttayg

SEQ ID NO: 901 - skipped

SEQ ID NO: 902 - DNA, 173 bp, synthetic construct
  misc_feature 1..173: note = Description of Artificial Sequence: Synthetic polynucleotide
  source 1..173: mol_type = other DNA
yggttggaatttttttaagtattgttttgagtttatttttaaatgaaagggggaaaaatttaaattagattagaatttgaaatagttgaaatagttatygatttttagtttgtttttaagtttggtagagattgtgaaagttttaattttttygygatgttagttayggttyg

SEQ ID NO: 903 - skipped

SEQ ID NO: 904 - DNA, 48 bp, synthetic construct
  misc_feature 1..48: note = Description of Artificial Sequence: Synthetic oligonucleotide
  source 1..48: mol_type = other DNA
ygaagaygagaygtagagttttaattgtagttagagataaaggtttyg

SEQ ID NO: 905-906 - skipped (2 entries)

SEQ ID NO: 907 - DNA, 36 bp, synthetic construct
  misc_feature 1..36: note = Description of Artificial Sequence: Synthetic oligonucleotide
  source 1..36: mol_type = other DNA
ygatygtggygttagtttttygttttttttgtttyg

SEQ ID NO: 908-912 - skipped (5 entries)

SEQ ID NO: 913 - DNA, 97 bp, synthetic construct
  misc_feature 1..97: note = Description of Artificial Sequence: Synthetic oligonucleotide
  source 1..97: mol_type = other DNA
ygtttgtaaggaygggagtyggggagggtgtagggygagtttaaaggaygggtagagtaagtttygggaagaggtaggggttttttttttygggtyg

SEQ ID NO: 914-915 - skipped (2 entries)

SEQ ID NO: 916 - DNA, 67 bp, synthetic construct
  misc_feature 1..67: note = Description of Artificial Sequence: Synthetic oligonucleotide
  source 1..67: mol_type = other DNA
ygttagatttttatagttttttataygttatttttattgttttagggaattataagtataggtatyg

SEQ ID NO: 917 - skipped

SEQ ID NO: 918 - DNA, 29 bp, synthetic construct
  misc_feature 1..29: note = Description of Artificial Sequence: Synthetic oligonucleotide
  source 1..29: mol_type = other DNA
ygatagggtagagggttagtagttattyg

SEQ ID NO: 919 - DNA, 49 bp, synthetic construct
  misc_feature 1..49: note = Description of Artificial Sequence: Synthetic oligonucleotide
  source 1..49: mol_type = other DNA
yggtygagtttaagtggttgaagygyggaygaggatgygyggggtttyg

SEQ ID NO: 920 - DNA, 188 bp, synthetic construct
  misc_feature 1..188: note = Description of Artificial Sequence: Synthetic polynucleotide
  source 1..188: mol_type = other DNA
ygggagttygaagtygtttygagygggggtgggyggtgagyggattttygggtgttgattaggtgtttggtggtagagtagggaaggggggaayggaygtygattttagggattttttattygtttaygttttttggygttggttataygtygtygttttagtattaattggaggtttttagtggayg

SEQ ID NO: 921-922 - skipped (2 entries)

SEQ ID NO: 923 - DNA, 113 bp, synthetic construct
  misc_feature 1..113: note = Description of Artificial Sequence: Synthetic polynucleotide
  source 1..113: mol_type = other DNA
yggtygtgggyggttgyggygyggtygyggygaggggygagyggggttggtttygtygttygggygagagtatttttttgggggttaattttgyggtttygtttttattygyg

SEQ ID NO: 924 - DNA, 208 bp, synthetic construct
  misc_feature 1..208: note = Description of Artificial Sequence: Synthetic polynucleotide
  source 1..208: mol_type = other DNA
yggyggatggagaygggagggaggttgygaggtygttygaggagagattaaggttttagaaayggagaagygggygttttgygggaggyggyggygttgtygttggtygttaagggygggaagtgttttgggatttttattaggggtygygagtttygagygttaaattttygyggygttygtttagygygttgttgtggygggygyg

SEQ ID NO: 925 - DNA, 96 bp, synthetic construct
  misc_feature 1..96: note = Description of Artificial Sequence: Synthetic oligonucleotide
  source 1..96: mol_type = other DNA
yggttygttygttttttagtagttttggggtgttyggggyggttttgtaagygggagagagyggygaggyggyggygtygagtgyggggggatgyg

SEQ ID NO: 926 - DNA, 236 bp, synthetic construct
  misc_feature 1..236: note = Description of Artificial Sequence: Synthetic polynucleotide
  source 1..236: mol_type = other DNA
yggtgagtattygtygtggggaagggttttggggatttattggaggtygyggttygtagtagttaggggtygagttayggttayggaygttttggtgtttyggttygtgtygggtttttaggyggaggaggygttygttgggtttagattttygattttagtttyggtttttyggygtttgggttgygyggagtttttgtttygygtttyggatttttaygygtagtttttaygyg

SEQ ID NO: 927 - DNA, 211 bp, synthetic construct
  misc_feature 1..211: note = Description of Artificial Sequence: Synthetic polynucleotide
  source 1..211: mol_type = other DNA
ygtttttagtygtgttttggttgygtagttggaaaggttgagtagtttattgttgtttttttgttyggttttggatatatygtttgaatttttgggygtttttgttgttaagtgggggatagtattatttattggggaggaaaattttaggaatgtggattttggggttaygtaggggttgggaagtgaagggtagggaaygygggyggyg

SEQ ID NO: 928 - DNA, 193 bp, synthetic construct
  misc_feature 1..193: note = Description of Artificial Sequence: Synthetic polynucleotide
  source 1..193: mol_type = other DNA
ygygygtygaagttgtgayggtttattaagtagagatttgygaggtatatagagagggaatgaggyggaatygttygggggttygttgatattgtagagtttttygtagtatygttgttttaaatttygtttttttaggygtgygygtatagygagttagaggaggtttygtttygatttggggtttttygyg

SEQ ID NO: 929 - skipped

SEQ ID NO: 930 - DNA, 199 bp, synthetic construct
  misc_feature 1..199: note = Description of Artificial Sequence: Synthetic polynucleotide
  source 1..199: mol_type = other DNA
ygagtaggaggatttaaygaatttagtttgtggatatgttttaatttttattttygttttttttaggtttgtttaggtgaggatgatgggagggaaaagyggtgtatagtygtaatattggtattttgtaagagtygtyggggtattgatatagagggatatygtattggagatgyggtgtttayggagatttattgyg

SEQ ID NO: 931 - DNA, 87 bp, synthetic construct
  misc_feature 1..87: note = Description of Artificial Sequence: Synthetic oligonucleotide
  source 1..87: mol_type = other DNA
yggttagtagaggyggygtttggttttggatgttgtagyggagaygttaaggagattgaatgtagggagygaggygtagyggtygyg

SEQ ID NO: 932 - DNA, 68 bp, synthetic construct
  misc_feature 1..68: note = Description of Artificial Sequence: Synthetic oligonucleotide
  source 1..68: mol_type = other DNA
ygygygagagtgtttagttgggaaatgtagtttygaattaatatygtatgttttataattagtttayg

SEQ ID NO: 933 - DNA, 61 bp, synthetic construct
  misc_feature 1..61: note = Description of Artificial Sequence: Synthetic oligonucleotide
  source 1..61: mol_type = other DNA
ygtttttggtatttagggaatggtttgtaaattttaatgtattatagattagtttttatyg

SEQ ID NO: 934 - DNA, 40 bp, synthetic construct
  misc_feature 1..40: note = Description of Artificial Sequence: Synthetic oligonucleotide
  source 1..40: mol_type = other DNA
ygggtgttttgtygttgtygtttttgttgtygtygattyg

SEQ ID NO: 935 - DNA, 647 bp, synthetic construct
  misc_feature 1..647: note = Description of Artificial Sequence: Synthetic polynucleotide
  source 1..647: mol_type = other DNA
ygagyggygaggygagggygagygygtygaggaagggygggagaggygyggagtttggtygygtygygttgygtygagygtygggtttttttygygagtttttygggttygygygygygttttttattgttttygtttttygygyggygygtgttttttatttttygtygygygttttygtattygttyggttttaygyggygygygtttgttttggyggtagyggyggyggyggyggygygttttttttygaaygtygtttttagggttgttggttgygttttttattgtttygyggttgttgttyggggtgggyggygaggygggggggaggtgtyggtttggtygtyggggagggtttatygttygggyggatttttattgygagagygatgygggtttaggygyggygygygggggttgtagggygtttagtattgggggttgtyggygygygggggtttttttttggtttttaggtattygttgttgttgggygtttttygtattttyggttattatggatatttygttttttygtygtttttttygygtatttygggaggtygtyggggyggtagtagyggygyggtttygygggtgtttaggtgatyggttyggtagyggtagagtagtggtagtagtyg

SEQ ID NO: 936 - DNA, 327 bp, synthetic construct
  misc_feature 1..327: note = Description of Artificial Sequence: Synthetic polynucleotide
  source 1..327: mol_type = other DNA
ygyggaggagggtygggttgattgtygtygttgagttgttttyggaygggagygtttgtttayggtatttattttttttagyggtggaaatgtggagaagtaagtgggaggyggtgtygggaattgattttttttaaaayggtyggygtygttgttttgaaatgggyggttaagtgtttgtgggattaagggyggttttagagatgttyggaaaatygttgttayggttagagtgyggygtagaygyggtagagttggaggtgttygyggtgtaggttgttgtttaygtygtttaggttaggtgttgagggtttagttygygtttyg

SEQ ID NO: 937 - skipped

SEQ ID NO: 938 - DNA, 324 bp, synthetic construct
  misc_feature 1..324: note = Description of Artificial Sequence: Synthetic polynucleotide
  source 1..324: mol_type = other DNA
ygtagttgttgtagtygttgyggttgtygttatttggtaggaggtatagggtatgggtgagggaggttgyggtagyggttaygagttgttgaggaagttagattgtaggtatttggggggygttaggtagtygtagtygtyggtttyggygttygttaygtygtattygtttgyggygttttyggtttygaagagttttttgtygggttggaagtgygygggyggyggtyggaagggtttttttatgyggyggyggygtyggtagttgtttttttygaatatgttttygtaggtygggtttagygtttagtagttgtttttgyg

SEQ ID NO: 939 - DNA, 77 bp, synthetic construct
  misc_feature 1..77: note = Description of Artificial Sequence: Synthetic oligonucleotide
  source 1..77: mol_type = other DNA
yggygtagyggygggaattygaggtygagygtygyggyggtagygttagaagygtatttatygggtayggygaggyg

SEQ ID NO: 940 - DNA, 158 bp, synthetic construct
  misc_feature 1..158: note = Description of Artificial Sequence: Synthetic polynucleotide
  source 1..158: mol_type = other DNA
ygttttggattttygaagttagttttttgygtagyggattagagaggtttattygyggaygttaatttaatttttgggyggggttygggggttgagtagaaggygaggtttggggagtayggataattttgagggttgtttgtgtyggggtgggagyg

SEQ ID NO: 941 - DNA, 79 bp, synthetic construct
  misc_feature 1..79: note = Description of Artificial Sequence: Synthetic oligonucleotide
  source 1..79: mol_type = other DNA
ygtttttaaaaattaaataaattaataagagaattaattaataggtagygttgygatygttaggagygyggagygygyg

SEQ ID NO: 942 - DNA, 137 bp, synthetic construct
  misc_feature 1..137: note = Description of Artificial Sequence: Synthetic polynucleotide
  source 1..137: mol_type = other DNA
ygttttttttgatttttaaggttagaaagatttattatttttttygagagggygtagttatagatttattagagagggygggtagggtgtyggaagttagagaayggygtttygygtttttttatygttttagggyg

SEQ ID NO: 943 - DNA, 112 bp, synthetic construct
  misc_feature 1..112: note = Description of Artificial Sequence: Synthetic polynucleotide
  source 1..112: mol_type = other DNA
ygygggttatgtattgttgttggtgtttattatgtttaattttttggattataagtggtataaggagtygttgtagtagtgtaatttygatgggtygttgggtgtygtagyg

SEQ ID NO: 944-945 - skipped (2 entries)

SEQ ID NO: 946 - DNA, 282 bp, synthetic construct
  misc_feature 1..282: note = Description of Artificial Sequence: Synthetic polynucleotide
  source 1..282: mol_type = other DNA
ygtgggtagggygtygtagtttgygtagtttygaggatttygygtygttttttygagttagggtttttaggagygggtygygtaggagaygttagagggggttgttagyggttgttgggagaaygggttayggaaatagttttttttaaagtyggggttatygtggggtgggygagttygtttttttaggtygggggygyggattagaggggaygtgtgtagayggtygyggttagttttatttygttygggyggagaygtatagttggagttggagggtyg

SEQ ID NO: 947 - DNA, 81 bp, synthetic construct
  misc_feature 1..81: note = Description of Artificial Sequence: Synthetic oligonucleotide
  source 1..81: mol_type = other DNA
yggttgttaattygtttaatttgttgygygggtggtygtttagagtygygggtttgyggggygtttttygtygtygygtyg

SEQ ID NO: 948 - DNA, 53 bp, synthetic construct
  misc_feature 1..53: note = Description of Artificial Sequence: Synthetic oligonucleotide
  source 1..53: mol_type = other DNA
yggtygtggagattttaatygagtttaygttggygtaaaaggtaaaagtygyg

SEQ ID NO: 949 - DNA, 40 bp, synthetic construct
  misc_feature 1..40: note = Description of Artificial Sequence: Synthetic oligonucleotide
  source 1..40: mol_type = other DNA
ygygtygagggggygttagyggggaygtgagttggygtyg

SEQ ID NO: 950 - DNA, 206 bp, synthetic construct
  misc_feature 1..206: note = Description of Artificial Sequence: Synthetic polynucleotide
  source 1..206: mol_type = other DNA
yggtagtttgagygtttyggatggttygyggyggggyggtttgtaagagygaygygyggttgttgttggggygggaygygttgyggtyggygttygttttgttggttttygtygtgttgttgggygtygygttyggtttyggtttyggtttttggtttggttgtygygygggtygttagygtaygygatattaggtgggtyggtyg

SEQ ID NO: 951 - DNA, 38 bp, synthetic construct
  misc_feature 1..38: note = Description of Artificial Sequence: Synthetic oligonucleotide
  source 1..38: mol_type = other DNA
ygagggtayggyggtygtygtttygygtagtagtagyg

SEQ ID NO: 952 - skipped

SEQ ID NO: 953 - DNA, 25 bp, synthetic construct
  misc_feature 1..25: note = Description of Artificial Sequence: Synthetic oligonucleotide
  source 1..25: mol_type = other DNA
ygagygaatgtaaygygtatatayg

SEQ ID NO: 954 - DNA, 79 bp, synthetic construct
  misc_feature 1..79: note = Description of Artificial Sequence: Synthetic oligonucleotide
  source 1..79: mol_type = other DNA
ygtttttttttttttttaaaaaaaaaatttaaataatttttaaataatatttaataggaaagaagaaggaaaaggagyg

SEQ ID NO: 955 - DNA, 33 bp, synthetic construct
  misc_feature 1..33: note = Description of Artificial Sequence: Synthetic oligonucleotide
  source 1..33: mol_type = other DNA
ygagggtaayggtygaggygttaygyggggtyg

SEQ ID NO: 956 - DNA, 132 bp, synthetic construct
  misc_feature 1..132: note = Description of Artificial Sequence: Synthetic polynucleotide
  source 1..132: mol_type = other DNA
ygtaggttaggyggtygtgggtygagttggttatgattattttttygygggygttttgtttgggygagtgtttttygtagygttygtatttygtttttttygtgtgtagtttygygtygtygtygttygtyg

SEQ ID NO: 957 - DNA, 32 bp, synthetic construct
  misc_feature 1..32: note = Description of Artificial Sequence: Synthetic oligonucleotide
  source 1..32: mol_type = other DNA
ygttttyggggtagaggagggggtgttaggyg

SEQ ID NO: 958-959 - skipped (2 entries)

SEQ ID NO: 960 - DNA, 20 bp, synthetic construct
  misc_feature 1..20: note = Description of Artificial Sequence: Synthetic oligonucleotide
  source 1..20: mol_type = other DNA
yggygtygttggtatattyg

SEQ ID NO: 961 - DNA, 85 bp, synthetic construct
  misc_feature 1..85: note = Description of Artificial Sequence: Synthetic oligonucleotide
  source 1..85: mol_type = other DNA
yggygggygtaggggtagggtatgattgaygygttttttgtttgygtttatgtgagagaaagyggtygagggagggagygtgtyg

SEQ ID NO: 962 - DNA, 230 bp, synthetic construct
  misc_feature 1..230: note = Description of Artificial Sequence: Synthetic polynucleotide
  source 1..230: mol_type = other DNA
ygtaggggtygagaaagtggyggagaggyggtggtygaggtttaggggygagygygggttgagttggtttttgttgygtttaygagygatatttattttttygttgyggaygtttygygggygttaggttgggggttttgygatygatttttttygttttygaggtatygtygggttygtttggtaggtagygygtttygygagttggagggtygagtttygyggggtyg

SEQ ID NO: 963 - DNA, 84 bp, synthetic construct
  misc_feature 1..84: note = Description of Artificial Sequence: Synthetic oligonucleotide
  source 1..84: mol_type = other DNA
ygtaagagttggttaaaatgtttttaggtgygtgggggtttyggggttttagttggagttygatattttgagattggyggttyg

SEQ ID NO: 964 - DNA, 42 bp, synthetic construct
  misc_feature 1..42: note = Description of Artificial Sequence: Synthetic oligonucleotide
  source 1..42: mol_type = other DNA
ygygygagttttttygtttggttgagttaaaaagggatygyg

SEQ ID NO: 965 - DNA, 45 bp, synthetic construct
  misc_feature 1..45: note = Description of Artificial Sequence: Synthetic oligonucleotide
  source 1..45: mol_type = other DNA
yggaygattttttttattttttygaggaygaggaggagtayggyg

SEQ ID NO: 966 - DNA, 26 bp, synthetic construct
  misc_feature 1..26: note = Description of Artificial Sequence: Synthetic oligonucleotide
  source 1..26: mol_type = other DNA
ygygggataagggatgttggygggyg

SEQ ID NO: 967 - DNA, 50 bp, synthetic construct
  misc_feature 1..50: note = Description of Artificial Sequence: Synthetic oligonucleotide
  source 1..50: mol_type = other DNA
ygaggtttttttygyggygygyggtagttttagtttttatttaaatttyg

SEQ ID NO: 968 - DNA, 56 bp, synthetic construct
  misc_feature 1..56: note = Description of Artificial Sequence: Synthetic oligonucleotide
  source 1..56: mol_type = other DNA
ygttggtttattygygtgtaygtttattttttaygygygtttttggtttagaagyg

SEQ ID NO: 969 - DNA, 44 bp, synthetic construct
  misc_feature 1..44: note = Description of Artificial Sequence: Synthetic oligonucleotide
  source 1..44: mol_type = other DNA
ygagygtgtgygygygygaggggagygygtgygyggtgaggayg

SEQ ID NO: 970-971 - skipped (2 entries)

SEQ ID NO: 972 - DNA, 58 bp, synthetic construct
  misc_feature 1..58: note = Description of Artificial Sequence: Synthetic oligonucleotide
  source 1..58: mol_type = other DNA
ygttygtttattygttaggtaggyggtggtgtygatttatttgagtagttgtttygyg

SEQ ID NO: 973 - DNA, 151 bp, synthetic construct
  misc_feature 1..151: note = Description of Artificial Sequence: Synthetic polynucleotide
  source 1..151: mol_type = other DNA
ygtattggtttttttygttttygttygtaygaaagttttgttygaygtttgtagttagtatygttygtattgtttagggagggtttgygtygagatttagtggtygagtgagttatagagtygttggttttggggaygttgttttttatyg

SEQ ID NO: 974 - DNA, 17 bp, synthetic construct
  misc_feature 1..17: note = Description of Artificial Sequence: Synthetic oligonucleotide
  source 1..17: mol_type = other DNA
yggttttggggagttyg

SEQ ID NO: 975 - DNA, 70 bp, synthetic construct
  misc_feature 1..70: note = Description of Artificial Sequence: Synthetic oligonucleotide
  source 1..70: mol_type = other DNA
ygtagaggggttagtaattttatgggtggtggggttttttatttttggaygtagyggggagtagygggyg

SEQ ID NO: 976 - DNA, 59 bp, synthetic construct
  misc_feature 1..59: note = Description of Artificial Sequence: Synthetic oligonucleotide
  source 1..59: mol_type = other DNA
yggygtttagygtttaagygttaattygttgaaagttttttagygaaattttagggayg

SEQ ID NO: 977 - DNA, 25 bp, synthetic construct
  misc_feature 1..25: note = Description of Artificial Sequence: Synthetic oligonucleotide
  source 1..25: mol_type = other DNA
yggttyggatagaggttatttagyg

SEQ ID NO: 978 - DNA, 57 bp, synthetic construct
  misc_feature 1..57: note = Description of Artificial Sequence: Synthetic oligonucleotide
  source 1..57: mol_type = other DNA
ygtttttygttatttgatattagttaggtagtttttagggttagagygttagygtyg

SEQ ID NO: 979 - DNA, 111 bp, synthetic construct
  misc_feature 1..111: note = Description of Artificial Sequence: Synthetic polynucleotide
  source 1..111: mol_type = other DNA
ygtttagggttggggttyggtgggaattttttygtgttygaagggaygatttygttagagagtttttygatttttgtatttatygtttttggtaggaygtggagttgttyg

SEQ ID NO: 980 - DNA, 211 bp, synthetic construct
  misc_feature 1..211: note = Description of Artificial Sequence: Synthetic polynucleotide
  source 1..211: mol_type = other DNA
ygttattgtygtygttggygttttgtttttggaattttttagtaagatggtatttattgtttgttttttttygattagtatttttagtygygttttttttttttygggataygtattagttatatattgtggggagaagatgggttatgtaaatgtaagttaaygygtttttttagttatttttgtataatgtaataggaatagygattyg

SEQ ID NO: 981 - DNA, 75 bp, synthetic construct
  misc_feature 1..75: note = Description of Artificial Sequence: Synthetic oligonucleotide
  source 1..75: mol_type = other DNA
ygtttttattatttttttaaatattgtagtaagttgtagtaaggygggtaaatatygatagygygygtgggggyg

SEQ ID NO: 982 - skipped

SEQ ID NO: 983 - DNA, 66 bp, synthetic construct
  misc_feature 1..66: note = Description of Artificial Sequence: Synthetic oligonucleotide
  source 1..66: mol_type = other DNA
yggttatttgtttttygttttyggggygtygtttagtttygygttaggygttttttttagygttyg

SEQ ID NO: 984 - skipped

SEQ ID NO: 985 - DNA, 163 bp, synthetic construct
  misc_feature 1..163: note = Description of Artificial Sequence: Synthetic polynucleotide
  source 1..163: mol_type = other DNA
ygygygtttttyggygggtyggygggttyggaagtttygttgttygggtygggtttttaagttygtagtygttttgattaaaataggtatygygayggyggyggtaggyggyggtagttagggttggggtygtatygygtaygygtatgygttygtygtttyg

SEQ ID NO: 986 - DNA, 99 bp, synthetic construct
  misc_feature 1..99: note = Description of Artificial Sequence: Synthetic oligonucleotide
  source 1..99: mol_type = other DNA
ygtttttgttttggagygyggtygggagtaaaatygtaggagtgggagggtagygagttagttggatttygagtygyggagygygttggttttgtttyg

SEQ ID NO: 987 - DNA, 96 bp, synthetic construct
  misc_feature 1..96: note = Description of Artificial Sequence: Synthetic oligonucleotide
  source 1..96: mol_type = other DNA
ygygttttygtaggyggtattgttygyggygyggygtgtgtatygagygagtgaaggtatgtgtggygggygyggttggagttgtygtygtygtyg

SEQ ID NO: 988 - skipped

SEQ ID NO: 989 - DNA, 16 bp, synthetic construct
  misc_feature 1..16: note = Description of Artificial Sequence: Synthetic oligonucleotide
  source 1..16: mol_type = other DNA
yggygagattggtayg

SEQ ID NO: 990 - skipped

SEQ ID NO: 991 - DNA, 141 bp, synthetic construct
  misc_feature 1..141: note = Description of Artificial Sequence: Synthetic polynucleotide
  source 1..141: mol_type = other DNA
ygyggttgatggttgaygygttgygyggttgygtgtttgttttttayggygtggtggagygygayggygaaagttatttgtagttgtaggatttgttygatggtttygayggattttgtgtgttygattgtaaaatgggyg

SEQ ID NO: 992 - skipped

SEQ ID NO: 993 - DNA, 37 bp, synthetic construct
  misc_feature 1..37: note = Description of Artificial Sequence: Synthetic oligonucleotide
  source 1..37: mol_type = other DNA
ygtttttaattaatygtataaaattygtaatatttyg

SEQ ID NO: 994 - DNA, 52 bp, synthetic construct
  misc_feature 1..52: note = Description of Artificial Sequence: Synthetic oligonucleotide
  source 1..52: mol_type = other DNA
ygggtyggggtatttggygttttgtgtgggtggygggagyggggaygtttyg

SEQ ID NO: 995-998 - skipped (4 entries)

SEQ ID NO: 999 - DNA, 17 bp, synthetic construct
  misc_feature 1..17: note = Description of Artificial Sequence: Synthetic oligonucleotide
  source 1..17: mol_type = other DNA
ygagttggggygggayg

SEQ ID NO: 1000 - DNA, 136 bp, synthetic construct
  misc_feature 1..136: note = Description of Artificial Sequence: Synthetic polynucleotide
  source 1..136: mol_type = other DNA
ygygagttttttgaygyggggattagttatgaatygggggtgtgtgtttgtttttagagatttggtaaggtgyggagttttttagaagtgyggttaagyggtagyggagayggygagttaggaattttttttygyg

SEQ ID NO: 1001 - DNA, 31 bp, synthetic construct
  misc_feature 1..31: note = Description of Artificial Sequence: Synthetic oligonucleotide
  source 1..31: mol_type = other DNA
ygygtttagygtttygtttattttttggtyg

SEQ ID NO: 1002 - DNA, 25 bp, synthetic construct
  misc_feature 1..25: note = Description of Artificial Sequence: Synthetic oligonucleotide
  source 1..25: mol_type = other DNA
ygtgtattttgaggtttggttggyg

SEQ ID NO: 1003 - DNA, 12 bp, synthetic construct
  misc_feature 1..12: note = Description of Artificial Sequence: Synthetic oligonucleotide
  source 1..12: mol_type = other DNA
ygttgaygagyg

SEQ ID NO: 1004 - skipped

SEQ ID NO: 1005 - DNA, 199 bp, synthetic construct
  misc_feature 1..199: note = Description of Artificial Sequence: Synthetic polynucleotide
  source 1..199: mol_type = other DNA
ygygttygyggtygyggtygttgtatggygttgagatggygggggygtygygyggyggaggyggyggyggaggyggygygggygagttygggggygtygagygggyggtygggataagtygtyggygygggtttygggygtgygaygaggagttygtttgtttagagttggaggygttgtttygyggttataygttgyg

SEQ ID NO: 1006 - DNA, 91 bp, synthetic construct
  misc_feature 1..91: note = Description of Artificial Sequence: Synthetic oligonucleotide
  source 1..91: mol_type = other DNA
yggtttygggtgtagggtggygggttyggyggygygygttttttttttttttttggyggttygtaygtgtygttygygtygygtttttayg

SEQ ID NO: 1007 - DNA, 108 bp, synthetic construct
  misc_feature 1..108: note = Description of Artificial Sequence: Synthetic polynucleotide
  source 1..108: mol_type = other DNA
ygygtttttattgttttatttttttygtttttggagtttttyggtgattttattatagtttttgttattttgtgatttgtaggtattgggagatttatagggaggayg

SEQ ID NO: 1008 - DNA, 13 bp, synthetic construct
  misc_feature 1..13: note = Description of Artificial Sequence: Synthetic oligonucleotide
  source 1..13: mol_type = other DNA
ygtatygatttyg

SEQ ID NO: 1009 - DNA, 176 bp, synthetic construct
  misc_feature 1..176: note = Description of Artificial Sequence: Synthetic polynucleotide
  source 1..176: mol_type = other DNA
yggttygttgggtaaggygttygagaaagygtttggygggaggaggtgygyggttttttgttttaggyggttygggtgttygttttatgyggggygagygttyggtygattttygtyggggyggagtttgaggggtggttgatttatgtayggggattgttatttygtygttttyg

SEQ ID NO: 1010 - skipped

SEQ ID NO: 1011 - DNA, 157 bp, synthetic construct
  misc_feature 1..157: note = Description of Artificial Sequence: Synthetic polynucleotide
  source 1..157: mol_type = other DNA
ygagaagtttygygggagayggyggtttttaaagttattttgggtygygggagygygggatyggggttgygggygtygagagygygtygtttgtygttttygtgygtygtygtygtttttgygygaygtttttyggttaggtttgggaaagygttyg

SEQ ID NO: 1012 - DNA, 66 bp, synthetic construct
  misc_feature 1..66: note = Description of Artificial Sequence: Synthetic oligonucleotide
  source 1..66: mol_type = other DNA
ygygaatygttaggggttttygygttttttttttatttaggttttttgtttttttygtygyggtyg

SEQ ID NO: 1013 - DNA, 498 bp, synthetic construct
  misc_feature 1..498: note = Description of Artificial Sequence: Synthetic polynucleotide
  source 1..498: mol_type = other DNA
ygtygtygygtygatyggtygygttttygggattttttgggtyggtygygttttyggttttttttttygtygygtttgtgygtaygygtagaygtygtaagttttaygagttgtaygyggtyggygtttygtttttttygtygttyggttaygttttygygttygagtygtygyggttyggaagyggaagyggaagyggtttyggtttygtttttgygygttygttyggtttygyggtygayggttttatygatttgagtaagaagtygyggygttygtttttyggagtttyggtatyggygttggtygattattaygagtgtayggtttgtygygtgagtttttatagtttygaggtttatttggygtataagaagtattygtgtttygttgygttatygttyggygygttyggtttgttygtygtygtttgtttttattgtttttygaayggttyggtgygyggggatttgttggagtattttygtttggygtayg

SEQ ID NO: 1014 - DNA, 27 bp, synthetic construct
  misc_feature 1..27: note = Description of Artificial Sequence: Synthetic oligonucleotide
  source 1..27: mol_type = other DNA
ygygggttygaaygtttttygygtttg

SEQ ID NO: 1015-1016 - skipped (2 entries)

SEQ ID NO: 1017 - DNA, 16 bp, synthetic construct
  misc_feature 1..16: note = Description of Artificial Sequence: Synthetic oligonucleotide
  source 1..16: mol_type = other DNA
ygtygtttgtttygyg

SEQ ID NO: 1018 - DNA, 53 bp, synthetic construct
  misc_feature 1..53: note = Description of Artificial Sequence: Synthetic oligonucleotide
  source 1..53: mol_type = other DNA
ygyggagggygtygaattagagtttgyggggtttgatagttttttttgyggyg

SEQ ID NO: 1019-1022 - skipped (4 entries)

SEQ ID NO: 1023 - DNA, 14 bp, synthetic construct
  misc_feature 1..14: note = Description of Artificial Sequence: Synthetic oligonucleotide
  source 1..14: mol_type = other DNA
ygtgtttatttayg

SEQ ID NO: 1024 - DNA, 186 bp, synthetic construct
  misc_feature 1..186: note = Description of Artificial Sequence: Synthetic polynucleotide
  source 1..186: mol_type = other DNA
yggygggaaggtttgggtgtttatagatagagttggagtttttyggtgggtggtatagataattagttggggttgttttatatgtaatttaattataggggaaataggtttaaatatygggtgataagtagygtaattgtttygggtgattttgtaattttttttttattaattttttttataayg

SEQ ID NO: 1025 - DNA, 79 bp, synthetic construct
  misc_feature 1..79: note = Description of Artificial Sequence: Synthetic oligonucleotide
  source 1..79: mol_type = other DNA
yggggtaygttygttttyggyggggtttttygtttygttgtgggagtggtagtgggtgtyggggtggagaaagtaygyg

SEQ ID NO: 1026 - DNA, 49 bp, synthetic construct
  misc_feature 1..49: note = Description of Artificial Sequence: Synthetic oligonucleotide
  source 1..49: mol_type = other DNA
ygtygygttygygtygygttttttgtaggtaaygggagaygttttygyg

SEQ ID NO: 1027 - DNA, 17 bp, synthetic construct
  misc_feature 1..17: note = Description of Artificial Sequence: Synthetic oligonucleotide
  source 1..17: mol_type = other DNA
yggatgaatygttygyg

SEQ ID NO: 1028-1030 - skipped (3 entries)

SEQ ID NO: 1031 - DNA, 165 bp, synthetic construct
  misc_feature 1..165: note = Description of Artificial Sequence: Synthetic polynucleotide
  source 1..165: mol_type = other DNA
ygggaaygttgtagtttggttgagygtgatttttaggttttgtgaggaaaagtygagygygttatatygaggygttagtygtttattttattataaggtaaaagatttatgttgttttagttattttaaagttgggagatatattgtattttttattagatttyg

SEQ ID NO: 1032 - DNA, 14 bp, synthetic construct
  misc_feature 1..14: note = Description of Artificial Sequence: Synthetic oligonucleotide
  source 1..14: mol_type = other DNA
ygygygggttagyg

SEQ ID NO: 1033-1034 - skipped (2 entries)

SEQ ID NO: 1035 - DNA, 97 bp, synthetic construct
  misc_feature 1..97: note = Description of Artificial Sequence: Synthetic oligonucleotide
  source 1..97: mol_type = other DNA
ygtgtgtttagggttagtagtaygtataagtgttagygtayggtygtygygtttatgtttaatgygggtttygttgggygtgygggygtgyggggyg

SEQ ID NO: 1036 - skipped

SEQ ID NO: 1037 - DNA, 98 bp, synthetic construct
  misc_feature 1..98: note = Description of Artificial Sequence: Synthetic oligonucleotide
  source 1..98: mol_type = other DNA
ygyggatygygygttttygtygttttgtttttaaatttttgtygtagtttttttttaagttagygaatttattttttaaaattagaaattgaatttyg

SEQ ID NO: 1038 - DNA, 69 bp, synthetic construct
  misc_feature 1..69: note = Description of Artificial Sequence: Synthetic oligonucleotide
  source 1..69: mol_type = other DNA
yggaggggyggaggaggtgttggyggyggtattgagyggyggyggygtagggygygygggtttttygyg

SEQ ID NO: 1039-1042 - skipped (4 entries)

SEQ ID NO: 1043 - DNA, 103 bp, synthetic construct
  misc_feature 1..103: note = Description of Artificial Sequence: Synthetic polynucleotide
  source 1..103: mol_type = other DNA
yggttttaggayggtagggatygygatggagyggtttygggggyggtygggggayggygyggtggyggtyggttagttygttttttygggggyggygggygyg

SEQ ID NO: 1044 - skipped

SEQ ID NO: 1045 - DNA, 21 bp, synthetic construct
  misc_feature 1..21: note = Description of Artificial Sequence: Synthetic oligonucleotide
  source 1..21: mol_type = other DNA
yggtttttggyggyggyggyg

SEQ ID NO: 1046 - DNA, 148 bp, synthetic construct
  misc_feature 1..148: note = Description of Artificial Sequence: Synthetic polynucleotide
  source 1..148: mol_type = other DNA
yggygttttaaaggggaggattttgyggygygggtaagaggyggygggagygygyggttygggagtgtggttgtagtgygtygggatattagggtttygygtttygtatttaagaggttttygygttttaatttttygygttygygyg

SEQ ID NO: 1047-1048 - skipped (2 entries)

SEQ ID NO: 1049 - DNA, 26 bp, synthetic construct
  misc_feature 1..26: note = Description of Artificial Sequence: Synthetic oligonucleotide
  source 1..26: mol_type = other DNA
ygtygagaggtagygygtgatggtyg

SEQ ID NO: 1050 - DNA, 119 bp, synthetic construct
  misc_feature 1..119: note = Description of Artificial Sequence: Synthetic polynucleotide
  source 1..119: mol_type = other DNA
ygtaygtttaagtgygygygttgtygtaattatggygttttgttttggtttaagggttataagygttattgtygttttaaggattgtatttgygagaagtgtatttttattatygagyg

SEQ ID NO: 1051 - DNA, 66 bp, synthetic construct
  misc_feature 1..66: note = Description of Artificial Sequence: Synthetic oligonucleotide
  source 1..66: mol_type = other DNA
yggttygatttttttygtttagtttgggttagaggaagtygaaagyggttttagtaaggtgaggyg

SEQ ID NO: 1052 - DNA, 60 bp, synthetic construct
  misc_feature 1..60: note = Description of Artificial Sequence: Synthetic oligonucleotide
  source 1..60: mol_type = other DNA
ygagygaagtygtygtgtttgggtagaaggygttttaggaggygygaggttttagtygyg

SEQ ID NO: 1053 - skipped

SEQ ID NO: 1054 - DNA, 124 bp, synthetic construct
  misc_feature 1..124: note = Description of Artificial Sequence: Synthetic polynucleotide
  source 1..124: mol_type = other DNA
ygttyggagygggatttgtttgttttagtgtaygtygyggagygaattatygggttggygggggtggaggggtgtaggygtgggggttgygggtygttygggttttgggttttttttgtygtyg

SEQ ID NO: 1055 - skipped

SEQ ID NO: 1056 - DNA, 156 bp, synthetic construct
  misc_feature 1..156: note = Description of Artificial Sequence: Synthetic polynucleotide
  source 1..156: mol_type = other DNA
yggggtatygyggygttygtygtygttttttygtaggtgattatttttttgtaggtgttttygggttttaggtggttgygtgtttgygttatggttgatattttgggygagyggtatttggtgatttgtaagggygygayggtggaggtygaggyg

SEQ ID NO: 1057 - skipped

SEQ ID NO: 1058 - DNA, 91 bp, synthetic construct
  misc_feature 1..91: note = Description of Artificial Sequence: Synthetic oligonucleotide
  source 1..91: mol_type = other DNA
ygygygtygtygaaattttgttttygtygtygtttatygataggttgtggagaaggttatygatygatgttatygagttatttttgaagyg

SEQ ID NO: 1059-1060 - skipped (2 entries)

SEQ ID NO: 1061 - DNA, 89 bp, synthetic construct
  misc_feature 1..89: note = Description of Artificial Sequence: Synthetic oligonucleotide
  source 1..89: mol_type = other DNA
ygttattygygtgttagtagttgggygtttygattttttagatygygtgagtttagtaaagyggttaggygygygtttgtagttyggyg

SEQ ID NO: 1062 - DNA, 13 bp, synthetic construct
  misc_feature 1..13: note = Description of Artificial Sequence: Synthetic oligonucleotide
  source 1..13: mol_type = other DNA
ygtttttaattyg

SEQ ID NO: 1063 - skipped

SEQ ID NO: 1064 - DNA, 47 bp, synthetic construct
  misc_feature 1..47: note = Description of Artificial Sequence: Synthetic oligonucleotide
  source 1..47: mol_type = other DNA
ygagygttagattttagtaataaaaggttaggygaggttatatygyg

SEQ ID NO: 1065-1066 - skipped (2 entries)

SEQ ID NO: 1067 - DNA, 159 bp, synthetic construct
  misc_feature 1..159: note = Description of Artificial Sequence: Synthetic polynucleotide
  source 1..159: mol_type = other DNA
ygatgttygyggygtgaaagygttygyggygggygtygatttttgttttagttttttgtttttttygtttygtttgtttygtgtttttgtgattttggttttggygtygtygtttaggygtttygtaatgtagttgtttttgygtttyggygggaggyg

SEQ ID NO: 1068-1070 - skipped (3 entries)

SEQ ID NO: 1071 - DNA, 78 bp, synthetic construct
  misc_feature 1..78: note = Description of Artificial Sequence: Synthetic oligonucleotide
  source 1..78: mol_type = other DNA
ygggygtygaggtttgggttttagtygtggygttygtttyggygtagtggggagtygygggygtyggagaagyggtyg

SEQ ID NO: 1072 - skipped

SEQ ID NO: 1073 - DNA, 48 bp, synthetic construct
  misc_feature 1..48: note = Description of Artificial Sequence: Synthetic oligonucleotide
  source 1..48: mol_type = other DNA
ygyggaggagtttygtattygatygtgtatagygatygagttggygyg

SEQ ID NO: 1074-1076 - skipped (3 entries)

SEQ ID NO: 1077 - DNA, 157 bp, synthetic construct
  misc_feature 1..157: note = Description of Artificial Sequence: Synthetic polynucleotide
  source 1..157: mol_type = other DNA
ygtttttatagttttgttttgatagttaaggaaaaaatttgttaaaaattagaggygttgttgagtgttggygtgggaatgttagtttagttagagttttgttttgggttatttaaataaaaatagatatgttggtggtaaatgttagttgaatayg

SEQ ID NO: 1078 - skipped

SEQ ID NO: 1079 - DNA, 82 bp, synthetic construct
  misc_feature 1..82: note = Description of Artificial Sequence: Synthetic oligonucleotide
  source 1..82: mol_type = other DNA
ygygygttagtttttygtttygtggaagygtttttttttygatttyggttgattttygttygtygtttttttygygggtgyg

SEQ ID NO: 1080 - DNA, 23 bp, synthetic construct
  misc_feature 1..23: note = Description of Artificial Sequence: Synthetic oligonucleotide
  source 1..23: mol_type = other DNA
ygtttggtygttttatttggtyg

SEQ ID NO: 1081 - DNA, 38 bp, synthetic construct
  misc_feature 1..38: note = Description of Artificial Sequence: Synthetic oligonucleotide
  source 1..38: mol_type = other DNA
ygagttttygygygtttaygagtagttttgygagttyg

SEQ ID NO: 1082 - skipped

SEQ ID NO: 1083 - DNA, 165 bp, synthetic construct
  misc_feature 1..165: note = Description of Artificial Sequence: Synthetic polynucleotide
  source 1..165: mol_type = other DNA
ygtgtttttttttagygagygtagygagttgtttttgaagtttaggtagattaggtygtygtagaagatgaagaagttttyggggattygttggatgyggttgtyggttattagtagtttgygtaygtttagggggaaagggtttggtaygttgggtagttygyg

SEQ ID NO: 1084-1086 - skipped (3 entries)

SEQ ID NO: 1087 - DNA, 23 bp, synthetic construct
  misc_feature 1..23: note = Description of Artificial Sequence: Synthetic oligonucleotide
  source 1..23: mol_type = other DNA
yggtgttygggggtygtttgtyg

SEQ ID NO: 1088 - skipped

SEQ ID NO: 1089 - DNA, 66 bp, synthetic construct
  misc_feature 1..66: note = Description of Artificial Sequence: Synthetic oligonucleotide
  source 1..66: mol_type = other DNA
yggtygtggygggttttttggggyggtagttttaggygygggygygtagtagtttygaaggygtyg

SEQ ID NO: 1090 - DNA, 43 bp, synthetic construct
  misc_feature 1..43: note = Description of Artificial Sequence: Synthetic oligonucleotide
  source 1..43: mol_type = other DNA
ygaataaaaagagtttaggtygygygggygggttgygygttyg

SEQ ID NO: 1091 - skipped

SEQ ID NO: 1092 - DNA, 62 bp, synthetic construct
  misc_feature 1..62: note = Description of Artificial Sequence: Synthetic oligonucleotide
  source 1..62: mol_type = other DNA
ygtttagatgyggyggyggygayggttttagttgygtttygtggttattttygtgtagygyg

SEQ ID NO: 1093 - skipped

SEQ ID NO: 1094 - DNA, 138 bp, synthetic construct
  misc_feature 1..138: note = Description of Artificial Sequence: Synthetic polynucleotide
  source 1..138: mol_type = other DNA
ygaaagattygaaattttaaaagttttattgygtgtttttgggaggggagggggygygttaggaaaggagtggaaaaaagtgggygaggaggagygttgaaaattttttgataagtagttttygtgygttygagagyg

SEQ ID NO: 1095-1098 - skipped (4 entries)

SEQ ID NO: 1099 - DNA, 187 bp, synthetic construct
  misc_feature 1..187: note = Description of Artificial Sequence: Synthetic polynucleotide
  source 1..187: mol_type = other DNA
yggtagaagtgggaggtataygaggagttattggaaayggygtttttgtggaggagtygggggggatggggagtagagggagggggttttgttgttttagygtttygaggtygtggagyggtagtagttgtagtyggagtagtattagtaatagtaatagtgagygggayggagttaggatygttyg

SEQ ID NO: 1100-1101 - skipped (2 entries)

SEQ ID NO: 1102 - DNA, 110 bp, synthetic construct
  misc_feature 1..110: note = Description of Artificial Sequence: Synthetic polynucleotide
  source 1..110: mol_type = other DNA
ygyggygtgtagttyggyggatgttgttaggttaggygatttygtygtttttggagygygagygygttttagtttgtagygatgattttggaattagattttgatttgyg

SEQ ID NO: 1103 - skipped

SEQ ID NO: 1104 - DNA, 189 bp, synthetic construct
  misc_feature 1..189: note = Description of Artificial Sequence: Synthetic polynucleotide
  source 1..189: mol_type = other DNA
ygggaggttttgttygttyggtggttgtygyggtttttttygygttgttttttaygtttggtttattatgtaygaggtaggtaatttgttttttttttyggggatttatttyggagataagaaggtagtttgttttttgtaatggtttttgttggagtgyggyggggtttaggygygagygggggtayg

SEQ ID NO: 1105 - DNA, 42 bp, synthetic construct
  misc_feature 1..42: note = Description of Artificial Sequence: Synthetic oligonucleotide
  source 1..42: mol_type = other DNA
ygttgaaggtgggtggaaygagggygtttgagtgtattygyg

SEQ ID NO: 1106 - DNA, 33 bp, synthetic construct
  misc_feature 1..33: note = Description of Artificial Sequence: Synthetic oligonucleotide
  source 1..33: mol_type = other DNA
ygygygggggttttaggtattttgygttttayg

SEQ ID NO: 1107 - DNA, 15 bp, synthetic construct
  misc_feature 1..15: note = Description of Artificial Sequence: Synthetic oligonucleotide
  source 1..15: mol_type = other DNA
ygygttagtygaayg

SEQ ID NO: 1108 - DNA, 51 bp, synthetic construct
  misc_feature 1..51: note = Description of Artificial Sequence: Synthetic oligonucleotide
  source 1..51: mol_type = other DNA
ygttgggatagagttgtttgttggagttgtygtagatygtygtggtgggyg

SEQ ID NO: 1109 - skipped

SEQ ID NO: 1110 - DNA, 268 bp, synthetic construct
  misc_feature 1..268: note = Description of Artificial Sequence: Synthetic polynucleotide
  source 1..268: mol_type = other DNA
yggagygygtagttygtttttgaataagaagtgagtataatggygtgtttgtaaaaaaaagttttaagttygttttttttaaaaaatattttgaatgttgtatgttttatgttttttagygtttygygggagagattyggttatagagtaggaggtgagatttttttttyggtatttttatttttttggtygtaygtttttttgttttagttttttttgggaggattgtaaatgtttttttttagtaagyggtygttttttattttyg

SEQ ID NO: 1111 - skipped

SEQ ID NO: 1112 - DNA, 33 bp, synthetic construct
  misc_feature 1..33: note = Description of Artificial Sequence: Synthetic oligonucleotide
  source 1..33: mol_type = other DNA
yggagtttttaggagtagttagatygattatyg

SEQ ID NO: 1113 - DNA, 23 bp, synthetic construct
  misc_feature 1..23: note = Description of Artificial Sequence: Synthetic oligonucleotide
  source 1..23: mol_type = other DNA
ygtttattagttygagattttyg

SEQ ID NO: 1114 - DNA, 40 bp, synthetic construct
  misc_feature 1..40: note = Description of Artificial Sequence: Synthetic oligonucleotide
  source 1..40: mol_type = other DNA
ygtttygattygaygttttttygttygattaggtgtttyg

SEQ ID NO: 1115 - DNA, 10 bp, synthetic construct
  misc_feature 1..10: note = Description of Artificial Sequence: Synthetic oligonucleotide
  source 1..10: mol_type = other DNA
ygyggtttyg

SEQ ID NO: 1116 - DNA, 181 bp, synthetic construct
  misc_feature 1..181: note = Description of Artificial Sequence: Synthetic polynucleotide
  source 1..181: mol_type = other DNA
yggttgttgatygtttttttygygttygttagggtttttgtttygygttagttatygygygttttttttttgtttatgtygtagttttygtggtttttgttttggattygggatgttaggttgagataygttttgtaaatttttggtagaaatgggygtaagggggtggatttygttttyg

SEQ ID NO: 1117 - DNA, 195 bp, synthetic construct
  misc_feature 1..195: note = Description of Artificial Sequence: Synthetic polynucleotide
  source 1..195: mol_type = other DNA
ygatttaggaygtyggygtttgttaggattttttygtttgtttttygygtttygygygygtttatgttattattayggggagggtgtatgyggtaggtgtttggtygaggttttygggagygagtygtttttaygtgttttagtttgtttttttttygaagttagaygttggygttgtagttttgttgtttgayg

SEQ ID NO: 1118 - skipped

SEQ ID NO: 1119 - DNA, 358 bp, synthetic construct
  misc_feature 1..358: note = Description of Artificial Sequence: Synthetic polynucleotide
  source 1..358: mol_type = other DNA
yggygttygagtgattttgtttagtttygttttgygtttttgtaaattaygttgttgygttaattataaatttggttaatatgtttttgtaattttattatttaaaaaygtttttaggtatttggtygttgttagattaggttygygggttyggaggaggtttttttatttgttttygttagtttyggggatygtgygyggttttygtgtggttttygtttaygaggtttttygggtaggaatygtygygygatttttgtttagyggtygygttttggttaygggygatttttgtygggaattttgttttyggttaagttgygttttygtatttyggtggtttttattygagttygyg

SEQ ID NO: 1120 - DNA, 13 bp, synthetic construct
  misc_feature 1..13: note = Description of Artificial Sequence: Synthetic oligonucleotide
  source 1..13: mol_type = other DNA
ygtagttgtggyg

SEQ ID NO: 1121-1122 - skipped (2 entries)

SEQ ID NO: 1123 - DNA, 95 bp, synthetic construct
  misc_feature 1..95: note = Description of Artificial Sequence: Synthetic oligonucleotide
  source 1..95: mol_type = other DNA
ygtgyggggttatttgaaggttggggygyggaagtttaatttygtgttgattgggttttaagttttttgygttttygtttygtttygagtgttyg

SEQ ID NO: 1124 - DNA, 45 bp, synthetic construct
  misc_feature 1..45: note = Description of Artificial Sequence: Synthetic oligonucleotide
  source 1..45: mol_type = other DNA
yggtagtaggttggagygtatygtgygygttttgttttttyggyg

SEQ ID NO: 1125 - DNA, 104 bp, synthetic construct
  misc_feature 1..104: note = Description of Artificial Sequence: Synthetic polynucleotide
  source 1..104: mol_type = other DNA
yggttgagtyggagtttaygyggygygygtttttygygaggaatttttyggtttgtaggttgtttgttattttygtttttygaygygtttttttttggttygyg

SEQ ID NO: 1126 - DNA, 87 bp, synthetic construct
  misc_feature 1..87: note = Description of Artificial Sequence: Synthetic oligonucleotide
  source 1..87: mol_type = other DNA
ygttttygttttygttgatattttgtaaagtygyggyggtagyggyggggattaygttgyggtgtattatttttygttattttttyg

SEQ ID NO: 1127 - DNA, 62 bp, synthetic construct
  misc_feature 1..62: note = Description of Artificial Sequence: Synthetic oligonucleotide
  source 1..62: mol_type = other DNA
ygatagtttgygagtttyggttgtaagtggtttttttttttygyggttgttgtttagtgtyg

SEQ ID NO: 1128-1135 - skipped (8 entries)

SEQ ID NO: 1136 - DNA, 145 bp, synthetic construct
  misc_feature 1..145: note = Description of Artificial Sequence: Synthetic polynucleotide
  source 1..145: mol_type = other DNA
ygtyggtttgttggygatttggygtatttgttygygygttttggttttagttgtygtaggttttttttgtatttatttttagtttttaaagttagtgtagttagtatygtttatttggagttttaatttttttttgygattttyg

SEQ ID NO: 1137 - skipped

SEQ ID NO: 1138 - DNA, 19 bp, synthetic construct
  misc_feature 1..19: note = Description of Artificial Sequence: Synthetic oligonucleotide
  source 1..19: mol_type = other DNA
ygtttatygttaggagtyg

SEQ ID NO: 1139 - DNA, 35 bp, synthetic construct
  misc_feature 1..35: note = Description of Artificial Sequence: Synthetic oligonucleotide
  source 1..35: mol_type = other DNA
yggyggyggyggyggttttattagyggagttttyg

SEQ ID NO: 1140-1141 - skipped (2 entries)

SEQ ID NO: 1142 - DNA, 36 bp, synthetic construct
  misc_feature 1..36: note = Description of Artificial Sequence: Synthetic oligonucleotide
  source 1..36: mol_type = other DNA
ygagttggygttggttygttggttgtaggagagtyg

SEQ ID NO: 1143 - skipped

SEQ ID NO: 1144 - DNA, 42 bp, synthetic construct
  misc_feature 1..42: note = Description of Artificial Sequence: Synthetic oligonucleotide
  source 1..42: mol_type = other DNA
yggttgagttttygtttgtttaattttatttgttattgtayg

SEQ ID NO: 1145-1146 - skipped (2 entries)

SEQ ID NO: 1147 - DNA, 18 bp, synthetic construct
  misc_feature 1..18: note = Description of Artificial Sequence: Synthetic oligonucleotide
  source 1..18: mol_type = other DNA
ygygtagygttygygtyg

SEQ ID NO: 1148-1150 - skipped (3 entries)

SEQ ID NO: 1151 - DNA, 118 bp, synthetic construct
  misc_feature 1..118: note = Description of Artificial Sequence: Synthetic polynucleotide
  source 1..118: mol_type = other DNA
ygtgttagatttyggtttygygatttaggtgagtgtygttatygtygtttggagggatttaagggttttgggttgggatttggggtygtatyggggtttgaggtagaatagygaygyg

SEQ ID NO: 1152 - DNA, 22 bp, synthetic construct
  misc_feature 1..22: note = Description of Artificial Sequence: Synthetic oligonucleotide
  source 1..22: mol_type = other DNA
ygaatygygggyggygyggayg

SEQ ID NO: 1153-1156 - skipped (4 entries)

SEQ ID NO: 1157 - DNA, 31 bp, synthetic construct
  misc_feature 1..31: note = Description of Artificial Sequence: Synthetic oligonucleotide
  source 1..31: mol_type = other DNA
ygataagagttyggtgttgagatgtgttayg

SEQ ID NO: 1158-1166 - skipped (9 entries)

SEQ ID NO: 1167 - DNA, 69 bp, synthetic construct
  misc_feature 1..69: note = Description of Artificial Sequence: Synthetic oligonucleotide
  source 1..69: mol_type = other DNA
ygttaggggyggttagyggtygtttggttggygtgtyggyggygttyggggagggygggtyggggggyg

SEQ ID NO: 1168 - DNA, 415 bp, synthetic construct
  misc_feature 1..415: note = Description of Artificial Sequence: Synthetic polynucleotide
  source 1..415: mol_type = other DNA
ygtttttttttttggttygattggttttggttttttttaygtttttagtttttaaattggygttygttttatggttygtgtaggaygttaaaagtayggtaaattttagggygatttttagtagaygttttygaygtatgatgtygagtygttatyggttttygtygttttttgtygygttyggggttyggtttgyggtygtygttgygttttgaagygtatygygtygtyggggtttygttatttygtygttygtttttygggtygggtttttttygttttttttaggygttgtttttattttaggyggtttttgttagttgtaatatagagataaattttygaggyggggagatttttagggtatygggatgttgaagtttygyggtttttatttttaagtttaattygtgyg

SEQ ID NO: 1169-1173 - skipped (5 entries)

SEQ ID NO: 1174 - DNA, 62 bp, synthetic construct
  misc_feature 1..62: note = Description of Artificial Sequence: Synthetic oligonucleotide
  source 1..62: mol_type = other DNA
ygygttygtygttagttygtatagygtttygtatattttygtaygygtttgaaatgygtayg

SEQ ID NO: 1175-1178 - skipped (4 entries)

SEQ ID NO: 1179 - DNA, 20 bp, synthetic construct
  misc_feature 1..20: note = Description of Artificial Sequence: Synthetic oligonucleotide
  source 1..20: mol_type = other DNA
ygtaaaygtaaaagttttyg

SEQ ID NO: 1180 - DNA, 69 bp, synthetic construct
  misc_feature 1..69: note = Description of Artificial Sequence: Synthetic oligonucleotide
  source 1..69: mol_type = other DNA
ygttttttggggtttttggttgtygagtttygttaaggtaaagaygttagtaagygaggaagygtagyg

SEQ ID NO: 1181 - skipped

SEQ ID NO: 1182 - DNA, 318 bp, synthetic construct
  misc_feature 1..318: note = Description of Artificial Sequence: Synthetic polynucleotide
  source 1..318: mol_type = other DNA
ygtttygyggtagtgttagttttttggggattaggaagggygatttttgtttgggagttagtgtttgggtygtygggttygggtaagygttgggggtttggttygagaagatgyggataggtggtttagggygtygyggattttygttttttgygggtatygggagtttagggtygaggygygtygtttygaggggtttttttttttaataatgygttyggaatggagttygygttttgatagygygggttagttygaaatygtttagaattygtttygatgagtgggtgagtygttttgggagtttgtygygtttyg

SEQ ID NO: 1183 - DNA, 27 bp, synthetic construct
  misc_feature 1..27: note = Description of Artificial Sequence: Synthetic oligonucleotide
  source 1..27: mol_type = other DNA
ygtggtggtttttygagyggaggygyg

SEQ ID NO: 1184 - skipped

SEQ ID NO: 1185 - DNA, 13 bp, synthetic construct
  misc_feature 1..13: note = Description of Artificial Sequence: Synthetic oligonucleotide
  source 1..13: mol_type = other DNA
ygagtttttygyg

SEQ ID NO: 1186 - DNA, 189 bp, synthetic construct
  misc_feature 1..189: note = Description of Artificial Sequence: Synthetic polynucleotide
  source 1..189: mol_type = other DNA
yggtgaygatgtgtagagttttttggtatagattgtttatttygttttttttgtggaaatttatygtttggtttttttttygtttttttttttttttttagttagtygttttttttttttttygtatttttaatttttttggygttttaagttatagttygttygyggtgattttggttggagattgyg

SEQ ID NO: 1187-1188 - skipped (2 entries)

SEQ ID NO: 1189 - DNA, 13 bp, synthetic construct
  misc_feature 1..13: note = Description of Artificial Sequence: Synthetic oligonucleotide
  source 1..13: mol_type = other DNA
ygggggttgagyg

SEQ ID NO: 1190 - DNA, 51 bp, synthetic construct
  misc_feature 1..51: note = Description of Artificial Sequence: Synthetic oligonucleotide
  source 1..51: mol_type = other DNA
yggygtgtgtygtgygtggggtggggtgygggttgggyggtttygttttyg

SEQ ID NO: 1191 - DNA, 289 bp, synthetic construct
  misc_feature 1..289: note = Description of Artificial Sequence: Synthetic polynucleotide
  source 1..289: mol_type = other DNA
ygttygttygtatttygtttttttyggttttttttttaaattttaaaygtatygtygtgttttaaagaaggtgtttaygtygtttttagatttyggagygttttttttttattttygggattttttaggtygtttatttttttygtttttygtttagatttgagagggatygaaaatatattttygattygggtagttagggtygaaattgttaagaggagaaaaggtaaagyggaaggagggtggttataaatagatttttttgtttttttttaaaaggatattgtyg

SEQ ID NO: 1192 - skipped

SEQ ID NO: 1193 - DNA, 165 bp, synthetic construct
  misc_feature 1..165: note = Description of Artificial Sequence: Synthetic polynucleotide
  source 1..165: mol_type = other DNA
yggatttgttttygtagtygttgyggatttttyggtygttatggygattgtgaaatgtggggtggggygtatgygttggaagttattygygygggtagtttttgagtgtttttttaygtgttttttagygygagtagtattttygtttttgygttttttagagyg

SEQ ID NO: 1194 - DNA, 21 bp, synthetic construct
  misc_feature 1..21: note = Description of Artificial Sequence: Synthetic oligonucleotide
  source 1..21: mol_type = other DNA
ygtygtttttgtattatttyg

SEQ ID NO: 1195-1197 - skipped (3 entries)

SEQ ID NO: 1198 - DNA, 159 bp, synthetic construct
  misc_feature 1..159: note = Description of Artificial Sequence: Synthetic polynucleotide
  source 1..159: mol_type = other DNA
yggttgygttggtygtattgtttttttataatatgagtagygtyggyggygatygtttgggtygyggtaagtyggttygttgyggttttatttttttygtgggtygygtgtatygttggatggtggatagtygygtggygttgygtatttaygagtayg

SEQ ID NO: 1199 - skipped

SEQ ID NO: 1200 - DNA, 129 bp, synthetic construct
  misc_feature 1..129: note = Description of Artificial Sequence: Synthetic polynucleotide
  source 1..129: mol_type = other DNA
yggggggyggaatttagagaggtaaagtgattygtttttaaatygtaatattaggaggatagtagggttagatggaatttttyggtttatagttttygatttygggtaagtgttttattygggygtayg

SEQ ID NO: 1201 - skipped

SEQ ID NO: 1202 - DNA, 120 bp, synthetic construct
  misc_feature 1..120: note = Description of Artificial Sequence: Synthetic polynucleotide
  source 1..120: mol_type = other DNA
ygttggagatggygagtttygagattttttttattttttgtttttagagtaattttatggtattaaaaaaaaaaaaaaaaaaaaaaaaaaaaaaaaaaaaaaaaaaagaaggagaaggyg

SEQ ID NO: 1203 - skipped

SEQ ID NO: 1204 - DNA, 171 bp, synthetic construct
  misc_feature 1..171: note = Description of Artificial Sequence: Synthetic polynucleotide
  source 1..171: mol_type = other DNA
ygyggaygttgaygattttttttaygttygataagttttygttttygtygtatygttggyggttaatygggygttgygaggatttaaattagagagttygggatattattgtgggggttggaggtygttttttaatttgggtttagtattaataggtgtagtagtygagyg

SEQ ID NO: 1205-1207 - skipped (3 entries)

SEQ ID NO: 1208 - DNA, 64 bp, synthetic construct
  misc_feature 1..64: note = Description of Artificial Sequence: Synthetic oligonucleotide
  source 1..64: mol_type = other DNA
yggtaggtgagyggygyggttgtaggtgagtagtagtttyggttygygygtttagtttttttyg

SEQ ID NO: 1209-1212 - skipped (4 entries)

SEQ ID NO: 1213 - DNA, 16 bp, synthetic construct
  misc_feature 1..16: note = Description of Artificial Sequence: Synthetic oligonucleotide
  source 1..16: mol_type = other DNA
ygtttygtagggttyg

SEQ ID NO: 1214-1216 - skipped (3 entries)

SEQ ID NO: 1217 - DNA, 18 bp, synthetic construct
  misc_feature 1..18: note = Description of Artificial Sequence: Synthetic oligonucleotide
  source 1..18: mol_type = other DNA
ygtattttttyggtygyg

SEQ ID NO: 1218 - DNA, 118 bp, synthetic construct
  misc_feature 1..118: note = Description of Artificial Sequence: Synthetic polynucleotide
  source 1..118: mol_type = other DNA
ygggyggatgggggttatygaggyggttygtttttaggygtatatttygtatatttttttgttaagtgaaggggttaaaatgtatagatgggggagtttatttaggaatagaggygyg

SEQ ID NO: 1219-1223 - skipped (5 entries)

SEQ ID NO: 1224 - DNA, 22 bp, synthetic construct
  misc_feature 1..22: note = Description of Artificial Sequence: Synthetic oligonucleotide
  source 1..22: mol_type = other DNA
ygygtygttttagaggagttyg

SEQ ID NO: 1225 - DNA, 112 bp, synthetic construct
  misc_feature 1..112: note = Description of Artificial Sequence: Synthetic polynucleotide
  source 1..112: mol_type = other DNA
ygggagygtaygagtgtgtgtgtgtgtgtgtgtgttygyggtgtgttygyggttyggtgtataygygygygggttgtaaagttaggagttgygggagygtttttttgtttyg

SEQ ID NO: 1226 - DNA, 109 bp, synthetic construct
  misc_feature 1..109: note = Description of Artificial Sequence: Synthetic polynucleotide
  source 1..109: mol_type = other DNA
ygttttgtttgggttgggtttatttaygttttgggtggggtttaggaattgygtgygggygtagygggtgagtatgttgatgatgattatttggttttatttttttayg

SEQ ID NO: 1227-1229 - skipped (3 entries)

SEQ ID NO: 1230 - DNA, 431 bp, synthetic construct
  misc_feature 1..431: note = Description of Artificial Sequence: Synthetic polynucleotide
  source 1..431: mol_type = other DNA
ygagggggttttgggatygagyggtttygtagyggygatagaaatatatattttaygaaaaagaaaaaaaaaaaaaygagtygygygaattygttaagttagatgtgygyggtttgaagyggaggaggttttgaygttagttttatttygygtagttyggtttggtygtagattygtyggttattygtyggyggtttaggtygggaggggttaggatagtttyggtygygyggtggayggaggggttattttttygggygttagtaaataaattttattygagttaatatygtttagygaayggtgtttttttttagttattygagaaygagaggtatttttaattagaaattaattaatgagtagttgttttttttygttttattgtaattattygttttaattataaatgagatttatgaaaggatayg

SEQ ID NO: 1231 - skipped

SEQ ID NO: 1232 - DNA, 40 bp, synthetic construct
  misc_feature 1..40: note = Description of Artificial Sequence: Synthetic oligonucleotide
  source 1..40: mol_type = other DNA
ygtygygtttygttgtagtttygttggagagatggggayg

SEQ ID NO: 1233 - skipped

SEQ ID NO: 1234 - DNA, 22 bp, synthetic construct
  misc_feature 1..22: note = Description of Artificial Sequence: Synthetic oligonucleotide
  source 1..22: mol_type = other DNA
ygttagtaggtttagggttayg

SEQ ID NO: 1235 - skipped

SEQ ID NO: 1236 - DNA, 47 bp, synthetic construct
  misc_feature 1..47: note = Description of Artificial Sequence: Synthetic oligonucleotide
  source 1..47: mol_type = other DNA
ygggtattttgtattgtaygtagtatatgttgtggttttttagttyg

SEQ ID NO: 1237 - DNA, 24 bp, synthetic construct
  misc_feature 1..24: note = Description of Artificial Sequence: Synthetic oligonucleotide
  source 1..24: mol_type = other DNA
ygtygttgggggatttttggtayg

SEQ ID NO: 1238 - skipped

SEQ ID NO: 1239 - DNA, 45 bp, synthetic construct
  misc_feature 1..45: note = Description of Artificial Sequence: Synthetic oligonucleotide
  source 1..45: mol_type = other DNA
ygggattttaggtttatttagtaagttaattggttgaggttttyg

SEQ ID NO: 1240 - skipped

SEQ ID NO: 1241 - DNA, 258 bp, synthetic construct
  misc_feature 1..258: note = Description of Artificial Sequence: Synthetic polynucleotide
  source 1..258: mol_type = other DNA
ygaagyggygggagtyggtgtagttttaatttttattgygtgttttaggtygttaattagttttgttygygtgtygttggttyggaggttgtygygttagtttttgygtgygtttgagygygttggagtatttgygaggttagggttgtygayggygagaggatattttgaggaatayggtgttttagtttygttttygtttttygttygagttggaggttggggygygttgagtygtagygtttggataagtgygyg

SEQ ID NO: 1242 - DNA, 45 bp, synthetic construct
  misc_feature 1..45: note = Description of Artificial Sequence: Synthetic oligonucleotide
  source 1..45: mol_type = other DNA
ygttttggyggtttygagggatttgggttygggtttgyggtygyg

SEQ ID NO: 1243-1244 - skipped (2 entries)

SEQ ID NO: 1245 - DNA, 67 bp, synthetic construct
  misc_feature 1..67: note = Description of Artificial Sequence: Synthetic oligonucleotide
  source 1..67: mol_type = other DNA
yggggygttaatagtttaggatttgggttgtaggttggtttttgtattaattagyggggyggtttyg

SEQ ID NO: 1246 - DNA, 43 bp, synthetic construct
  misc_feature 1..43: note = Description of Artificial Sequence: Synthetic oligonucleotide
  source 1..43: mol_type = other DNA
yggttgattygtagyggtagyggtagtagygaggattygagyg

SEQ ID NO: 1247-1248 - skipped (2 entries)

SEQ ID NO: 1249 - DNA, 113 bp, synthetic construct
  misc_feature 1..113: note = Description of Artificial Sequence: Synthetic polynucleotide
  source 1..113: mol_type = other DNA
ygtgtgtttagttgaatttagtatatttttttygtatttttygtttttttttttttttttttgaatttgtttttttgttttgygggtttttaatttttttygaatttygggyg

SEQ ID NO: 1250-1251 - skipped (2 entries)

SEQ ID NO: 1252 - DNA, 84 bp, synthetic construct
  misc_feature 1..84: note = Description of Artificial Sequence: Synthetic oligonucleotide
  source 1..84: mol_type = other DNA
ygttgygygtygttttygyggagtygagyggyggtggttgyggaagygattggggttgygyggatattagygttttagagttyg

SEQ ID NO: 1253 - skipped

SEQ ID NO: 1254 - DNA, 48 bp, synthetic construct
  misc_feature 1..48: note = Description of Artificial Sequence: Synthetic oligonucleotide
  source 1..48: mol_type = other DNA
ygygttttattttgtagyggtggttttggaattagattttgatttgyg

SEQ ID NO: 1255 - DNA, 228 bp, synthetic construct
  misc_feature 1..228: note = Description of Artificial Sequence: Synthetic polynucleotide
  source 1..228: mol_type = other DNA
ygggtygygygtttatttgygttttygtygtygaaggagtttatgtaygggaagtagatggygagygtttygaaggaggyggatagattgaggyggttttgygagygttttatgttygygtyggygtygggygtttyggtygyggyggyggyggyggyggygggyggtttgggtagtttggtygttttatttttgaygyggagtayggygygyggygtggtggyggyg

SEQ ID NO: 1256 - DNA, 47 bp, synthetic construct
  misc_feature 1..47: note = Description of Artificial Sequence: Synthetic oligonucleotide
  source 1..47: mol_type = other DNA
ygtattttggtygtaataagygygttttaygtygttaygtattagyg

SEQ ID NO: 1257 - DNA, 185 bp, synthetic construct
  misc_feature 1..185: note = Description of Artificial Sequence: Synthetic polynucleotide
  source 1..185: mol_type = other DNA
ygygtagggggygggttttatttttttttygttttygtttyggttttaagtygyggaggygttyggtgggatttygttgttgtttaattaggggggatygggtgagtttttttttttggagtygggttttattagygtygtaggtttataggtygggggtgggggttttggatygaggggyggyg

SEQ ID NO: 1258 - DNA, 216 bp, synthetic construct
  misc_feature 1..216: note = Description of Artificial Sequence: Synthetic polynucleotide
  source 1..216: mol_type = other DNA
ygggggygttaatttygggagtaggaggtygggttttagtygtygggttttgygygtttgttttttgyggygyggtyggtatttgtagttggggtggtygygtaagtgttgtaygygtagtygttyggttttttttaygaagggtygttttttygtygygtttagttttttttaygttttgtttgygggtygtgggygttagtgagtggaaygtyg

SEQ ID NO: 1259 - DNA, 344 bp, synthetic construct
  misc_feature 1..344: note = Description of Artificial Sequence: Synthetic polynucleotide
  source 1..344: mol_type = other DNA
ygtggtttygtgtttyggggygygttttagtttyggtattattagtttttygtttttttyggaggggygttygagtgygttygatayggttagtagygtygyggygagtagtagtagygtgggtattggtttaaagtttygagatttyggagttygtttygygttttttatgtygttgtttagtttgygtttttygaatttttygggtatagttygttgtattggagttttaggagatatygttygtagtagygtayggagygagggatttttagttygggtygggagagtaaagtttygttggtttgttttggattgttaaaattaataatttttattattyg

SEQ ID NO: 1260 - DNA, 28 bp, synthetic construct
  misc_feature 1..28: note = Description of Artificial Sequence: Synthetic oligonucleotide
  source 1..28: mol_type = other DNA
ygttttgtttggtagttaggtygagayg

SEQ ID NO: 1261 - DNA, 124 bp, synthetic construct
  misc_feature 1..124: note = Description of Artificial Sequence: Synthetic polynucleotide
  source 1..124: mol_type = other DNA
ygtggggygttggatttatygagaggttagygtygtygtygggggagggygtgtttygtaygtgtgtgttygygygtgttygygttygygtgtgttagygygygtgttttggtygtgygygtyg

SEQ ID NO: 1262 - DNA, 80 bp, synthetic construct
  misc_feature 1..80: note = Description of Artificial Sequence: Synthetic oligonucleotide
  source 1..80: mol_type = other DNA
ygttygttagggttaygaagagygtaaygaaygttagtagtayggygtttayggtgagygttygygtygtttgtatttyg

SEQ ID NO: 1263 - DNA, 62 bp, synthetic construct
  misc_feature 1..62: note = Description of Artificial Sequence: Synthetic oligonucleotide
  source 1..62: mol_type = other DNA
yggataggtttygtagtgagtaggtaagggtygtttygtygyggttgtttttttaygtttyg

SEQ ID NO: 1264 - DNA, 165 bp, synthetic construct
  misc_feature 1..165: note = Description of Artificial Sequence: Synthetic polynucleotide
  source 1..165: mol_type = other DNA
ygatygtatgygtygatttgtygttgggygttygtttttttttgttggggttgggygyggtttyggagtttggyggyggtggtgagggygtayggttagttgtagyggygttgtgtttgtygtggatttaggatattttaggtttggtggyggggttaggtggyg

SEQ ID NO: 1265 - DNA, 43 bp, synthetic construct
  misc_feature 1..43: note = Description of Artificial Sequence: Synthetic oligonucleotide
  source 1..43: mol_type = other DNA
ygtttttgtgtttttggtggtttyggygttttttyggagygyg

SEQ ID NO: 1266 - DNA, 86 bp, synthetic construct
  misc_feature 1..86: note = Description of Artificial Sequence: Synthetic oligonucleotide
  source 1..86: mol_type = other DNA
ygtygtygttttygtygggagttaagttygtygggtyggttyggttttaggtgggtagttyggtttgtagttggttggaggtggyg

SEQ ID NO: 1267 - DNA, 23 bp, synthetic construct
  misc_feature 1..23: note = Description of Artificial Sequence: Synthetic oligonucleotide
  source 1..23: mol_type = other DNA
ygagttygtgggataagggggyg

SEQ ID NO: 1268 - skipped

SEQ ID NO: 1269 - DNA, 99 bp, synthetic construct
  misc_feature 1..99: note = Description of Artificial Sequence: Synthetic oligonucleotide
  source 1..99: mol_type = other DNA
ygyggttatgtaattggtggatttttttaaatygttttggaggggggagygyggygttgggggygggagagygtttttggttgtgagttgtttttgtyg

SEQ ID NO: 1270 - DNA, 73 bp, synthetic construct
  misc_feature 1..73: note = Description of Artificial Sequence: Synthetic oligonucleotide
  source 1..73: mol_type = other DNA
ygtggaattygtgagttttaygtaaygtttttttgtygtttagggtgggtttttagaagtatagaaatggtyg

SEQ ID NO: 1271 - skipped

SEQ ID NO: 1272 - DNA, 52 bp, synthetic construct
  misc_feature 1..52: note = Description of Artificial Sequence: Synthetic oligonucleotide
  source 1..52: mol_type = other DNA
yggggygggtagggatygagttaggagagagygggygggggttttgggagyg

SEQ ID NO: 1273 - DNA, 50 bp, synthetic construct
  misc_feature 1..50: note = Description of Artificial Sequence: Synthetic oligonucleotide
  source 1..50: mol_type = other DNA
ygygagtaggagggygtattttatggttaggtgyggaygyggyggttgyg

SEQ ID NO: 1274 - DNA, 50 bp, synthetic construct
  misc_feature 1..50: note = Description of Artificial Sequence: Synthetic oligonucleotide
  source 1..50: mol_type = other DNA
ygggtyggggtattataggygygggaatttaygtgtggattttgygttyg

SEQ ID NO: 1275-1276 - skipped (2 entries)

SEQ ID NO: 1277 - DNA, 52 bp, synthetic construct
  misc_feature 1..52: note = Description of Artificial Sequence: Synthetic oligonucleotide
  source 1..52: mol_type = other DNA
yggggtagygtaggagtaggtaggggttygyggttygygtgggttttaggyg

SEQ ID NO: 1278-1280 - skipped (3 entries)

SEQ ID NO: 1281 - DNA, 138 bp, synthetic construct
  misc_feature 1..138: note = Description of Artificial Sequence: Synthetic polynucleotide
  source 1..138: mol_type = other DNA
ygagtggtagtagtaggagyggggtgaygaataagattaygaaggatttgaatttggagatatagtttagygtygaggttatygygygggagggagattggygggygagaygagtgaggggtagttagaggygtygyg

SEQ ID NO: 1282-1284 - skipped (3 entries)

SEQ ID NO: 1285 - DNA, 1017 bp, synthetic construct
  misc_feature 1..1017: note = Description of Artificial Sequence: Synthetic polynucleotide
  source 1..1017: mol_type = other DNA
cggcgatttcggttttcgtaaggtggggcggcgagtaggagtcggggttaggttaggggttcgagttttcgttcgaggggcggggaaggcgggtgacgtgagtcgggtcgggcgggcggagttgggatcggtttcgggaggcgggggcgagcgcgcggagaggtagacgcgaggagggaggcggttgagtagcgcgggcggttttgcggcgggcgcggtgggcgcgggcggcggggtttcgggattttcgcgcgtttttttcgcgcggcgtcgtcgtcgcgcgtttttacgtttcgcgttttacggcgttttcgtttcgcgcgtttttcgtgttcgttttttgttagttttcgggtcgcggtcgtttgtagagcgagcgtttagacggagttttcgggtaatttgagtggcgtcgatcggcggcggagtttttggtagagtttttcgattcggtagcgcggaggggattcgcgttcgttcgcgtcgcgttattttaaattttaagtagcgtcgttttatcggcgcggagtttcggttggaggtaagagtcgcgcgtcgggagatacgtatcgtgagcggtagcgtcgtcggttttttttttcgtcgtttcggagggcgaagtcgcggttttttagttttttgttgcgtcgcgatagcgtcggaatacgtttcgtttcgttgtcgttttcgttgtgtcgtcggcggagggggtcgcgagtttcgcgtttcggtcggaggatgtgcgttttcgcgggtcgtttagtttgagttatgcgttttaacggcggcggcgcgtcggtcggtatggagtttcgcgcggtcgcgttttgattcgttgtgcgtttcgcggtcggcgggcggcgggaggcggcggatcgagagtcggagatcggcgtcgcgggacggaagcgagcgggcgcgggcgtcgcgtagatggtttgggcgagttaggtttgaggtttcgtttttcgaaacgtgattatgtggatttaatagtttttaggatttaggtgagcg

SEQ ID NO: 1286 - DNA, 166 bp, synthetic construct
  misc_feature 1..166: note = Description of Artificial Sequence: Synthetic polynucleotide
  source 1..166: mol_type = other DNA
cgttcggagcgcgggcggggttagtttgggtagtcgcgggtcgttgttgcgtcggaagttttcgtcgttagggagttttttgggcgttaggttttgggtttttgggcgaagtcgacgttagaatatgtttggtttcgtatttagtttatcgtatttttagcgcgcg

SEQ ID NO: 1287-1292 - skipped (6 entries)

SEQ ID NO: 1293 - DNA, 14 bp, synthetic construct
  misc_feature 1..14: note = Description of Artificial Sequence: Synthetic oligonucleotide
  source 1..14: mol_type = other DNA
cgcgttttagcgcg

SEQ ID NO: 1294-1296 - skipped (3 entries)

SEQ ID NO: 1297 - DNA, 125 bp, synthetic construct
  misc_feature 1..125: note = Description of Artificial Sequence: Synthetic polynucleotide
  source 1..125: mol_type = other DNA
cggttttatttatttgtttcgaagagtggttttagttttgcgtttttttttgcgattttatatatagggatagttttaggtatagttttagtagtaggagtatggcggggcgagggcgcgggacg

SEQ ID NO: 1298 - skipped

SEQ ID NO: 1299 - DNA, 131 bp, synthetic construct
  misc_feature 1..131: note = Description of Artificial Sequence: Synthetic polynucleotide
  source 1..131: mol_type = other DNA
cggggtgtgaagtggcggcgggtagaggggttcgtaggggttgggattcgcgtgtttttttttgtttcggtgcggagtacgatgtgttcgggcgggggcgaggacgttcgggaggggttgggttgcgtacg

SEQ ID NO: 1300 - DNA, 94 bp, synthetic construct
  misc_feature 1..94: note = Description of Artificial Sequence: Synthetic oligonucleotide
  source 1..94: mol_type = other DNA
cgggtttgttttcggtttcgttcggagggtgtgcgggttttcgtttcgttggtttcgtttgtttattacggcgcgtttaaatttacgcggttcg

SEQ ID NO: 1301-1302 - skipped (2 entries)

SEQ ID NO: 1303 - DNA, 27 bp, synthetic construct
  misc_feature 1..27: note = Description of Artificial Sequence: Synthetic oligonucleotide
  source 1..27: mol_type = other DNA
cgcgatggggaggggaatatttgcgcg

SEQ ID NO: 1304 - DNA, 164 bp, synthetic construct
  misc_feature 1..164: note = Description of Artificial Sequence: Synthetic polynucleotide
  source 1..164: mol_type = other DNA
cgagattagaggggaaattcgaaaaagtaagtttttgcggtagtagttaggaaatattcgttaggaattggttgcgattttaattttagcggttcgaagttttagtttttttatttttatcgcggtagagtcgttttcgtagatatttttcgaggagaatcgcg

SEQ ID NO: 1305-1306 - skipped (2 entries)

SEQ ID NO: 1307 - DNA, 68 bp, synthetic construct
  misc_feature 1..68: note = Description of Artificial Sequence: Synthetic oligonucleotide
  source 1..68: mol_type = other DNA
cgttgggttcgtcgaggtcggggtttttttatgggagggaggtggttgcggcggaatttttagatgcg

SEQ ID NO: 1308 - DNA, 508 bp, synthetic construct
  misc_feature 1..508: note = Description of Artificial Sequence: Synthetic polynucleotide
  source 1..508: mol_type = other DNA
cggcggtagcgggagttcgagcgttgcgcgtttattatggtcgtttagggagagttcggttatttggcggcgtagtcggatttcggttttaatagcgagcgtagtatcgattttttagtgttcggtttcgaggacgatttggtcgtcggggcgattttgtatagttcggagtggagcgaggagcgttttcgcgtggataggaagaaatttgaggttatgttataaggtaggtatttttcgtgttttcggatttttcgattgagtttttaattttttttcggatatttttatcgcgcgtttcggcgttcgttattttagtttacggtcggtcggtttagttttaggttcgttttttcgcggagtcggaggatatttagggattggagatttcgcgggattttttatttttttacgttttttagatttttaggcgttgggggttttgtgcgaatttgattggttttagaaaagtcgaaggtcgagtttgtattggcgcgtttaagttgcg

SEQ ID NO: 1309-1318 - skipped (10 entries)

SEQ ID NO: 1319 - DNA, 396 bp, synthetic construct
  misc_feature 1..396: note = Description of Artificial Sequence: Synthetic polynucleotide
  source 1..396: mol_type = other DNA
tgaggacgaggaggaagaggaggaggaagaagaagaagaggaagaggaggaggaggaggaggaggacgcgtttaggttgagatggttcgcgtggatattgttatttattttaagattgttgttttcgtcgtcgtcgtcgtcgtcgttgttgtcgtcgtcgtcgtcgttattatttgttatagttagtaacgggtagtcggcgtaggggttcgggggagtttttttcgtcgttagcgttattttaaatatttattaatagttatattgttgttattgttgtcgtcgtcgtcgtcgtcgtggagcgcgggaggggggcggggaggcgtttgggttcggggcgttgtgcgcgatttggcggggtgcgtcgagatatatatagcgagtcgtcgtcgttcg

SEQ ID NO: 1320 - skipped

SEQ ID NO: 1321 - DNA, 70 bp, synthetic construct
  misc_feature 1..70: note = Description of Artificial Sequence: Synthetic oligonucleotide
  source 1..70: mol_type = other DNA
cgggtcgttatttgtttatttgttttatttaggatatttttttaaataatttttaagtggaaaaattacg

SEQ ID NO: 1322 - skipped

SEQ ID NO: 1323 - DNA, 68 bp, synthetic construct
  misc_feature 1..68: note = Description of Artificial Sequence: Synthetic oligonucleotide
  source 1..68: mol_type = other DNA
cgcgggggacgcggggcgcggcgcgttgagcgcgggtgtcgaggttggagggcgcggtcgggttttcg

SEQ ID NO: 1324 - DNA, 88 bp, synthetic construct
  misc_feature 1..88: note = Description of Artificial Sequence: Synthetic oligonucleotide
  source 1..88: mol_type = other DNA
cgagggtcggttcgtttttggggattcgcggatgtcgcgagggggcgtcgcgttattgaaggttgggacgggggcggtgcgcggggcg

SEQ ID NO: 1325-1326 - skipped (2 entries)

SEQ ID NO: 1327 - DNA, 87 bp, synthetic construct
  misc_feature 1..87: note = Description of Artificial Sequence: Synthetic oligonucleotide
  source 1..87: mol_type = other DNA
cgagttgtttcgtttttttattttgggggcgaagaagggtcggggagtgggggaaagcgggaggcgtcgcggtttgggaggttttcg

SEQ ID NO: 1328 - DNA, 45 bp, synthetic construct
  misc_feature 1..45: note = Description of Artificial Sequence: Synthetic oligonucleotide
  source 1..45: mol_type = other DNA
cgagtttttgcgttgtttttgtcgtcggagttcgggtttgttacg

SEQ ID NO: 1329 - skipped

SEQ ID NO: 1330 - DNA, 173 bp, synthetic construct
  misc_feature 1..173: note = Description of Artificial Sequence: Synthetic polynucleotide
  source 1..173: mol_type = other DNA
cggttggaatttttttaagtattgttttgagtttatttttaaatgaaagggggaaaaatttaaattagattagaatttgaaatagttgaaatagttatcgatttttagtttgtttttaagtttggtagagattgtgaaagttttaattttttcgcgatgttagttacggttcg

SEQ ID NO: 1331 - skipped

SEQ ID NO: 1332 - DNA, 48 bp, synthetic construct
  misc_feature 1..48: note = Description of Artificial Sequence: Synthetic oligonucleotide
  source 1..48: mol_type = other DNA
cgaagacgagacgtagagttttaattgtagttagagataaaggtttcg

SEQ ID NO: 1333-1334 - skipped (2 entries)

SEQ ID NO: 1335 - DNA, 36 bp, synthetic construct
  misc_feature 1..36: note = Description of Artificial Sequence: Synthetic oligonucleotide
  source 1..36: mol_type = other DNA
cgatcgtggcgttagtttttcgttttttttgtttcg

SEQ ID NO: 1336-1340 - skipped (5 entries)

SEQ ID NO: 1341 - DNA, 97 bp, synthetic construct
  misc_feature 1..97: note = Description of Artificial Sequence: Synthetic oligonucleotide
  source 1..97: mol_type = other DNA
cgtttgtaaggacgggagtcggggagggtgtagggcgagtttaaaggacgggtagagtaagtttcgggaagaggtaggggttttttttttcgggtcg

SEQ ID NO: 1342-1343 - skipped (2 entries)

SEQ ID NO: 1344 - DNA, 67 bp, synthetic construct
  misc_feature 1..67: note = Description of Artificial Sequence: Synthetic oligonucleotide
  source 1..67: mol_type = other DNA
cgttagatttttatagttttttatacgttatttttattgttttagggaattataagtataggtatcg

SEQ ID NO: 1345 - skipped

SEQ ID NO: 1346 - DNA, 29 bp, synthetic construct
  misc_feature 1..29: note = Description of Artificial Sequence: Synthetic oligonucleotide
  source 1..29: mol_type = other DNA
cgatagggtagagggttagtagttattcg

SEQ ID NO: 1347 - DNA, 49 bp, synthetic construct
  misc_feature 1..49: note = Description of Artificial Sequence: Synthetic oligonucleotide
  source 1..49: mol_type = other DNA
cggtcgagtttaagtggttgaagcgcggacgaggatgcgcggggtttcg

SEQ ID NO: 1348 - DNA, 188 bp, synthetic construct
  misc_feature 1..188: note = Description of Artificial Sequence: Synthetic polynucleotide
  source 1..188: mol_type = other DNA
cgggagttcgaagtcgtttcgagcgggggtgggcggtgagcggattttcgggtgttgattaggtgtttggtggtagagtagggaaggggggaacggacgtcgattttagggattttttattcgtttacgttttttggcgttggttatacgtcgtcgttttagtattaattggaggtttttagtggacg

SEQ ID NO: 1349-1350 - skipped (2 entries)

SEQ ID NO: 1351 - DNA, 113 bp, synthetic construct
  misc_feature 1..113: note = Description of Artificial Sequence: Synthetic polynucleotide
  source 1..113: mol_type = other DNA
cggtcgtgggcggttgcggcgcggtcgcggcgaggggcgagcggggttggtttcgtcgttcgggcgagagtatttttttgggggttaattttgcggtttcgtttttattcgcg

SEQ ID NO: 1352 - DNA, 208 bp, synthetic construct
  misc_feature 1..208: note = Description of Artificial Sequence: Synthetic polynucleotide
  source 1..208: mol_type = other DNA
cggcggatggagacgggagggaggttgcgaggtcgttcgaggagagattaaggttttagaaacggagaagcgggcgttttgcgggaggcggcggcgttgtcgttggtcgttaagggcgggaagtgttttgggatttttattaggggtcgcgagtttcgagcgttaaattttcgcggcgttcgtttagcgcgttgttgtggcgggcgcg

SEQ ID NO: 1353 - DNA, 96 bp, synthetic construct
  misc_feature 1..96: note = Description of Artificial Sequence: Synthetic oligonucleotide
  source 1..96: mol_type = other DNA
cggttcgttcgttttttagtagttttggggtgttcggggcggttttgtaagcgggagagagcggcgaggcggcggcgtcgagtgcggggggatgcg

SEQ ID NO: 1354 - DNA, 236 bp, synthetic construct
  misc_feature 1..236: note = Description of Artificial Sequence: Synthetic polynucleotide
  source 1..236: mol_type = other DNA
cggtgagtattcgtcgtggggaagggttttggggatttattggaggtcgcggttcgtagtagttaggggtcgagttacggttacggacgttttggtgtttcggttcgtgtcgggtttttaggcggaggaggcgttcgttgggtttagattttcgattttagtttcggtttttcggcgtttgggttgcgcggagtttttgtttcgcgtttcggatttttacgcgtagtttttacgcg

SEQ ID NO: 1355 - DNA, 211 bp, synthetic construct
  misc_feature 1..211: note = Description of Artificial Sequence: Synthetic polynucleotide
  source 1..211: mol_type = other DNA
cgtttttagtcgtgttttggttgcgtagttggaaaggttgagtagtttattgttgtttttttgttcggttttggatatatcgtttgaatttttgggcgtttttgttgttaagtgggggatagtattatttattggggaggaaaattttaggaatgtggattttggggttacgtaggggttgggaagtgaagggtagggaacgcgggcggcg

SEQ ID NO: 1356 - DNA, 193 bp, synthetic construct
  misc_feature 1..193: note = Description of Artificial Sequence: Synthetic polynucleotide
  source 1..193: mol_type = other DNA
cgcgcgtcgaagttgtgacggtttattaagtagagatttgcgaggtatatagagagggaatgaggcggaatcgttcgggggttcgttgatattgtagagtttttcgtagtatcgttgttttaaatttcgtttttttaggcgtgcgcgtatagcgagttagaggaggtttcgtttcgatttggggtttttcgcg

SEQ ID NO: 1357 - skipped

SEQ ID NO: 1358 - DNA, 199 bp, synthetic construct
  misc_feature 1..199: note = Description of Artificial Sequence: Synthetic polynucleotide
  source 1..199: mol_type = other DNA
cgagtaggaggatttaacgaatttagtttgtggatatgttttaatttttattttcgttttttttaggtttgtttaggtgaggatgatgggagggaaaagcggtgtatagtcgtaatattggtattttgtaagagtcgtcggggtattgatatagagggatatcgtattggagatgcggtgtttacggagatttattgcg

SEQ ID NO: 1359 - DNA, 87 bp, synthetic construct
  misc_feature 1..87: note = Description of Artificial Sequence: Synthetic oligonucleotide
  source 1..87: mol_type = other DNA
cggttagtagaggcggcgtttggttttggatgttgtagcggagacgttaaggagattgaatgtagggagcgaggcgtagcggtcgcg

SEQ ID NO: 1360 - DNA, 68 bp, synthetic construct
  misc_feature 1..68: note = Description of Artificial Sequence: Synthetic oligonucleotide
  source 1..68: mol_type = other DNA
cgcgcgagagtgtttagttgggaaatgtagtttcgaattaatatcgtatgttttataattagtttacg

SEQ ID NO: 1361 - DNA, 61 bp, synthetic construct
  misc_feature 1..61: note = Description of Artificial Sequence: Synthetic oligonucleotide
  source 1..61: mol_type = other DNA
cgtttttggtatttagggaatggtttgtaaattttaatgtattatagattagtttttatcg

SEQ ID NO: 1362 - DNA, 40 bp, synthetic construct
  misc_feature 1..40: note = Description of Artificial Sequence: Synthetic oligonucleotide
  source 1..40: mol_type = other DNA
cgggtgttttgtcgttgtcgtttttgttgtcgtcgattcg

SEQ ID NO: 1363 - DNA, 647 bp, synthetic construct
  misc_feature 1..647: note = Description of Artificial Sequence: Synthetic polynucleotide
  source 1..647: mol_type = other DNA
cgagcggcgaggcgagggcgagcgcgtcgaggaagggcgggagaggcgcggagtttggtcgcgtcgcgttgcgtcgagcgtcgggtttttttcgcgagtttttcgggttcgcgcgcgcgttttttattgttttcgtttttcgcgcggcgcgtgttttttatttttcgtcgcgcgttttcgtattcgttcggttttacgcggcgcgcgtttgttttggcggtagcggcggcggcggcggcgcgttttttttcgaacgtcgtttttagggttgttggttgcgttttttattgtttcgcggttgttgttcggggtgggcggcgaggcgggggggaggtgtcggtttggtcgtcggggagggtttatcgttcgggcggatttttattgcgagagcgatgcgggtttaggcgcggcgcgcgggggttgtagggcgtttagtattgggggttgtcggcgcgcgggggtttttttttggtttttaggtattcgttgttgttgggcgtttttcgtattttcggttattatggatatttcgttttttcgtcgtttttttcgcgtatttcgggaggtcgtcggggcggtagtagcggcgcggtttcgcgggtgtttaggtgatcggttcggtagcggtagagtagtggtagtagtcg

SEQ ID NO: 1364 - DNA, 327 bp, synthetic construct
  misc_feature 1..327: note = Description of Artificial Sequence: Synthetic polynucleotide
  source 1..327: mol_type = other DNA
cgcggaggagggtcgggttgattgtcgtcgttgagttgttttcggacgggagcgtttgtttacggtatttattttttttagcggtggaaatgtggagaagtaagtgggaggcggtgtcgggaattgattttttttaaaacggtcggcgtcgttgttttgaaatgggcggttaagtgtttgtgggattaagggcggttttagagatgttcggaaaatcgttgttacggttagagtgcggcgtagacgcggtagagttggaggtgttcgcggtgtaggttgttgtttacgtcgtttaggttaggtgttgagggtttagttcgcgtttcg

SEQ ID NO: 1365 - skipped

SEQ ID NO: 1366 - DNA, 324 bp, synthetic construct
  misc_feature 1..324: note = Description of Artificial Sequence: Synthetic polynucleotide
  source 1..324: mol_type = other DNA
cgtagttgttgtagtcgttgcggttgtcgttatttggtaggaggtatagggtatgggtgagggaggttgcggtagcggttacgagttgttgaggaagttagattgtaggtatttggggggcgttaggtagtcgtagtcgtcggtttcggcgttcgttacgtcgtattcgtttgcggcgttttcggtttcgaagagttttttgtcgggttggaagtgcgcgggcggcggtcggaagggtttttttatgcggcggcggcgtcggtagttgtttttttcgaatatgttttcgtaggtcgggtttagcgtttagtagttgtttttgcg

SEQ ID NO: 1367 - DNA, 77 bp, synthetic construct
  misc_feature 1..77: note = Description of Artificial Sequence: Synthetic oligonucleotide
  source 1..77: mol_type = other DNA
cggcgtagcggcgggaattcgaggtcgagcgtcgcggcggtagcgttagaagcgtatttatcgggtacggcgaggcg

SEQ ID NO: 1368 - DNA, 158 bp, synthetic construct
  misc_feature 1..158: note = Description of Artificial Sequence: Synthetic polynucleotide
  source 1..158: mol_type = other DNA
cgttttggattttcgaagttagttttttgcgtagcggattagagaggtttattcgcggacgttaatttaatttttgggcggggttcgggggttgagtagaaggcgaggtttggggagtacggataattttgagggttgtttgtgtcggggtgggagcg

SEQ ID NO: 1369 - DNA, 79 bp, synthetic construct
  misc_feature 1..79: note = Description of Artificial Sequence: Synthetic oligonucleotide
  source 1..79: mol_type = other DNA
cgtttttaaaaattaaataaattaataagagaattaattaataggtagcgttgcgatcgttaggagcgcggagcgcgcg

SEQ ID NO: 1370 - DNA, 137 bp, synthetic construct
  misc_feature 1..137: note = Description of Artificial Sequence: Synthetic polynucleotide
  source 1..137: mol_type = other DNA
cgttttttttgatttttaaggttagaaagatttattatttttttcgagagggcgtagttatagatttattagagagggcgggtagggtgtcggaagttagagaacggcgtttcgcgtttttttatcgttttagggcg

SEQ ID NO: 1371 - DNA, 112 bp, synthetic construct
  misc_feature 1..112: note = Description of Artificial Sequence: Synthetic polynucleotide
  source 1..112: mol_type = other DNA
cgcgggttatgtattgttgttggtgtttattatgtttaattttttggattataagtggtataaggagtcgttgtagtagtgtaatttcgatgggtcgttgggtgtcgtagcg

SEQ ID NO: 1372-1373 - skipped (2 entries)

SEQ ID NO: 1374 - DNA, 282 bp, synthetic construct
  misc_feature 1..282: note = Description of Artificial Sequence: Synthetic polynucleotide
  source 1..282: mol_type = other DNA
cgtgggtagggcgtcgtagtttgcgtagtttcgaggatttcgcgtcgttttttcgagttagggtttttaggagcgggtcgcgtaggagacgttagagggggttgttagcggttgttgggagaacgggttacggaaatagttttttttaaagtcggggttatcgtggggtgggcgagttcgtttttttaggtcgggggcgcggattagaggggacgtgtgtagacggtcgcggttagttttatttcgttcgggcggagacgtatagttggagttggagggtcg

SEQ ID NO: 1375 - DNA, 81 bp, synthetic construct
  misc_feature 1..81: note = Description of Artificial Sequence: Synthetic oligonucleotide
  source 1..81: mol_type = other DNA
cggttgttaattcgtttaatttgttgcgcgggtggtcgtttagagtcgcgggtttgcggggcgtttttcgtcgtcgcgtcg

SEQ ID NO: 1376 - DNA, 53 bp, synthetic construct
  misc_feature 1..53: note = Description of Artificial Sequence: Synthetic oligonucleotide
  source 1..53: mol_type = other DNA
cggtcgtggagattttaatcgagtttacgttggcgtaaaaggtaaaagtcgcg

SEQ ID NO: 1377 - DNA, 40 bp, synthetic construct
  misc_feature 1..40: note = Description of Artificial Sequence: Synthetic oligonucleotide
  source 1..40: mol_type = other DNA
cgcgtcgagggggcgttagcggggacgtgagttggcgtcg

SEQ ID NO: 1378 - DNA, 206 bp, synthetic construct
  misc_feature 1..206: note = Description of Artificial Sequence: Synthetic polynucleotide
  source 1..206: mol_type = other DNA
cggtagtttgagcgtttcggatggttcgcggcggggcggtttgtaagagcgacgcgcggttgttgttggggcgggacgcgttgcggtcggcgttcgttttgttggttttcgtcgtgttgttgggcgtcgcgttcggtttcggtttcggtttttggtttggttgtcgcgcgggtcgttagcgtacgcgatattaggtgggtcggtcg

SEQ ID NO: 1379 - DNA, 38 bp, synthetic construct
  misc_feature 1..38: note = Description of Artificial Sequence: Synthetic oligonucleotide
  source 1..38: mol_type = other DNA
cgagggtacggcggtcgtcgtttcgcgtagtagtagcg

SEQ ID NO: 1380 - skipped

SEQ ID NO: 1381 - DNA, 25 bp, synthetic construct
  misc_feature 1..25: note = Description of Artificial Sequence: Synthetic oligonucleotide
  source 1..25: mol_type = other DNA
cgagcgaatgtaacgcgtatatacg

SEQ ID NO: 1382 - DNA, 79 bp, synthetic construct
  misc_feature 1..79: note = Description of Artificial Sequence: Synthetic oligonucleotide
  source 1..79: mol_type = other DNA
cgtttttttttttttttaaaaaaaaaatttaaataatttttaaataatatttaataggaaagaagaaggaaaaggagcg

SEQ ID NO: 1383 - DNA, 33 bp, synthetic construct
  misc_feature 1..33: note = Description of Artificial Sequence: Synthetic oligonucleotide
  source 1..33: mol_type = other DNA
cgagggtaacggtcgaggcgttacgcggggtcg

SEQ ID NO: 1384 - DNA, 132 bp, synthetic construct
  misc_feature 1..132: note = Description of Artificial Sequence: Synthetic polynucleotide
  source 1..132: mol_type = other DNA
cgtaggttaggcggtcgtgggtcgagttggttatgattattttttcgcgggcgttttgtttgggcgagtgtttttcgtagcgttcgtatttcgtttttttcgtgtgtagtttcgcgtcgtcgtcgttcgtcg

SEQ ID NO: 1385 - DNA, 32 bp, synthetic construct
  misc_feature 1..32: note = Description of Artificial Sequence: Synthetic oligonucleotide
  source 1..32: mol_type = other DNA
cgttttcggggtagaggagggggtgttaggcg

SEQ ID NO: 1386-1387 - skipped (2 entries)

SEQ ID NO: 1388 - DNA, 20 bp, synthetic construct
  misc_feature 1..20: note = Description of Artificial Sequence: Synthetic oligonucleotide
  source 1..20: mol_type = other DNA
cggcgtcgttggtatattcg

SEQ ID NO: 1389 - DNA, 85 bp, synthetic construct
  misc_feature 1..85: note = Description of Artificial Sequence: Synthetic oligonucleotide
  source 1..85: mol_type = other DNA
cggcgggcgtaggggtagggtatgattgacgcgttttttgtttgcgtttatgtgagagaaagcggtcgagggagggagcgtgtcg

SEQ ID NO: 1390 - DNA, 230 bp, synthetic construct
  misc_feature 1..230: note = Description of Artificial Sequence: Synthetic polynucleotide
  source 1..230: mol_type = other DNA
cgtaggggtcgagaaagtggcggagaggcggtggtcgaggtttaggggcgagcgcgggttgagttggtttttgttgcgtttacgagcgatatttattttttcgttgcggacgtttcgcgggcgttaggttgggggttttgcgatcgatttttttcgttttcgaggtatcgtcgggttcgtttggtaggtagcgcgtttcgcgagttggagggtcgagtttcgcggggtcg

SEQ ID NO: 1391 - DNA, 84 bp, synthetic construct
  misc_feature 1..84: note = Description of Artificial Sequence: Synthetic oligonucleotide
  source 1..84: mol_type = other DNA
cgtaagagttggttaaaatgtttttaggtgcgtgggggtttcggggttttagttggagttcgatattttgagattggcggttcg

SEQ ID NO: 1392 - DNA, 42 bp, synthetic construct
  misc_feature 1..42: note = Description of Artificial Sequence: Synthetic oligonucleotide
  source 1..42: mol_type = other DNA
cgcgcgagttttttcgtttggttgagttaaaaagggatcgcg

SEQ ID NO: 1393 - DNA, 45 bp, synthetic construct
  misc_feature 1..45: note = Description of Artificial Sequence: Synthetic oligonucleotide
  source 1..45: mol_type = other DNA
cggacgattttttttattttttcgaggacgaggaggagtacggcg

SEQ ID NO: 1394 - DNA, 26 bp, synthetic construct
  misc_feature 1..26: note = Description of Artificial Sequence: Synthetic oligonucleotide
  source 1..26: mol_type = other DNA
cgcgggataagggatgttggcgggcg

SEQ ID NO: 1395 - DNA, 50 bp, synthetic construct
  misc_feature 1..50: note = Description of Artificial Sequence: Synthetic oligonucleotide
  source 1..50: mol_type = other DNA
cgaggtttttttcgcggcgcgcggtagttttagtttttatttaaatttcg

SEQ ID NO: 1396 - DNA, 56 bp, synthetic construct
  misc_feature 1..56: note = Description of Artificial Sequence: Synthetic oligonucleotide
  source 1..56: mol_type = other DNA
cgttggtttattcgcgtgtacgtttattttttacgcgcgtttttggtttagaagcg

SEQ ID NO: 1397 - DNA, 44 bp, synthetic construct; identical to SEQ ID NO: 113
  misc_feature 1..44: note = Description of Artificial Sequence: Synthetic oligonucleotide
  source 1..44: mol_type = other DNA

SEQ ID NO: 1398-1399 - skipped (2 entries)

SEQ ID NO: 1400 - DNA, 58 bp, synthetic construct
  misc_feature 1..58: note = Description of Artificial Sequence: Synthetic oligonucleotide
  source 1..58: mol_type = other DNA
cgttcgtttattcgttaggtaggcggtggtgtcgatttatttgagtagttgtttcgcg

SEQ ID NO: 1401 - DNA, 151 bp, synthetic construct
  misc_feature 1..151: note = Description of Artificial Sequence: Synthetic polynucleotide
  source 1..151: mol_type = other DNA
cgtattggtttttttcgttttcgttcgtacgaaagttttgttcgacgtttgtagttagtatcgttcgtattgtttagggagggtttgcgtcgagatttagtggtcgagtgagttatagagtcgttggttttggggacgttgttttttatcg

SEQ ID NO: 1402 - DNA, 17 bp, synthetic construct
  misc_feature 1..17: note = Description of Artificial Sequence: Synthetic oligonucleotide
  source 1..17: mol_type = other DNA
cggttttggggagttcg

SEQ ID NO: 1403 - DNA, 70 bp, synthetic construct
  misc_feature 1..70: note = Description of Artificial Sequence: Synthetic oligonucleotide
  source 1..70: mol_type = other DNA
cgtagaggggttagtaattttatgggtggtggggttttttatttttggacgtagcggggagtagcgggcg

SEQ ID NO: 1404 - DNA, 59 bp, synthetic construct
  misc_feature 1..59: note = Description of Artificial Sequence: Synthetic oligonucleotide
  source 1..59: mol_type = other DNA
cggcgtttagcgtttaagcgttaattcgttgaaagttttttagcgaaattttagggacg

SEQ ID NO: 1405 - DNA, 25 bp, synthetic construct
  misc_feature 1..25: note = Description of Artificial Sequence: Synthetic oligonucleotide
  source 1..25: mol_type = other DNA
cggttcggatagaggttatttagcg

SEQ ID NO: 1406 - DNA, 57 bp, synthetic construct
  misc_feature 1..57: note = Description of Artificial Sequence: Synthetic oligonucleotide
  source 1..57: mol_type = other DNA
cgtttttcgttatttgatattagttaggtagtttttagggttagagcgttagcgtcg

SEQ ID NO: 1407 - DNA, 111 bp, synthetic construct
  misc_feature 1..111: note = Description of Artificial Sequence: Synthetic polynucleotide
  source 1..111: mol_type = other DNA
cgtttagggttggggttcggtgggaattttttcgtgttcgaagggacgatttcgttagagagtttttcgatttttgtatttatcgtttttggtaggacgtggagttgttcg

SEQ ID NO: 1408 - DNA, 211 bp, synthetic construct
  misc_feature 1..211: note = Description of Artificial Sequence: Synthetic polynucleotide
  source 1..211: mol_type = other DNA
cgttattgtcgtcgttggcgttttgtttttggaattttttagtaagatggtatttattgtttgttttttttcgattagtatttttagtcgcgttttttttttttcgggatacgtattagttatatattgtggggagaagatgggttatgtaaatgtaagttaacgcgtttttttagttatttttgtataatgtaataggaatagcgattcg

SEQ ID NO: 1409 - DNA, 75 bp, synthetic construct
  misc_feature 1..75: note = Description of Artificial Sequence: Synthetic oligonucleotide
  source 1..75: mol_type = other DNA
cgtttttattatttttttaaatattgtagtaagttgtagtaaggcgggtaaatatcgatagcgcgcgtgggggcg

SEQ ID NO: 1410 - skipped

SEQ ID NO: 1411 - DNA, 66 bp, synthetic construct
  misc_feature 1..66: note = Description of Artificial Sequence: Synthetic oligonucleotide
  source 1..66: mol_type = other DNA
cggttatttgtttttcgttttcggggcgtcgtttagtttcgcgttaggcgttttttttagcgttcg

SEQ ID NO: 1412 - skipped

SEQ ID NO: 1413 - DNA, 163 bp, synthetic construct
  misc_feature 1..163: note = Description of Artificial Sequence: Synthetic polynucleotide
  source 1..163: mol_type = other DNA
cgcgcgtttttcggcgggtcggcgggttcggaagtttcgttgttcgggtcgggtttttaagttcgtagtcgttttgattaaaataggtatcgcgacggcggcggtaggcggcggtagttagggttggggtcgtatcgcgtacgcgtatgcgttcgtcgtttcg

SEQ ID NO: 1414 - DNA, 99 bp, synthetic construct
  misc_feature 1..99: note = Description of Artificial Sequence: Synthetic oligonucleotide
  source 1..99: mol_type = other DNA
cgtttttgttttggagcgcggtcgggagtaaaatcgtaggagtgggagggtagcgagttagttggatttcgagtcgcggagcgcgttggttttgtttcg

SEQ ID NO: 1415 - DNA, 96 bp, synthetic construct
  misc_feature 1..96: note = Description of Artificial Sequence: Synthetic oligonucleotide
  source 1..96: mol_type = other DNA
cgcgttttcgtaggcggtattgttcgcggcgcggcgtgtgtatcgagcgagtgaaggtatgtgtggcgggcgcggttggagttgtcgtcgtcgtcg

SEQ ID NO: 1416 - skipped

SEQ ID NO: 1417 - DNA, 16 bp, synthetic construct
  misc_feature 1..16: note = Description of Artificial Sequence: Synthetic oligonucleotide
  source 1..16: mol_type = other DNA
cggcgagattggtacg

SEQ ID NO: 1418 - skipped

SEQ ID NO: 1419 - DNA, 141 bp, synthetic construct
  misc_feature 1..141: note = Description of Artificial Sequence: Synthetic polynucleotide
  source 1..141: mol_type = other DNA
cgcggttgatggttgacgcgttgcgcggttgcgtgtttgttttttacggcgtggtggagcgcgacggcgaaagttatttgtagttgtaggatttgttcgatggtttcgacggattttgtgtgttcgattgtaaaatgggcg

SEQ ID NO: 1420 - skipped

SEQ ID NO: 1421 - DNA, 37 bp, synthetic construct
  misc_feature 1..37: note = Description of Artificial Sequence: Synthetic oligonucleotide
  source 1..37: mol_type = other DNA
cgtttttaattaatcgtataaaattcgtaatatttcg

SEQ ID NO: 1422 - DNA, 52 bp, synthetic construct
  misc_feature 1..52: note = Description of Artificial Sequence: Synthetic oligonucleotide
  source 1..52: mol_type = other DNA
cgggtcggggtatttggcgttttgtgtgggtggcgggagcggggacgtttcg

SEQ ID NO: 1423-1426 - skipped (4 entries)

SEQ ID NO: 1427 - DNA, 17 bp, synthetic construct
  misc_feature 1..17: note = Description of Artificial Sequence: Synthetic oligonucleotide
  source 1..17: mol_type = other DNA
cgagttggggcgggacg

SEQ ID NO: 1428 - DNA, 136 bp, synthetic construct
  misc_feature 1..136: note = Description of Artificial Sequence: Synthetic polynucleotide
  source 1..136: mol_type = other DNA
cgcgagttttttgacgcggggattagttatgaatcgggggtgtgtgtttgtttttagagatttggtaaggtgcggagttttttagaagtgcggttaagcggtagcggagacggcgagttaggaattttttttcgcg

SEQ ID NO: 1429 - DNA, 31 bp, synthetic construct
  misc_feature 1..31: note = Description of Artificial Sequence: Synthetic oligonucleotide
  source 1..31: mol_type = other DNA
cgcgtttagcgtttcgtttattttttggtcg

SEQ ID NO: 1430 - DNA, 25 bp, synthetic construct
  misc_feature 1..25: note = Description of Artificial Sequence: Synthetic oligonucleotide
  source 1..25: mol_type = other DNA
cgtgtattttgaggtttggttggcg

SEQ ID NO: 1431 - DNA, 12 bp, synthetic construct
  misc_feature 1..12: note = Description of Artificial Sequence: Synthetic oligonucleotide
  source 1..12: mol_type = other DNA
cgttgacgagcg

SEQ ID NO: 1432 - skipped

SEQ ID NO: 1433 - DNA, 199 bp, synthetic construct
  misc_feature 1..199: note = Description of Artificial Sequence: Synthetic polynucleotide
  source 1..199: mol_type = other DNA
cgcgttcgcggtcgcggtcgttgtatggcgttgagatggcgggggcgtcgcgcggcggaggcggcggcggaggcggcgcgggcgagttcgggggcgtcgagcgggcggtcgggataagtcgtcggcgcgggtttcgggcgtgcgacgaggagttcgtttgtttagagttggaggcgttgtttcgcggttatacgttgcg

SEQ ID NO: 1434 - DNA, 91 bp, synthetic construct
  misc_feature 1..91: note = Description of Artificial Sequence: Synthetic oligonucleotide
  source 1..91: mol_type = other DNA
cggtttcgggtgtagggtggcgggttcggcggcgcgcgttttttttttttttttggcggttcgtacgtgtcgttcgcgtcgcgtttttacg

SEQ ID NO: 1435 - DNA, 108 bp, synthetic construct
  misc_feature 1..108: note = Description of Artificial Sequence: Synthetic polynucleotide
  source 1..108: mol_type = other DNA
cgcgtttttattgttttatttttttcgtttttggagtttttcggtgattttattatagtttttgttattttgtgatttgtaggtattgggagatttatagggaggacg

SEQ ID NO: 1436 - DNA, 13 bp, synthetic construct
  misc_feature 1..13: note = Description of Artificial Sequence: Synthetic oligonucleotide
  source 1..13: mol_type = other DNA
cgtatcgatttcg

SEQ ID NO: 1437 - DNA, 176 bp, synthetic construct
  misc_feature 1..176: note = Description of Artificial Sequence: Synthetic polynucleotide
  source 1..176: mol_type = other DNA
cggttcgttgggtaaggcgttcgagaaagcgtttggcgggaggaggtgcgcggttttttgttttaggcggttcgggtgttcgttttatgcggggcgagcgttcggtcgattttcgtcggggcggagtttgaggggtggttgatttatgtacggggattgttatttcgtcgttttcg

SEQ ID NO: 1438 - skipped

SEQ ID NO: 1439 - DNA, 157 bp, synthetic construct
  misc_feature 1..157: note = Description of Artificial Sequence: Synthetic polynucleotide
  source 1..157: mol_type = other DNA
cgagaagtttcgcgggagacggcggtttttaaagttattttgggtcgcgggagcgcgggatcggggttgcgggcgtcgagagcgcgtcgtttgtcgttttcgtgcgtcgtcgtcgtttttgcgcgacgtttttcggttaggtttgggaaagcgttcg

SEQ ID NO: 1440 - DNA, 66 bp, synthetic construct
  misc_feature 1..66: note = Description of Artificial Sequence: Synthetic oligonucleotide
  source 1..66: mol_type = other DNA
cgcgaatcgttaggggttttcgcgttttttttttatttaggttttttgtttttttcgtcgcggtcg

SEQ ID NO: 1441 - DNA, 498 bp, synthetic construct
  misc_feature 1..498: note = Description of Artificial Sequence: Synthetic polynucleotide
  source 1..498: mol_type = other DNA
cgtcgtcgcgtcgatcggtcgcgttttcgggattttttgggtcggtcgcgttttcggttttttttttcgtcgcgtttgtgcgtacgcgtagacgtcgtaagttttacgagttgtacgcggtcggcgtttcgtttttttcgtcgttcggttacgttttcgcgttcgagtcgtcgcggttcggaagcggaagcggaagcggtttcggtttcgtttttgcgcgttcgttcggtttcgcggtcgacggttttatcgatttgagtaagaagtcgcggcgttcgtttttcggagtttcggtatcggcgttggtcgattattacgagtgtacggtttgtcgcgtgagtttttatagtttcgaggtttatttggcgtataagaagtattcgtgtttcgttgcgttatcgttcggcgcgttcggtttgttcgtcgtcgtttgtttttattgtttttcgaacggttcggtgcgcggggatttgttggagtattttcgtttggcgtacg

SEQ ID NO: 1442 - DNA, 27 bp, synthetic construct
  misc_feature 1..27: note = Description of Artificial Sequence: Synthetic oligonucleotide
  source 1..27: mol_type = other DNA
cgcgggttcgaacgtttttcgcgtttg

SEQ ID NO: 1443-1444 - skipped (2 entries)

SEQ ID NO: 1445 - DNA, 16 bp, synthetic construct
  misc_feature 1..16: note = Description of Artificial Sequence: Synthetic oligonucleotide
  source 1..16: mol_type = other DNA
cgtcgtttgtttcgcg

SEQ ID NO: 1446 - DNA, 53 bp, synthetic construct
  misc_feature 1..53: note = Description of Artificial Sequence: Synthetic oligonucleotide
  source 1..53: mol_type = other DNA
cgcggagggcgtcgaattagagtttgcggggtttgatagttttttttgcggcg

SEQ ID NO: 1447-1450 - skipped (4 entries)

SEQ ID NO: 1451 - DNA, 14 bp, synthetic construct
  misc_feature 1..14: note = Description of Artificial Sequence: Synthetic oligonucleotide
  source 1..14: mol_type = other DNA
cgtgtttatttacg

SEQ ID NO: 1452 - DNA, 186 bp, synthetic construct
  misc_feature 1..186: note = Description of Artificial Sequence: Synthetic polynucleotide
  source 1..186: mol_type = other DNA
cggcgggaaggtttgggtgtttatagatagagttggagtttttcggtgggtggtatagataattagttggggttgttttatatgtaatttaattataggggaaataggtttaaatatcgggtgataagtagcgtaattgtttcgggtgattttgtaattttttttttattaattttttttataacg

SEQ ID NO: 1453 - DNA, 79 bp, synthetic construct
  misc_feature 1..79: note = Description of Artificial Sequence: Synthetic oligonucleotide
  source 1..79: mol_type = other DNA
cggggtacgttcgttttcggcggggtttttcgtttcgttgtgggagtggtagtgggtgtcggggtggagaaagtacgcg

SEQ ID NO: 1454 - DNA, 49 bp, synthetic construct
  misc_feature 1..49: note = Description of Artificial Sequence: Synthetic oligonucleotide
  source 1..49: mol_type = other DNA
cgtcgcgttcgcgtcgcgttttttgtaggtaacgggagacgttttcgcg

SEQ ID NO: 1455 - DNA, 17 bp, synthetic construct
  misc_feature 1..17: note = Description of Artificial Sequence: Synthetic oligonucleotide
  source 1..17: mol_type = other DNA
cggatgaatcgttcgcg

SEQ ID NO: 1456-1458 - skipped (3 entries)

SEQ ID NO: 1459 - DNA, 165 bp, synthetic construct
  misc_feature 1..165: note = Description of Artificial Sequence: Synthetic polynucleotide
  source 1..165: mol_type = other DNA
cgggaacgttgtagtttggttgagcgtgatttttaggttttgtgaggaaaagtcgagcgcgttatatcgaggcgttagtcgtttattttattataaggtaaaagatttatgttgttttagttattttaaagttgggagatatattgtattttttattagatttcg

SEQ ID NO: 1460 - DNA, 14 bp, synthetic construct
  misc_feature 1..14: note = Description of Artificial Sequence: Synthetic oligonucleotide
  source 1..14: mol_type = other DNA
cgcgcgggttagcg

SEQ ID NO: 1461-1462 - skipped (2 entries)

SEQ ID NO: 1463 - DNA, 97 bp, synthetic construct
  misc_feature 1..97: note = Description of Artificial Sequence: Synthetic oligonucleotide
  source 1..97: mol_type = other DNA
cgtgtgtttagggttagtagtacgtataagtgttagcgtacggtcgtcgcgtttatgtttaatgcgggtttcgttgggcgtgcgggcgtgcggggcg

SEQ ID NO: 1464 - skipped

SEQ ID NO: 1465 - DNA, 98 bp, synthetic construct
  misc_feature 1..98: note = Description of Artificial Sequence: Synthetic oligonucleotide
  source 1..98: mol_type = other DNA
cgcggatcgcgcgttttcgtcgttttgtttttaaatttttgtcgtagtttttttttaagttagcgaatttattttttaaaattagaaattgaatttcg

SEQ ID NO: 1466 - DNA, 69 bp, synthetic construct
  misc_feature 1..69: note = Description of Artificial Sequence: Synthetic oligonucleotide
  source 1..69: mol_type = other DNA
cggaggggcggaggaggtgttggcggcggtattgagcggcggcggcgtagggcgcgcgggtttttcgcg

SEQ ID NO: 1467-1470 - skipped (4 entries)

SEQ ID NO: 1471 - DNA, 103 bp, synthetic construct
  misc_feature 1..103: note = Description of Artificial Sequence: Synthetic polynucleotide
  source 1..103: mol_type = other DNA
cggttttaggacggtagggatcgcgatggagcggtttcgggggcggtcgggggacggcgcggtggcggtcggttagttcgttttttcgggggcggcgggcgcg

SEQ ID NO: 1472 - skipped

SEQ ID NO: 1473 - DNA, 21 bp, synthetic construct
  misc_feature 1..21: note = Description of Artificial Sequence: Synthetic oligonucleotide
  source 1..21: mol_type = other DNA
cggtttttggcggcggcggcg

SEQ ID NO: 1474 - DNA, 148 bp, synthetic construct
  misc_feature 1..148: note = Description of Artificial Sequence: Synthetic polynucleotide
  source 1..148: mol_type = other DNA
cggcgttttaaaggggaggattttgcggcgcgggtaagaggcggcgggagcgcgcggttcgggagtgtggttgtagtgcgtcgggatattagggtttcgcgtttcgtatttaagaggttttcgcgttttaatttttcgcgttcgcgcg

SEQ ID NO: 1475-1476 - skipped (2 entries)

SEQ ID NO: 1477 - DNA, 26 bp, synthetic construct
  misc_feature 1..26: note = Description of Artificial Sequence: Synthetic oligonucleotide
  source 1..26: mol_type = other DNA
cgtcgagaggtagcgcgtgatggtcg

SEQ ID NO: 1478 - DNA, 119 bp, synthetic construct
  misc_feature 1..119: note = Description of Artificial Sequence: Synthetic polynucleotide
  source 1..119: mol_type = other DNA
cgtacgtttaagtgcgcgcgttgtcgtaattatggcgttttgttttggtttaagggttataagcgttattgtcgttttaaggattgtatttgcgagaagtgtatttttattatcgagcg

SEQ ID NO: 1479 - DNA, 66 bp, synthetic construct
  misc_feature 1..66: note = Description of Artificial Sequence: Synthetic oligonucleotide
  source 1..66: mol_type = other DNA
cggttcgatttttttcgtttagtttgggttagaggaagtcgaaagcggttttagtaaggtgaggcg

SEQ ID NO: 1480 - DNA, 60 bp, synthetic construct
  misc_feature 1..60: note = Description of Artificial Sequence: Synthetic oligonucleotide
  source 1..60: mol_type = other DNA
cgagcgaagtcgtcgtgtttgggtagaaggcgttttaggaggcgcgaggttttagtcgcg

SEQ ID NO: 1481 - skipped

SEQ ID NO: 1482 - DNA, 124 bp, synthetic construct
  misc_feature 1..124: note = Description of Artificial Sequence: Synthetic polynucleotide
  source 1..124: mol_type = other DNA
cgttcggagcgggatttgtttgttttagtgtacgtcgcggagcgaattatcgggttggcgggggtggaggggtgtaggcgtgggggttgcgggtcgttcgggttttgggttttttttgtcgtcg

SEQ ID NO: 1483 - skipped

SEQ ID NO: 1484 - DNA, 156 bp, synthetic construct
  misc_feature 1..156: note = Description of Artificial Sequence: Synthetic polynucleotide
  source 1..156: mol_type = other DNA
cggggtatcgcggcgttcgtcgtcgttttttcgtaggtgattatttttttgtaggtgttttcgggttttaggtggttgcgtgtttgcgttatggttgatattttgggcgagcggtatttggtgatttgtaagggcgcgacggtggaggtcgaggcg

SEQ ID NO: 1485 - skipped

SEQ ID NO: 1486 - DNA, 91 bp, synthetic construct
  misc_feature 1..91: note = Description of Artificial Sequence: Synthetic oligonucleotide
  source 1..91: mol_type = other DNA
cgcgcgtcgtcgaaattttgttttcgtcgtcgtttatcgataggttgtggagaaggttatcgatcgatgttatcgagttatttttgaagcg

SEQ ID NO: 1487-1488 - skipped (2 entries)

SEQ ID NO: 1489 - DNA, 89 bp, synthetic construct
  misc_feature 1..89: note = Description of Artificial Sequence: Synthetic oligonucleotide
  source 1..89: mol_type = other DNA
cgttattcgcgtgttagtagttgggcgtttcgattttttagatcgcgtgagtttagtaaagcggttaggcgcgcgtttgtagttcggcg

SEQ ID NO: 1490 - DNA, 13 bp, synthetic construct
  misc_feature 1..13: note = Description of Artificial Sequence: Synthetic oligonucleotide
  source 1..13: mol_type = other DNA
cgtttttaattcg

SEQ ID NO: 1491 - skipped

SEQ ID NO: 1492 - DNA, 47 bp, synthetic construct
  misc_feature 1..47: note = Description of Artificial Sequence: Synthetic oligonucleotide
  source 1..47: mol_type = other DNA
cgagcgttagattttagtaataaaaggttaggcgaggttatatcgcg

SEQ ID NO: 1493-1494 - skipped (2 entries)

SEQ ID NO: 1495 - DNA, 159 bp, synthetic construct
  misc_feature 1..159: note = Description of Artificial Sequence: Synthetic polynucleotide
  source 1..159: mol_type = other DNA
cgatgttcgcggcgtgaaagcgttcgcggcgggcgtcgatttttgttttagttttttgtttttttcgtttcgtttgtttcgtgtttttgtgattttggttttggcgtcgtcgtttaggcgtttcgtaatgtagttgtttttgcgtttcggcgggaggcg

SEQ ID NO: 1496-1498 - skipped (3 entries)

SEQ ID NO: 1499 - DNA, 78 bp, synthetic construct
  misc_feature 1..78: note = Description of Artificial Sequence: Synthetic oligonucleotide
  source 1..78: mol_type = other DNA
cgggcgtcgaggtttgggttttagtcgtggcgttcgtttcggcgtagtggggagtcgcgggcgtcggagaagcggtcg

SEQ ID NO: 1500 - skipped

SEQ ID NO: 1501 - DNA, 48 bp, synthetic construct
  misc_feature 1..48: note = Description of Artificial Sequence: Synthetic oligonucleotide
  source 1..48: mol_type = other DNA
cgcggaggagtttcgtattcgatcgtgtatagcgatcgagttggcgcg

SEQ ID NO: 1502-1504 - skipped (3 entries)

SEQ ID NO: 1505 - DNA, 157 bp, synthetic construct
  misc_feature 1..157: note = Description of Artificial Sequence: Synthetic polynucleotide
  source 1..157: mol_type = other DNA
cgtttttatagttttgttttgatagttaaggaaaaaatttgttaaaaattagaggcgttgttgagtgttggcgtgggaatgttagtttagttagagttttgttttgggttatttaaataaaaatagatatgttggtggtaaatgttagttgaatacg

SEQ ID NO: 1506 - skipped

SEQ ID NO: 1507 - DNA, 82 bp, synthetic construct
  misc_feature 1..82: note = Description of Artificial Sequence: Synthetic oligonucleotide
  source 1..82: mol_type = other DNA
cgcgcgttagtttttcgtttcgtggaagcgtttttttttcgatttcggttgattttcgttcgtcgtttttttcgcgggtgcg

SEQ ID NO: 1508 - DNA, 23 bp, synthetic construct
  misc_feature 1..23: note = Description of Artificial Sequence: Synthetic oligonucleotide
  source 1..23: mol_type = other DNA
cgtttggtcgttttatttggtcg

SEQ ID NO: 1509 - DNA, 38 bp, synthetic construct
  misc_feature 1..38: note = Description of Artificial Sequence: Synthetic oligonucleotide
  source 1..38: mol_type = other DNA
cgagttttcgcgcgtttacgagtagttttgcgagttcg

SEQ ID NO: 1510 - skipped

SEQ ID NO: 1511 - DNA, 165 bp, synthetic construct
  misc_feature 1..165: note = Description of Artificial Sequence: Synthetic polynucleotide
  source 1..165: mol_type = other DNA
cgtgtttttttttagcgagcgtagcgagttgtttttgaagtttaggtagattaggtcgtcgtagaagatgaagaagttttcggggattcgttggatgcggttgtcggttattagtagtttgcgtacgtttagggggaaagggtttggtacgttgggtagttcgcg

SEQ ID NO: 1512-1514 - skipped (3 entries)

SEQ ID NO: 1515 - DNA, 23 bp, synthetic construct
  misc_feature 1..23: note = Description of Artificial Sequence: Synthetic oligonucleotide
  source 1..23: mol_type = other DNA
cggtgttcgggggtcgtttgtcg

SEQ ID NO: 1516 - skipped

SEQ ID NO: 1517 - DNA, 66 bp, synthetic construct
  misc_feature 1..66: note = Description of Artificial Sequence: Synthetic oligonucleotide
  source 1..66: mol_type = other DNA
cggtcgtggcgggttttttggggcggtagttttaggcgcgggcgcgtagtagtttcgaaggcgtcg

SEQ ID NO: 1518 - DNA, 43 bp, synthetic construct
  misc_feature 1..43: note = Description of Artificial Sequence: Synthetic oligonucleotide
  source 1..43: mol_type = other DNA
cgaataaaaagagtttaggtcgcgcgggcgggttgcgcgttcg

SEQ ID NO: 1519 - skipped

SEQ ID NO: 1520 - DNA, 62 bp, synthetic construct
  misc_feature 1..62: note = Description of Artificial Sequence: Synthetic oligonucleotide
  source 1..62: mol_type = other DNA
cgtttagatgcggcggcggcgacggttttagttgcgtttcgtggttattttcgtgtagcgcg

SEQ ID NO: 1521 - skipped

SEQ ID NO: 1522 - DNA, 138 bp, synthetic construct
  misc_feature 1..138: note = Description of Artificial Sequence: Synthetic polynucleotide
  source 1..138: mol_type = other DNA
cgaaagattcgaaattttaaaagttttattgcgtgtttttgggaggggagggggcgcgttaggaaaggagtggaaaaaagtgggcgaggaggagcgttgaaaattttttgataagtagttttcgtgcgttcgagagcg

SEQ ID NO: 1523-1526 - skipped (4 entries)

SEQ ID NO: 1527 - DNA, 187 bp, synthetic construct
  misc_feature 1..187: note = Description of Artificial Sequence: Synthetic polynucleotide
  source 1..187: mol_type = other DNA
cggtagaagtgggaggtatacgaggagttattggaaacggcgtttttgtggaggagtcgggggggatggggagtagagggagggggttttgttgttttagcgtttcgaggtcgtggagcggtagtagttgtagtcggagtagtattagtaatagtaatagtgagcgggacggagttaggatcgttcg

SEQ ID NO: 1528-1529 - skipped (2 entries)

SEQ ID NO: 1530 - DNA, 110 bp, synthetic construct
  misc_feature 1..110: note = Description of Artificial Sequence: Synthetic polynucleotide
  source 1..110: mol_type = other DNA
cgcggcgtgtagttcggcggatgttgttaggttaggcgatttcgtcgtttttggagcgcgagcgcgttttagtttgtagcgatgattttggaattagattttgatttgcg

SEQ ID NO: 1531 - skipped

SEQ ID NO: 1532 - DNA, 189 bp, synthetic construct
  misc_feature 1..189: note = Description of Artificial Sequence: Synthetic polynucleotide
  source 1..189: mol_type = other DNA
cgggaggttttgttcgttcggtggttgtcgcggtttttttcgcgttgttttttacgtttggtttattatgtacgaggtaggtaatttgttttttttttcggggatttatttcggagataagaaggtagtttgttttttgtaatggtttttgttggagtgcggcggggtttaggcgcgagcgggggtacg

SEQ ID NO: 1533 - DNA, 42 bp, synthetic construct
  misc_feature 1..42: note = Description of Artificial Sequence: Synthetic oligonucleotide
  source 1..42: mol_type = other DNA
cgttgaaggtgggtggaacgagggcgtttgagtgtattcgcg

SEQ ID NO: 1534 - DNA, 33 bp, synthetic construct
  misc_feature 1..33: note = Description of Artificial Sequence: Synthetic oligonucleotide
  source 1..33: mol_type = other DNA
cgcgcgggggttttaggtattttgcgttttacg

SEQ ID NO: 1535 - DNA, 15 bp, synthetic construct
  misc_feature 1..15: note = Description of Artificial Sequence: Synthetic oligonucleotide
  source 1..15: mol_type = other DNA
cgcgttagtcgaacg

SEQ ID NO: 1536 - DNA, 51 bp, synthetic construct
  misc_feature 1..51: note = Description of Artificial Sequence: Synthetic oligonucleotide
  source 1..51: mol_type = other DNA
cgttgggatagagttgtttgttggagttgtcgtagatcgtcgtggtgggcg

SEQ ID NO: 1537 - skipped

SEQ ID NO: 1538 - DNA, 268 bp, synthetic construct
  misc_feature 1..268: note = Description of Artificial Sequence: Synthetic polynucleotide
  source 1..268: mol_type = other DNA
cggagcgcgtagttcgtttttgaataagaagtgagtataatggcgtgtttgtaaaaaaaagttttaagttcgttttttttaaaaaatattttgaatgttgtatgttttatgttttttagcgtttcgcgggagagattcggttatagagtaggaggtgagatttttttttcggtatttttatttttttggtcgtacgtttttttgttttagttttttttgggaggattgtaaatgtttttttttagtaagcggtcgttttttattttcg

SEQ ID NO: 1539 - skipped

SEQ ID NO: 1540 - DNA, 33 bp, synthetic construct
  misc_feature 1..33: note = Description of Artificial Sequence: Synthetic oligonucleotide
  source 1..33: mol_type = other DNA
cggagtttttaggagtagttagatcgattatcg

SEQ ID NO: 1541 - DNA, 23 bp, synthetic construct
  misc_feature 1..23: note = Description of Artificial Sequence: Synthetic oligonucleotide
  source 1..23: mol_type = other DNA
cgtttattagttcgagattttcg

SEQ ID NO: 1542 - DNA, 40 bp, synthetic construct
  misc_feature 1..40: note = Description of Artificial Sequence: Synthetic oligonucleotide
  source 1..40: mol_type = other DNA
cgtttcgattcgacgttttttcgttcgattaggtgtttcg

SEQ ID NO: 1543 - DNA, 10 bp, synthetic construct
  misc_feature 1..10: note = Description of Artificial Sequence: Synthetic oligonucleotide
  source 1..10: mol_type = other DNA
cgcggtttcg

SEQ ID NO: 1544 - DNA, 181 bp, synthetic construct
  misc_feature 1..181: note = Description of Artificial Sequence: Synthetic polynucleotide
  source 1..181: mol_type = other DNA
cggttgttgatcgtttttttcgcgttcgttagggtttttgtttcgcgttagttatcgcgcgttttttttttgtttatgtcgtagttttcgtggtttttgttttggattcgggatgttaggttgagatacgttttgtaaatttttggtagaaatgggcgtaagggggtggatttcgttttcg

SEQ ID NO: 1545 - DNA, 195 bp, synthetic construct
  misc_feature 1..195: note = Description of Artificial Sequence: Synthetic polynucleotide
  source 1..195: mol_type = other DNA
cgatttaggacgtcggcgtttgttaggattttttcgtttgtttttcgcgtttcgcgcgcgtttatgttattattacggggagggtgtatgcggtaggtgtttggtcgaggttttcgggagcgagtcgtttttacgtgttttagtttgtttttttttcgaagttagacgttggcgttgtagttttgttgtttgacg

SEQ ID NO: 1546 - skipped

SEQ ID NO: 1547 - DNA, 358 bp, synthetic construct
  misc_feature 1..358: note = Description of Artificial Sequence: Synthetic polynucleotide
  source 1..358: mol_type = other DNA
cggcgttcgagtgattttgtttagtttcgttttgcgtttttgtaaattacgttgttgcgttaattataaatttggttaatatgtttttgtaattttattatttaaaaacgtttttaggtatttggtcgttgttagattaggttcgcgggttcggaggaggtttttttatttgttttcgttagtttcggggatcgtgcgcggttttcgtgtggttttcgtttacgaggtttttcgggtaggaatcgtcgcgcgatttttgtttagcggtcgcgttttggttacgggcgatttttgtcgggaattttgttttcggttaagttgcgttttcgtatttcggtggtttttattcgagttcgcg

SEQ ID NO: 1548 - DNA, 13 bp, synthetic construct
  misc_feature 1..13: note = Description of Artificial Sequence: Synthetic oligonucleotide
  source 1..13: mol_type = other DNA
cgtagttgtggcg

SEQ ID NO: 1549-1550 - skipped (2 entries)

SEQ ID NO: 1551 - DNA, 95 bp, synthetic construct
  misc_feature 1..95: note = Description of Artificial Sequence: Synthetic oligonucleotide
  source 1..95: mol_type = other DNA
cgtgcggggttatttgaaggttggggcgcggaagtttaatttcgtgttgattgggttttaagttttttgcgttttcgtttcgtttcgagtgttcg

SEQ ID NO: 1552 - DNA, 45 bp, synthetic construct
  misc_feature 1..45: note = Description of Artificial Sequence: Synthetic oligonucleotide
  source 1..45: mol_type = other DNA
cggtagtaggttggagcgtatcgtgcgcgttttgttttttcggcg

SEQ ID NO: 1553 - DNA, 104 bp, synthetic construct
  misc_feature 1..104: note = Description of Artificial Sequence: Synthetic polynucleotide
  source 1..104: mol_type = other DNA
cggttgagtcggagtttacgcggcgcgcgtttttcgcgaggaatttttcggtttgtaggttgtttgttattttcgtttttcgacgcgtttttttttggttcgcg

SEQ ID NO: 1554 - DNA, 87 bp, synthetic construct
  misc_feature 1..87: note = Description of Artificial Sequence: Synthetic oligonucleotide
  source 1..87: mol_type = other DNA
cgttttcgttttcgttgatattttgtaaagtcgcggcggtagcggcggggattacgttgcggtgtattatttttcgttattttttcg

SEQ ID NO: 1555 - DNA, 62 bp, synthetic construct
  misc_feature 1..62: note = Description of Artificial Sequence: Synthetic oligonucleotide
  source 1..62: mol_type = other DNA
cgatagtttgcgagtttcggttgtaagtggtttttttttttcgcggttgttgtttagtgtcg

SEQ ID NO: 1556-1563 - skipped (8 entries)

SEQ ID NO: 1564 - DNA, 145 bp, synthetic construct
  misc_feature 1..145: note = Description of Artificial Sequence: Synthetic polynucleotide
  source 1..145: mol_type = other DNA
cgtcggtttgttggcgatttggcgtatttgttcgcgcgttttggttttagttgtcgtaggttttttttgtatttatttttagtttttaaagttagtgtagttagtatcgtttatttggagttttaatttttttttgcgattttcg

SEQ ID NO: 1565 - skipped

SEQ ID NO: 1566 - DNA, 19 bp, synthetic construct
  misc_feature 1..19: note = Description of Artificial Sequence: Synthetic oligonucleotide
  source 1..19: mol_type = other DNA
cgtttatcgttaggagtcg

SEQ ID NO: 1567 - DNA, 35 bp, synthetic construct
  misc_feature 1..35: note = Description of Artificial Sequence: Synthetic oligonucleotide
  source 1..35: mol_type = other DNA
cggcggcggcggcggttttattagcggagttttcg

SEQ ID NO: 1568-1569 - skipped (2 entries)

SEQ ID NO: 1570 - DNA, 36 bp, synthetic construct
  misc_feature 1..36: note = Description of Artificial Sequence: Synthetic oligonucleotide
  source 1..36: mol_type = other DNA
cgagttggcgttggttcgttggttgtaggagagtcg

SEQ ID NO: 1571 - skipped

SEQ ID NO: 1572 - DNA, 42 bp, synthetic construct
  misc_feature 1..42: note = Description of Artificial Sequence: Synthetic oligonucleotide
  source 1..42: mol_type = other DNA
cggttgagttttcgtttgtttaattttatttgttattgtacg

SEQ ID NO: 1573-1574 - skipped (2 entries)

SEQ ID NO: 1575 - DNA, 18 bp, synthetic construct
  misc_feature 1..18: note = Description of Artificial Sequence: Synthetic oligonucleotide
  source 1..18: mol_type = other DNA
cgcgtagcgttcgcgtcg

SEQ ID NO: 1576-1578 - skipped (3 entries)

SEQ ID NO: 1579 - DNA, 118 bp, synthetic construct
  misc_feature 1..118: note = Description of Artificial Sequence: Synthetic polynucleotide
  source 1..118: mol_type = other DNA
cgtgttagatttcggtttcgcgatttaggtgagtgtcgttatcgtcgtttggagggatttaagggttttgggttgggatttggggtcgtatcggggtttgaggtagaatagcgacgcg

SEQ ID NO: 1580 - DNA, 22 bp, synthetic construct
  misc_feature 1..22: note = Description of Artificial Sequence: Synthetic oligonucleotide
  source 1..22: mol_type = other DNA
cgaatcgcgggcggcgcggacg

SEQ ID NO: 1581-1584 - skipped (4 entries)

SEQ ID NO: 1585 - DNA, 31 bp, synthetic construct
  misc_feature 1..31: note = Description of Artificial Sequence: Synthetic oligonucleotide
  source 1..31: mol_type = other DNA
cgataagagttcggtgttgagatgtgttacg

SEQ ID NO: 1586-1594 - skipped (9 entries)

SEQ ID NO: 1595 - DNA, 69 bp, synthetic construct
  misc_feature 1..69: note = Description of Artificial Sequence: Synthetic oligonucleotide
  source 1..69: mol_type = other DNA
cgttaggggcggttagcggtcgtttggttggcgtgtcggcggcgttcggggagggcgggtcggggggcg

SEQ ID NO: 1596 - DNA, 415 bp, synthetic construct
  misc_feature 1..415: note = Description of Artificial Sequence: Synthetic polynucleotide
  source 1..415: mol_type = other DNA
cgtttttttttttggttcgattggttttggttttttttacgtttttagtttttaaattggcgttcgttttatggttcgtgtaggacgttaaaagtacggtaaattttagggcgatttttagtagacgttttcgacgtatgatgtcgagtcgttatcggttttcgtcgttttttgtcgcgttcggggttcggtttgcggtcgtcgttgcgttttgaagcgtatcgcgtcgtcggggtttcgttatttcgtcgttcgtttttcgggtcgggtttttttcgttttttttaggcgttgtttttattttaggcggtttttgttagttgtaatatagagataaattttcgaggcggggagatttttagggtatcgggatgttgaagtttcgcggtttttatttttaagtttaattcgtgcg

SEQ ID NO: 1597-1601 - skipped (5 entries)

SEQ ID NO: 1602 - DNA, 62 bp, synthetic construct
  misc_feature 1..62: note = Description of Artificial Sequence: Synthetic oligonucleotide
  source 1..62: mol_type = other DNA
cgcgttcgtcgttagttcgtatagcgtttcgtatattttcgtacgcgtttgaaatgcgtacg

SEQ ID NO: 1603-1606 - skipped (4 entries)

SEQ ID NO: 1607 - DNA, 20 bp, synthetic construct
  misc_feature 1..20: note = Description of Artificial Sequence: Synthetic oligonucleotide
  source 1..20: mol_type = other DNA
cgtaaacgtaaaagttttcg

SEQ ID NO: 1608 - DNA, 69 bp, synthetic construct
  misc_feature 1..69: note = Description of Artificial Sequence: Synthetic oligonucleotide
  source 1..69: mol_type = other DNA
cgttttttggggtttttggttgtcgagtttcgttaaggtaaagacgttagtaagcgaggaagcgtagcg

SEQ ID NO: 1609 - skipped

SEQ ID NO: 1610 - DNA, 318 bp, synthetic construct
  misc_feature 1..318: note = Description of Artificial Sequence: Synthetic polynucleotide
  source 1..318: mol_type = other DNA
cgtttcgcggtagtgttagttttttggggattaggaagggcgatttttgtttgggagttagtgtttgggtcgtcgggttcgggtaagcgttgggggtttggttcgagaagatgcggataggtggtttagggcgtcgcggattttcgttttttgcgggtatcgggagtttagggtcgaggcgcgtcgtttcgaggggtttttttttttaataatgcgttcggaatggagttcgcgttttgatagcgcgggttagttcgaaatcgtttagaattcgtttcgatgagtgggtgagtcgttttgggagtttgtcgcgtttcg

SEQ ID NO: 1611 - DNA, 27 bp, synthetic construct
  misc_feature 1..27: note = Description of Artificial Sequence: Synthetic oligonucleotide
  source 1..27: mol_type = other DNA
cgtggtggtttttcgagcggaggcgcg

SEQ ID NO: 1612 - skipped

SEQ ID NO: 1613 - DNA, 13 bp, synthetic construct
  misc_feature 1..13: note = Description of Artificial Sequence: Synthetic oligonucleotide
  source 1..13: mol_type = other DNA
cgagtttttcgcg

SEQ ID NO: 1614 - DNA, 189 bp, synthetic construct
  misc_feature 1..189: note = Description of Artificial Sequence: Synthetic polynucleotide
  source 1..189: mol_type = other DNA
cggtgacgatgtgtagagttttttggtatagattgtttatttcgttttttttgtggaaatttatcgtttggtttttttttcgtttttttttttttttttagttagtcgttttttttttttttcgtatttttaatttttttggcgttttaagttatagttcgttcgcggtgattttggttggagattgcg

SEQ ID NO: 1615-1616 - skipped (2 entries)

SEQ ID NO: 1617 - DNA, 13 bp, synthetic construct
  misc_feature 1..13: note = Description of Artificial Sequence: Synthetic oligonucleotide
  source 1..13: mol_type = other DNA
cgggggttgagcg

SEQ ID NO: 1618 - DNA, 51 bp, synthetic construct
  misc_feature 1..51: note = Description of Artificial Sequence: Synthetic oligonucleotide
  source 1..51: mol_type = other DNA
cggcgtgtgtcgtgcgtggggtggggtgcgggttgggcggtttcgttttcg

SEQ ID NO: 1619 - DNA, 289 bp, synthetic construct
  misc_feature 1..289: note = Description of Artificial Sequence: Synthetic polynucleotide
  source 1..289: mol_type = other DNA
cgttcgttcgtatttcgtttttttcggttttttttttaaattttaaacgtatcgtcgtgttttaaagaaggtgtttacgtcgtttttagatttcggagcgttttttttttattttcgggattttttaggtcgtttatttttttcgtttttcgtttagatttgagagggatcgaaaatatattttcgattcgggtagttagggtcgaaattgttaagaggagaaaaggtaaagcggaaggagggtggttataaatagatttttttgtttttttttaaaaggatattgtcg

SEQ ID NO: 1620 - skipped

SEQ ID NO: 1621 - DNA, 165 bp, synthetic construct
  misc_feature 1..165: note = Description of Artificial Sequence: Synthetic polynucleotide
  source 1..165: mol_type = other DNA
cggatttgttttcgtagtcgttgcggatttttcggtcgttatggcgattgtgaaatgtggggtggggcgtatgcgttggaagttattcgcgcgggtagtttttgagtgtttttttacgtgttttttagcgcgagtagtattttcgtttttgcgttttttagagcg

SEQ ID NO: 1622 - DNA, 21 bp, synthetic construct
  misc_feature 1..21: note = Description of Artificial Sequence: Synthetic oligonucleotide
  source 1..21: mol_type = other DNA
cgtcgtttttgtattatttcg

SEQ ID NO: 1623-1625 - skipped (3 entries)

SEQ ID NO: 1626 - DNA, 159 bp, synthetic construct
  misc_feature 1..159: note = Description of Artificial Sequence: Synthetic polynucleotide
  source 1..159: mol_type = other DNA
cggttgcgttggtcgtattgtttttttataatatgagtagcgtcggcggcgatcgtttgggtcgcggtaagtcggttcgttgcggttttatttttttcgtgggtcgcgtgtatcgttggatggtggatagtcgcgtggcgttgcgtatttacgagtacg

SEQ ID NO: 1627 - skipped

SEQ ID NO: 1628 - DNA, 129 bp, synthetic construct
  misc_feature 1..129: note = Description of Artificial Sequence: Synthetic polynucleotide
  source 1..129: mol_type = other DNA
cggggggcggaatttagagaggtaaagtgattcgtttttaaatcgtaatattaggaggatagtagggttagatggaatttttcggtttatagttttcgatttcgggtaagtgttttattcgggcgtacg

SEQ ID NO: 1629 - skipped

SEQ ID NO: 1630 - DNA, 120 bp, synthetic construct
  misc_feature 1..120: note = Description of Artificial Sequence: Synthetic polynucleotide
  source 1..120: mol_type = other DNA
cgttggagatggcgagtttcgagattttttttattttttgtttttagagtaattttatggtattaaaaaaaaaaaaaaaaaaaaaaaaaaaaaaaaaaaaaaaaaaagaaggagaaggcg

SEQ ID NO: 1631 - skipped

SEQ ID NO: 1632 - DNA, 171 bp, synthetic construct
  misc_feature 1..171: note = Description of Artificial Sequence: Synthetic polynucleotide
  source 1..171: mol_type = other DNA
cgcggacgttgacgattttttttacgttcgataagttttcgttttcgtcgtatcgttggcggttaatcgggcgttgcgaggatttaaattagagagttcgggatattattgtgggggttggaggtcgttttttaatttgggtttagtattaataggtgtagtagtcgagcg

SEQ ID NO: 1633-1635 - skipped (3 entries)

SEQ ID NO: 1636 - DNA, 64 bp, synthetic construct
  misc_feature 1..64: note = Description of Artificial Sequence: Synthetic oligonucleotide
  source 1..64: mol_type = other DNA
cggtaggtgagcggcgcggttgtaggtgagtagtagtttcggttcgcgcgtttagtttttttcg

SEQ ID NO: 1637-1640 - skipped (4 entries)

SEQ ID NO: 1641 - DNA, 16 bp, synthetic construct
  misc_feature 1..16: note = Description of Artificial Sequence: Synthetic oligonucleotide
  source 1..16: mol_type = other DNA
cgtttcgtagggttcg

SEQ ID NO: 1642-1644 - skipped (3 entries)

SEQ ID NO: 1645 - DNA, 18 bp, synthetic construct
  misc_feature 1..18: note = Description of Artificial Sequence: Synthetic oligonucleotide
  source 1..18: mol_type = other DNA
cgtattttttcggtcgcg

SEQ ID NO: 1646 - DNA, 118 bp, synthetic construct
  misc_feature 1..118: note = Description of Artificial Sequence: Synthetic polynucleotide
  source 1..118: mol_type = other DNA
cgggcggatgggggttatcgaggcggttcgtttttaggcgtatatttcgtatatttttttgttaagtgaaggggttaaaatgtatagatgggggagtttatttaggaatagaggcgcg

SEQ ID NO: 1647-1651 - skipped (5 entries)

SEQ ID NO: 1652 - DNA, 22 bp, synthetic construct
  misc_feature 1..22: note = Description of Artificial Sequence: Synthetic oligonucleotide
  source 1..22: mol_type = other DNA
cgcgtcgttttagaggagttcg

SEQ ID NO: 1653 - DNA, 112 bp, synthetic construct
  misc_feature 1..112: note = Description of Artificial Sequence: Synthetic polynucleotide
  source 1..112: mol_type = other DNA
cgggagcgtacgagtgtgtgtgtgtgtgtgtgtgttcgcggtgtgttcgcggttcggtgtatacgcgcgcgggttgtaaagttaggagttgcgggagcgtttttttgtttcg

SEQ ID NO: 1654 - DNA, 109 bp, synthetic construct
  misc_feature 1..109: note = Description of Artificial Sequence: Synthetic polynucleotide
  source 1..109: mol_type = other DNA
cgttttgtttgggttgggtttatttacgttttgggtggggtttaggaattgcgtgcgggcgtagcgggtgagtatgttgatgatgattatttggttttatttttttacg

SEQ ID NO: 1655-1657 - skipped (3 entries)

SEQ ID NO: 1658 - DNA, 431 bp, synthetic construct
  misc_feature 1..431: note = Description of Artificial Sequence: Synthetic polynucleotide
  source 1..431: mol_type = other DNA
cgagggggttttgggatcgagcggtttcgtagcggcgatagaaatatatattttacgaaaaagaaaaaaaaaaaaacgagtcgcgcgaattcgttaagttagatgtgcgcggtttgaagcggaggaggttttgacgttagttttatttcgcgtagttcggtttggtcgtagattcgtcggttattcgtcggcggtttaggtcgggaggggttaggatagtttcggtcgcgcggtggacggaggggttattttttcgggcgttagtaaataaattttattcgagttaatatcgtttagcgaacggtgtttttttttagttattcgagaacgagaggtatttttaattagaaattaattaatgagtagttgttttttttcgttttattgtaattattcgttttaattataaatgagatttatgaaaggatacg

SEQ ID NO: 1659 - skipped

SEQ ID NO: 1660 - DNA, 40 bp, synthetic construct
  misc_feature 1..40: note = Description of Artificial Sequence: Synthetic oligonucleotide
  source 1..40: mol_type = other DNA
cgtcgcgtttcgttgtagtttcgttggagagatggggacg

SEQ ID NO: 1661 - skipped

SEQ ID NO: 1662 - DNA, 22 bp, synthetic construct
  misc_feature 1..22: note = Description of Artificial Sequence: Synthetic oligonucleotide
  source 1..22: mol_type = other DNA
cgttagtaggtttagggttacg

SEQ ID NO: 1663 - skipped

SEQ ID NO: 1664 - DNA, 47 bp, synthetic construct
  misc_feature 1..47: note = Description of Artificial Sequence: Synthetic oligonucleotide
  source 1..47: mol_type = other DNA
cgggtattttgtattgtacgtagtatatgttgtggttttttagttcg

SEQ ID NO: 1665 - DNA, 24 bp, synthetic construct
  misc_feature 1..24: note = Description of Artificial Sequence: Synthetic oligonucleotide
  source 1..24: mol_type = other DNA
cgtcgttgggggatttttggtacg

SEQ ID NO: 1666 - skipped

SEQ ID NO: 1667 - DNA, 45 bp, synthetic construct
  misc_feature 1..45: note = Description of Artificial Sequence: Synthetic oligonucleotide
  source 1..45: mol_type = other DNA
cgggattttaggtttatttagtaagttaattggttgaggttttcg

SEQ ID NO: 1668 - skipped

SEQ ID NO: 1669 - DNA, 258 bp, synthetic construct
  misc_feature 1..258: note = Description of Artificial Sequence: Synthetic polynucleotide
  source 1..258: mol_type = other DNA
cgaagcggcgggagtcggtgtagttttaatttttattgcgtgttttaggtcgttaattagttttgttcgcgtgtcgttggttcggaggttgtcgcgttagtttttgcgtgcgtttgagcgcgttggagtatttgcgaggttagggttgtcgacggcgagaggatattttgaggaatacggtgttttagtttcgttttcgtttttcgttcgagttggaggttggggcgcgttgagtcgtagcgtttggataagtgcgcg

SEQ ID NO: 1670 - DNA, 45 bp, synthetic construct
  misc_feature 1..45: note = Description of Artificial Sequence: Synthetic oligonucleotide
  source 1..45: mol_type = other DNA
cgttttggcggtttcgagggatttgggttcgggtttgcggtcgcg

SEQ ID NO: 1671-1672 - skipped (2 entries)

SEQ ID NO: 1673 - DNA, 67 bp, synthetic construct
  misc_feature 1..67: note = Description of Artificial Sequence: Synthetic oligonucleotide
  source 1..67: mol_type = other DNA
cggggcgttaatagtttaggatttgggttgtaggttggtttttgtattaattagcggggcggtttcg

SEQ ID NO: 1674 - DNA, 43 bp, synthetic construct
  misc_feature 1..43: note = Description of Artificial Sequence: Synthetic oligonucleotide
  source 1..43: mol_type = other DNA
cggttgattcgtagcggtagcggtagtagcgaggattcgagcg

SEQ ID NO: 1675-1676 - skipped (2 entries)

SEQ ID NO: 1677 - DNA, 113 bp, synthetic construct
  misc_feature 1..113: note = Description of Artificial Sequence: Synthetic polynucleotide
  source 1..113: mol_type = other DNA
cgtgtgtttagttgaatttagtatatttttttcgtatttttcgtttttttttttttttttttgaatttgtttttttgttttgcgggtttttaatttttttcgaatttcgggcg

SEQ ID NO: 1678-1679 - skipped (2 entries)

SEQ ID NO: 1680 - DNA, 84 bp, synthetic construct
  misc_feature 1..84: note = Description of Artificial Sequence: Synthetic oligonucleotide
  source 1..84: mol_type = other DNA
cgttgcgcgtcgttttcgcggagtcgagcggcggtggttgcggaagcgattggggttgcgcggatattagcgttttagagttcg

SEQ ID NO: 1681 - skipped

SEQ ID NO: 1682 - DNA, 48 bp, synthetic construct
  misc_feature 1..48: note = Description of Artificial Sequence: Synthetic oligonucleotide
  source 1..48: mol_type = other DNA
cgcgttttattttgtagcggtggttttggaattagattttgatttgcg

SEQ ID NO: 1683 - DNA, 228 bp, synthetic construct
  misc_feature 1..228: note = Description of Artificial Sequence: Synthetic polynucleotide
  source 1..228: mol_type = other DNA
cgggtcgcgcgtttatttgcgttttcgtcgtcgaaggagtttatgtacgggaagtagatggcgagcgtttcgaaggaggcggatagattgaggcggttttgcgagcgttttatgttcgcgtcggcgtcgggcgtttcggtcgcggcggcggcggcggcggcgggcggtttgggtagtttggtcgttttatttttgacgcggagtacggcgcgcggcgtggtggcggcg

SEQ ID NO: 1684 - DNA, 47 bp, synthetic construct
  misc_feature 1..47: note = Description of Artificial Sequence: Synthetic oligonucleotide
  source 1..47: mol_type = other DNA
cgtattttggtcgtaataagcgcgttttacgtcgttacgtattagcg

SEQ ID NO: 1685 - DNA, 185 bp, synthetic construct
  misc_feature 1..185: note = Description of Artificial Sequence: Synthetic polynucleotide
  source 1..185: mol_type = other DNA
cgcgtagggggcgggttttatttttttttcgttttcgtttcggttttaagtcgcggaggcgttcggtgggatttcgttgttgtttaattaggggggatcgggtgagtttttttttttggagtcgggttttattagcgtcgtaggtttataggtcgggggtgggggttttggatcgaggggcggcg

SEQ ID NO: 1686 - DNA, 216 bp, synthetic construct
  misc_feature 1..216: note = Description of Artificial Sequence: Synthetic polynucleotide
  source 1..216: mol_type = other DNA
cgggggcgttaatttcgggagtaggaggtcgggttttagtcgtcgggttttgcgcgtttgttttttgcggcgcggtcggtatttgtagttggggtggtcgcgtaagtgttgtacgcgtagtcgttcggttttttttacgaagggtcgttttttcgtcgcgtttagttttttttacgttttgtttgcgggtcgtgggcgttagtgagtggaacgtcg

SEQ ID NO: 1687 - DNA, 344 bp, synthetic construct
  misc_feature 1..344: note = Description of Artificial Sequence: Synthetic polynucleotide
  source 1..344: mol_type = other DNA
cgtggtttcgtgtttcggggcgcgttttagtttcggtattattagtttttcgtttttttcggaggggcgttcgagtgcgttcgatacggttagtagcgtcgcggcgagtagtagtagcgtgggtattggtttaaagtttcgagatttcggagttcgtttcgcgttttttatgtcgttgtttagtttgcgtttttcgaatttttcgggtatagttcgttgtattggagttttaggagatatcgttcgtagtagcgtacggagcgagggatttttagttcgggtcgggagagtaaagtttcgttggtttgttttggattgttaaaattaataatttttattattcg

SEQ ID NO: 1688 - DNA, 28 bp, synthetic construct
  misc_feature 1..28: note = Description of Artificial Sequence: Synthetic oligonucleotide
  source 1..28: mol_type = other DNA
cgttttgtttggtagttaggtcgagacg

SEQ ID NO: 1689 - DNA, 124 bp, synthetic construct
  misc_feature 1..124: note = Description of Artificial Sequence: Synthetic polynucleotide
  source 1..124: mol_type = other DNA
cgtggggcgttggatttatcgagaggttagcgtcgtcgtcgggggagggcgtgtttcgtacgtgtgtgttcgcgcgtgttcgcgttcgcgtgtgttagcgcgcgtgttttggtcgtgcgcgtcg

SEQ ID NO: 1690 - DNA, 80 bp, synthetic construct
  misc_feature 1..80: note = Description of Artificial Sequence: Synthetic oligonucleotide
  source 1..80: mol_type = other DNA
cgttcgttagggttacgaagagcgtaacgaacgttagtagtacggcgtttacggtgagcgttcgcgtcgtttgtatttcg

SEQ ID NO: 1691 - DNA, 62 bp, synthetic construct
  misc_feature 1..62: note = Description of Artificial Sequence: Synthetic oligonucleotide
  source 1..62: mol_type = other DNA
cggataggtttcgtagtgagtaggtaagggtcgtttcgtcgcggttgtttttttacgtttcg

SEQ ID NO: 1692 - DNA, 165 bp, synthetic construct
  misc_feature 1..165: note = Description of Artificial Sequence: Synthetic polynucleotide
  source 1..165: mol_type = other DNA
cgatcgtatgcgtcgatttgtcgttgggcgttcgtttttttttgttggggttgggcgcggtttcggagtttggcggcggtggtgagggcgtacggttagttgtagcggcgttgtgtttgtcgtggatttaggatattttaggtttggtggcggggttaggtggcg

SEQ ID NO: 1693 - DNA, 43 bp, synthetic construct
  misc_feature 1..43: note = Description of Artificial Sequence: Synthetic oligonucleotide
  source 1..43: mol_type = other DNA
cgtttttgtgtttttggtggtttcggcgttttttcggagcgcg

SEQ ID NO: 1694 - DNA, 86 bp, synthetic construct
  misc_feature 1..86: note = Description of Artificial Sequence: Synthetic oligonucleotide
  source 1..86: mol_type = other DNA
cgtcgtcgttttcgtcgggagttaagttcgtcgggtcggttcggttttaggtgggtagttcggtttgtagttggttggaggtggcg

SEQ ID NO: 1695 - DNA, 23 bp, synthetic construct
  misc_feature 1..23: note = Description of Artificial Sequence: Synthetic oligonucleotide
  source 1..23: mol_type = other DNA
cgagttcgtgggataagggggcg

SEQ ID NO: 1696 - skipped

SEQ ID NO: 1697 - DNA, 99 bp, synthetic construct
  misc_feature 1..99: note = Description of Artificial Sequence: Synthetic oligonucleotide
  source 1..99: mol_type = other DNA
cgcggttatgtaattggtggatttttttaaatcgttttggaggggggagcgcggcgttgggggcgggagagcgtttttggttgtgagttgtttttgtcg

SEQ ID NO: 1698 - DNA, 73 bp, synthetic construct
  misc_feature 1..73: note = Description of Artificial Sequence: Synthetic oligonucleotide
  source 1..73: mol_type = other DNA
cgtggaattcgtgagttttacgtaacgtttttttgtcgtttagggtgggtttttagaagtatagaaatggtcg

SEQ ID NO: 1699 - skipped

SEQ ID NO: 1700 - DNA, 52 bp, synthetic construct
  misc_feature 1..52: note = Description of Artificial Sequence: Synthetic oligonucleotide
  source 1..52: mol_type = other DNA
cggggcgggtagggatcgagttaggagagagcgggcgggggttttgggagcg

SEQ ID NO: 1701 - DNA, 50 bp, synthetic construct
  misc_feature 1..50: note = Description of Artificial Sequence: Synthetic oligonucleotide
  source 1..50: mol_type = other DNA
cgcgagtaggagggcgtattttatggttaggtgcggacgcggcggttgcg

SEQ ID NO: 1702 - DNA, 50 bp, synthetic construct
  misc_feature 1..50: note = Description of Artificial Sequence: Synthetic oligonucleotide
  source 1..50: mol_type = other DNA
cgggtcggggtattataggcgcgggaatttacgtgtggattttgcgttcg

SEQ ID NO: 1703-1704 - skipped (2 entries)

SEQ ID NO: 1705 - DNA, 52 bp, synthetic construct
  misc_feature 1..52: note = Description of Artificial Sequence: Synthetic oligonucleotide
  source 1..52: mol_type = other DNA
cggggtagcgtaggagtaggtaggggttcgcggttcgcgtgggttttaggcg

SEQ ID NO: 1706-1708 - skipped (3 entries)

SEQ ID NO: 1709 - DNA, 138 bp, synthetic construct
  misc_feature 1..138: note = Description of Artificial Sequence: Synthetic polynucleotide
  source 1..138: mol_type = other DNA
cgagtggtagtagtaggagcggggtgacgaataagattacgaaggatttgaatttggagatatagtttagcgtcgaggttatcgcgcgggagggagattggcgggcgagacgagtgaggggtagttagaggcgtcgcg

SEQ ID NO: 1710-1712 - skipped (3 entries)

SEQ ID NO: 1713 - DNA, 1017 bp, synthetic construct
  misc_feature 1..1017: note = Description of Artificial Sequence: Synthetic polynucleotide
  source 1..1017: mol_type = other DNA
ygtttatttgagttttaaaagttgttgaatttatatggttaygtttyggggagyggggttttagatttggttygtttaggttatttgygyggygttygygttygttygttttygtttygyggygtyggttttyggttttyggttygtygtttttygtygttygtyggtygyggggygtatagygagttagagygyggtygygyggggttttatgtyggtyggygygtygtygtygttggggygtatggtttaggttgggyggttygygggggygtatatttttyggtyggggygyggggttygyggtttttttygtyggyggtatagygaaggyggtagygaggyggggygtgtttyggygttgtygyggygtagtaaagggttggggagtygyggtttygtttttyggggyggygaggagggaggtyggyggygttgtygtttayggtgygtgtttttyggygygyggtttttgtttttagtyggagtttygygtygatggggyggygttgtttagggtttggggtgaygygaygyggayggaygygagtttttttygygttgtygggtyggggggttttgttagaggtttygtygtygatyggygttatttaagttgttygggggtttygtttgagygttygttttgtagayggtygyggttyggagattggtaggaggygggtaygagaggygygyggggygagggygtygtggagygyggggygtggggaygygyggyggyggygtygygyggaggaggygygyggggatttyggggtttygtygttygygtttatygygttygtygtagagtygttygygttgtttagtygttttttttttygygtttgttttttygygygttygttttygtttttyggagtyggttttaatttygttygttyggttyggtttaygttattygtttttttygtttttygaaygggagttygagtttttggtttggtttyggtttttgttygtygttttattttgygggggtyggggtygtyg

SEQ ID NO: 1714 - DNA, 166 bp, synthetic construct
  misc_feature 1..166: note = Description of Artificial Sequence: Synthetic polynucleotide
  source 1..166: mol_type = other DNA
ygygygttgagggtgyggtgagttgagtgyggggttaagtatgttttggygtygatttygtttaggggtttaggatttggygtttaaggggttttttggygayggagattttygaygtagtagygattygyggttgtttaagttgatttygttygygtttygagyg

SEQ ID NO: 1715-1720 - skipped (6 entries)

SEQ ID NO: 1721 - DNA, 14 bp, synthetic construct
  misc_feature 1..14: note = Description of Artificial Sequence: Synthetic oligonucleotide
  source 1..14: mol_type = other DNA
ygygttgagaygyg

SEQ ID NO: 1722-1724 - skipped (3 entries)

SEQ ID NO: 1725 - DNA, 125 bp, synthetic construct
  misc_feature 1..125: note = Description of Artificial Sequence: Synthetic polynucleotide
  source 1..125: mol_type = other DNA
ygtttygygttttygtttygttatgtttttgttgttggggttgtgtttggggttgtttttgtgtgtggggtygtaggaagaggygtagagttggggttatttttyggagtaggtaagtggagtyg

SEQ ID NO: 1726 - skipped

SEQ ID NO: 1727 - DNA, 131 bp, synthetic construct
  misc_feature 1..131: note = Description of Artificial Sequence: Synthetic polynucleotide
  source 1..131: mol_type = other DNA
ygtgygtagtttagtttttttyggaygttttygttttygttygggtatatygtgtttygtatygaggtagagaggggtaygyggattttagtttttgygagtttttttgttygtygttattttatatttyg

SEQ ID NO: 1728 - DNA, 94 bp, synthetic construct
  misc_feature 1..94: note = Description of Artificial Sequence: Synthetic oligonucleotide
  source 1..94: mol_type = other DNA
ygggtygygtgggtttgggygygtygtggtgggtaagyggggttagyggagygggaattygtatatttttygagyggagtygaggataggttyg

SEQ ID NO: 1729-1730 - skipped (2 entries)

SEQ ID NO: 1731 - DNA, 27 bp, synthetic construct
  misc_feature 1..27: note = Description of Artificial Sequence: Synthetic oligonucleotide
  source 1..27: mol_type = other DNA
ygygtaagtatttttttttttatygyg

SEQ ID NO: 1732 - DNA, 164 bp, synthetic construct
  misc_feature 1..164: note = Description of Artificial Sequence: Synthetic polynucleotide
  source 1..164: mol_type = other DNA
ygygatttttttygggaggtgtttgygaaggyggttttgtygyggtgggggtggggaggttagggtttyggatygttggagttggggtygtagttagtttttggygagtgttttttggttgttgtygtaggggtttgttttttyggattttttttttaatttyg

SEQ ID NO: 1733-1734 - skipped (2 entries)

SEQ ID NO: 1735 - DNA, 68 bp, synthetic construct
  misc_feature 1..68: note = Description of Artificial Sequence: Synthetic oligonucleotide
  source 1..68: mol_type = other DNA
ygtatttgaaaatttygtygtagttattttttttttatgggaaagtttygatttyggygggtttagyg

SEQ ID NO: 1736 - DNA, 508 bp, synthetic construct
  misc_feature 1..508: note = Description of Artificial Sequence: Synthetic polynucleotide
  source 1..508: mol_type = other DNA
ygtaatttgggygygttagtataaattyggttttyggtttttttgaagttagttaagttygtatagggtttttagygtttggaaatttgagaggygtggaagggtggggagtttygygaagtttttagtttttgggtgtttttyggtttygygggggagygggtttggagttaaatyggtyggtygtaggttggagtagygggygtyggagygygyggtggggatgttygaaaaggagttagaggtttagtyggagagttygagaataygagggatgtttattttgtaatatggttttaagtttttttttgtttaygyggaagygtttttygttttatttygggttgtgtagggtygtttyggygattaagtygttttyggagtygggtattggggagtyggtgttgygttygttgttggagtyggggttygattgygtygttaggtagtygggttttttttgggyggttatggtgggygygtagygttygggttttygttgtygtyg

SEQ ID NO: 1737-1746 - skipped (10 entries)

SEQ ID NO: 1747 - DNA, 396 bp, synthetic construct
  misc_feature 1..396: note = Description of Artificial Sequence: Synthetic polynucleotide
  source 1..396: mol_type = other DNA
ygggyggyggyggttygttgtatatatttyggygtatttygttaggtygygtatagygtttygagtttaggygttttttygtttttttttygygttttgyggyggyggyggyggyggtagtagtagtagtaatatggttgttgatgggtgtttggggtggygttggyggygggaggagttttttygagtttttgygtyggttgttygttgttagttatggtaaatggtggyggyggyggyggyggtagtagyggyggyggyggyggyggyggaggtagtagttttagaatgagtagtaatatttaygygaattattttagtttagaygygttttttttttttttttttttttttttttttttttttttttttttttttttttttttttygtttttg

SEQ ID NO: 1748 - skipped

SEQ ID NO: 1749 - DNA, 70 bp, synthetic construct
  misc_feature 1..70: note = Description of Artificial Sequence: Synthetic oligonucleotide
  source 1..70: mol_type = other DNA
ygtgatttttttatttagagattatttagggagatgttttggatgggataagtagataaatggyggttyg

SEQ ID NO: 1750 - skipped

SEQ ID NO: 1751 - DNA, 68 bp, synthetic construct
  misc_feature 1..68: note = Description of Artificial Sequence: Synthetic oligonucleotide
  source 1..68: mol_type = other DNA
ygggagttyggtygygttttttagtttyggtattygygtttagygygtygygtttygygtttttygyg

SEQ ID NO: 1752 - DNA, 88 bp, synthetic construct
  misc_feature 1..88: note = Description of Artificial Sequence: Synthetic oligonucleotide
  source 1..88: mol_type = other DNA
ygtttygygtatygttttygttttagtttttagtggygyggygttttttygygatattygygggtttttaggagygagtygattttyg

SEQ ID NO: 1753-1754 - skipped (2 entries)

SEQ ID NO: 1755 - DNA, 87 bp, synthetic construct
  misc_feature 1..87: note = Description of Artificial Sequence: Synthetic oligonucleotide
  source 1..87: mol_type = other DNA
ygggggttttttaggtygyggygtttttygtttttttttatttttygattttttttygtttttaaaatgaggaaayggagtaattyg

SEQ ID NO: 1756 - DNA, 45 bp, synthetic construct
  misc_feature 1..45: note = Description of Artificial Sequence: Synthetic oligonucleotide
  source 1..45: mol_type = other DNA
ygtggtaaattygggtttygaygatagaggtagygtagaagttyg

SEQ ID NO: 1757 - skipped

SEQ ID NO: 1758 - DNA, 173 bp, synthetic construct
  misc_feature 1..173: note = Description of Artificial Sequence: Synthetic polynucleotide
  source 1..173: mol_type = other DNA
ygggtygtggttgatatygyggagaagttaggatttttatagtttttgttagatttgaaagtaagttggaaatygatagttgttttagttgttttagattttaatttggtttgggttttttttttttttatttgaaaatagatttagggtaatgtttaagagaattttaatyg

SEQ ID NO: 1759 - skipped

SEQ ID NO: 1760 - DNA, 48 bp, synthetic construct
  misc_feature 1..48: note = Description of Artificial Sequence: Synthetic oligonucleotide
  source 1..48: mol_type = other DNA
yggggtttttgtttttggttgtagttggagttttgygtttygttttyg

SEQ ID NO: 1761-1762 - skipped (2 entries)

SEQ ID NO: 1763 - DNA, 36 bp, synthetic construct
  misc_feature 1..36: note = Description of Artificial Sequence: Synthetic oligonucleotide
  source 1..36: mol_type = other DNA
yggggtagagggggygggaagttggygttayggtyg

SEQ ID NO: 1764-1768 - skipped (5 entries)

SEQ ID NO: 1769 - DNA, 97 bp, synthetic construct
  misc_feature 1..97: note = Description of Artificial Sequence: Synthetic oligonucleotide
  source 1..97: mol_type = other DNA
ygattygggagggaaaatttttgttttttttyggggtttgttttgttygttttttaaattygttttatatttttttygattttygtttttgtaagyg

SEQ ID NO: 1770-1771 - skipped (2 entries)

SEQ ID NO: 1772 - DNA, 67 bp, synthetic construct
  misc_feature 1..67: note = Description of Artificial Sequence: Synthetic oligonucleotide
  source 1..67: mol_type = other DNA
ygatgtttgtgtttgtggttttttgaggtagtgggagtggygtgtgaaggattgtgagagtttggyg

SEQ ID NO: 1773 - skipped

SEQ ID NO: 1774 - DNA, 29 bp, synthetic construct
  misc_feature 1..29: note = Description of Artificial Sequence: Synthetic oligonucleotide
  source 1..29: mol_type = other DNA
ygggtgattgttgattttttgttttgtyg

SEQ ID NO: 1775 - DNA, 49 bp, synthetic construct
  misc_feature 1..49: note = Description of Artificial Sequence: Synthetic oligonucleotide
  source 1..49: mol_type = other DNA
ygaggtttygygtattttygttygygttttagttatttaggttyggtyg

SEQ ID NO: 1776 - DNA, 188 bp, synthetic construct
  misc_feature 1..188: note = Description of Artificial Sequence: Synthetic polynucleotide
  source 1..188: mol_type = other DNA
ygtttattgaaaatttttagttggtgttggagyggyggygtgtggttaaygttaaggagygtgagygggtgagggatttttagggtygaygttygttttttttttttttgttttattattaaatatttggttaatattygggggttygtttatygtttattttygttygaggygatttygagttttyg

SEQ ID NO: 1777-1778 - skipped (2 entries)

SEQ ID NO: 1779 - DNA, 113 bp, synthetic construct
  misc_feature 1..113: note = Description of Artificial Sequence: Synthetic polynucleotide
  source 1..113: mol_type = other DNA
ygygggtgaaggyggagtygtagggttggtttttaaagggatgttttygttygagyggygagattagtttygttygtttttygtygyggtygygtygtagtygtttayggtyg

SEQ ID NO: 1780 - DNA, 208 bp, synthetic construct
  misc_feature 1..208: note = Description of Artificial Sequence: Synthetic polynucleotide
  source 1..208: mol_type = other DNA
ygygttygttatagtagygygttaggyggaygtygygggaatttgaygttygaggttygyggtttttaatgagagttttagaatatttttygtttttgayggttagyggtagygtygtygtttttygtagagygttygttttttygtttttagagttttagttttttttygagygatttygtagtttttttttygtttttattygtyg

SEQ ID NO: 1781 - DNA, 96 bp, synthetic construct
  misc_feature 1..96: note = Description of Artificial Sequence: Synthetic oligonucleotide
  source 1..96: mol_type = other DNA
ygtattttttygtattyggygtygtygtttygtygttttttttygtttgtagggtygtttygggtattttagggttgttgaggggygggygggtyg

SEQ ID NO: 1782 - DNA, 236 bp, synthetic construct
  misc_feature 1..236: note = Description of Artificial Sequence: Synthetic polynucleotide
  source 1..236: mol_type = other DNA
ygygtggaggttgygygtaggggttygggaygygggatagggatttygygtagtttaggygtyggggaatyggggttggagtyggggatttgagtttagyggaygtttttttygtttggaggttyggtayggatygggatattagggygttygtggtygtggttyggtttttggttgttgygggtygyggtttttagtgggtttttaggatttttttttayggygggtatttatyg

SEQ ID NO: 1783 - DNA, 211 bp, synthetic construct
  misc_feature 1..211: note = Description of Artificial Sequence: Synthetic polynucleotide
  source 1..211: mol_type = other DNA
ygtygttygygttttttgttttttattttttaatttttgygtggttttagggtttatatttttggagtttttttttttagtaaatagtgttgttttttatttaatagtagaggygtttaggagtttaggygatgtgtttaaggtygaatagagggatagtagtgagttgtttaatttttttagttgygtagttaggatayggttgggggyg

SEQ ID NO: 1784 - DNA, 193 bp, synthetic construct
  misc_feature 1..193: note = Description of Artificial Sequence: Synthetic polynucleotide
  source 1..193: mol_type = other DNA
ygygggggattttaggtygggayggagttttttttggttygttgtgygygtaygtttggaaaggygggatttaaggtagygatgttgygggaggttttgtagtgttaaygagttttygaayggtttygttttattttttttttgtgtgtttygtaagtttttgtttagtaaatygttatagtttyggygygyg

SEQ ID NO: 1785 - skipped

SEQ ID NO: 1786 - DNA, 199 bp, synthetic construct
  misc_feature 1..199: note = Description of Artificial Sequence: Synthetic polynucleotide
  source 1..199: mol_type = other DNA
ygtaataaattttygtagatatygtatttttaatgyggtgtttttttgtgttagtgtttyggyggtttttgtagggtgttaatgttayggttgtatatygttttttttttttattatttttatttgaatagatttggaggaggyggaaatggaaattagggtatgtttataagttggattygttagatttttttgttyg

SEQ ID NO: 1787 - DNA, 87 bp, synthetic construct
  misc_feature 1..87: note = Description of Artificial Sequence: Synthetic oligonucleotide
  source 1..87: mol_type = other DNA
ygyggtygttaygtttygttttttgtatttagtttttttggygttttygttgtagtatttaagattaggygtygtttttgttagtyg

SEQ ID NO: 1788 - DNA, 68 bp, synthetic construct
  misc_feature 1..68: note = Description of Artificial Sequence: Synthetic oligonucleotide
  source 1..68: mol_type = other DNA
ygtaaattgattatgaaatataygatgttaattyggagttgtattttttagttgggtattttygygyg

SEQ ID NO: 1789 - DNA, 61 bp, synthetic construct
  misc_feature 1..61: note = Description of Artificial Sequence: Synthetic oligonucleotide
  source 1..61: mol_type = other DNA
yggtgaaaattagtttgtggtgtattgagatttgtaaattattttttgaatgttaggggyg

SEQ ID NO: 1790 - DNA, 40 bp, synthetic construct
  misc_feature 1..40: note = Description of Artificial Sequence: Synthetic oligonucleotide
  source 1..40: mol_type = other DNA
yggatyggyggtagtagaagyggtagyggtaaagtattyg

SEQ ID NO: 1791 - DNA, 647 bp, synthetic construct
  misc_feature 1..647: note = Description of Artificial Sequence: Synthetic polynucleotide
  source 1..647: mol_type = other DNA
yggttgttgttattgttttgtygttgtygagtyggttatttgggtattygyggagtygygtygttgttatygtttyggyggtttttyggagtgygyggagggggyggyggaggagygagatatttatagtaatygaggatgygaggggygtttagtagtagygagtgtttgggagttaggaggaggttttygygygtyggtaatttttagtgttaggygttttgtagttttygygygtygygtttgggttygtatygttttygtagtgagggttygttygagyggtaagtttttttyggyggttaagtygatatttttttttygtttygtygtttatttygggtagtagtygyggaataatggagagygtagttagtagttttggagayggygttygggggaggaygygtygtygtygtygtygttgtygttagggtaggygygygtygygtggagtygggygggtgygagggygygyggyggggggtggggggtaygygtygygyggggggygggggtagtggggggygygygygygggttyggggagttygyggggagagttyggygttyggygtagygyggygyggttaagtttygygtttttttygttttttttyggygygttygttttygtttygtygttyg

SEQ ID NO: 1792 - DNA, 327 bp, synthetic construct
  misc_feature 1..327: note = Description of Artificial Sequence: Synthetic polynucleotide
  source 1..327: mol_type = other DNA
ygaggygygggttgagtttttagtatttggtttgagyggygtgggtagtagtttgtatygyggatatttttaattttgtygygtttgygtygtattttggtygtggtagygatttttygggtatttttgaggtygtttttagttttataagtatttagtygtttattttagagtagyggygtygatygttttaagaggagttagttttygatatygttttttatttatttttttatatttttatygttggagggggtgagtgtygtggataggygttttygttyggggatagtttagyggyggtagttagttygattttttttygyg

SEQ ID NO: 1793 - skipped

SEQ ID NO: 1794 - DNA, 324 bp, synthetic construct
  misc_feature 1..324: note = Description of Artificial Sequence: Synthetic polynucleotide
  source 1..324: mol_type = other DNA
ygtaagggtaattattggaygttggattyggtttgygaagatatgttygagaagggtaattatyggygtygtygtygtatgaagaggttttttyggtygtygttygygtatttttagttyggtaaggggtttttyggggtyggaggygtygtaggygggtgyggygtggygggygtyggggtygayggttayggttatttggygttttttaagtatttgtagtttggtttttttaataattygtggtygttatygtagttttttttatttatgttttatgttttttgttagatggyggtagtygtagyggttgtagtagttgyg

SEQ ID NO: 1795 - DNA, 77 bp, synthetic construct
  misc_feature 1..77: note = Description of Artificial Sequence: Synthetic oligonucleotide
  source 1..77: mol_type = other DNA
ygtttygtygtgttygatgggtgygtttttagygttgtygtygyggygttyggtttygggttttygtygttgygtyg

SEQ ID NO: 1796 - DNA, 158 bp, synthetic construct
  misc_feature 1..158: note = Description of Artificial Sequence: Synthetic polynucleotide
  source 1..158: mol_type = other DNA
ygtttttatttyggtatagatagtttttaaagttgttygtattttttagatttygttttttgtttagttttyggatttygtttaggggttgagttgaygttygygggtggatttttttggttygttgygtagggaattgatttygggaatttagggyg

SEQ ID NO: 1797 - DNA, 79 bp, synthetic construct
  misc_feature 1..79: note = Description of Artificial Sequence: Synthetic oligonucleotide
  source 1..79: mol_type = other DNA
ygygygtttygygtttttggyggtygtagygttgtttattaattgatttttttattgatttatttaatttttaggagyg

SEQ ID NO: 1798 - DNA, 137 bp, synthetic construct
  misc_feature 1..137: note = Description of Artificial Sequence: Synthetic polynucleotide
  source 1..137: mol_type = other DNA
ygttttggagyggtgggaggaygyggagygtygttttttggttttygatattttgttygttttttttagtgggtttgtggttgygttttttygaaggaagtaataaatttttttgattttgggggttagaggagayg

SEQ ID NO: 1799 - DNA, 112 bp, synthetic construct
  misc_feature 1..112: note = Description of Artificial Sequence: Synthetic polynucleotide
  source 1..112: mol_type = other DNA
ygttgyggtatttagyggtttatyggggttgtattgttgtagyggttttttgtgttatttgtagtttaggaggttgagtatagtgagtattagtagtagtgtatagttygyg

SEQ ID NO: 1800-1801 - skipped (2 entries)

SEQ ID NO: 1802 - DNA, 282 bp, synthetic construct
  misc_feature 1..282: note = Description of Artificial Sequence: Synthetic polynucleotide
  source 1..282: mol_type = other DNA
yggttttttagttttagttgtgygttttygttygggygaggtggggttgatygyggtygtttgtataygttttttttggttygygttttyggtttgggagggyggattygtttattttaygatggtttyggttttggaagggattgttttygtgattygtttttttaatagtygttaataattttttttaaygttttttgygyggttygtttttgagaattttggttygggagagygaygyggggttttyggggttgygtaggttgyggygttttgtttayg

SEQ ID NO: 1803 - DNA, 81 bp, synthetic construct
  misc_feature 1..81: note = Description of Artificial Sequence: Synthetic oligonucleotide
  source 1..81: mol_type = other DNA
yggygyggyggyggggggygtttygtaagttygyggttttgagyggttattygygtagtaagttgggygagttggtagtyg

SEQ ID NO: 1804 - DNA, 53 bp, synthetic construct
  misc_feature 1..53: note = Description of Artificial Sequence: Synthetic oligonucleotide
  source 1..53: mol_type = other DNA
ygyggtttttgttttttgygttagygtgagttyggttagggtttttayggtyg

SEQ ID NO: 1805 - DNA, 40 bp, synthetic construct
  misc_feature 1..40: note = Description of Artificial Sequence: Synthetic oligonucleotide
  source 1..40: mol_type = other DNA
yggygttagtttaygttttygttggygttttttyggygyg

SEQ ID NO: 1806 - DNA, 206 bp, synthetic construct
  misc_feature 1..206: note = Description of Artificial Sequence: Synthetic polynucleotide
  source 1..206: mol_type = other DNA
yggtygatttatttggtgtygygtgygttggyggttygygyggtagttaagttaaaggtygaggtygaggtygagygyggygtttagtagtayggygggggttagtagggygggygtyggtygtagygygtttygttttagtagtagtygygygtygtttttgtaggtygtttygtygygggttattyggggygtttaggttgtyg

SEQ ID NO: 1807 - DNA, 38 bp, synthetic construct
  misc_feature 1..38: note = Description of Artificial Sequence: Synthetic oligonucleotide
  source 1..38: mol_type = other DNA
ygttgttgttgygyggggyggyggtygtygtgttttyg

SEQ ID NO: 1808 - skipped

SEQ ID NO: 1809 - DNA, 25 bp, synthetic construct
  misc_feature 1..25: note = Description of Artificial Sequence: Synthetic oligonucleotide
  source 1..25: mol_type = other DNA
ygtgtgtaygygttgtattygttyg

SEQ ID NO: 1810 - DNA, 79 bp, synthetic construct
  misc_feature 1..79: note = Description of Artificial Sequence: Synthetic oligonucleotide
  source 1..79: mol_type = other DNA
ygttttttttttttttttttttttattaaatattatttgggaattgtttaaattttttttttaaaaaaagagagaggyg

SEQ ID NO: 1811 - DNA, 33 bp, synthetic construct
  misc_feature 1..33: note = Description of Artificial Sequence: Synthetic oligonucleotide
  source 1..33: mol_type = other DNA
yggtttygygtggygtttyggtygttgttttyg

SEQ ID NO: 1812 - DNA, 132 bp, synthetic construct
  misc_feature 1..132: note = Description of Artificial Sequence: Synthetic polynucleotide
  source 1..132: mol_type = other DNA
yggygggyggyggyggygyggagttgtatayggagaagayggagtgygggygttayggagagtattygtttaagtaggaygttygyggggaggtggttatggttagttyggtttaygatygtttggtttgyg

SEQ ID NO: 1813 - DNA, 32 bp, synthetic construct
  misc_feature 1..32: note = Description of Artificial Sequence: Synthetic oligonucleotide
  source 1..32: mol_type = other DNA
ygtttggtatttttttttttgtttygagggyg

SEQ ID NO: 1814-1815 - skipped (2 entries)

SEQ ID NO: 1816 - DNA, 20 bp, synthetic construct
  misc_feature 1..20: note = Description of Artificial Sequence: Synthetic oligonucleotide
  source 1..20: mol_type = other DNA
ygagtatgttagyggygtyg

SEQ ID NO: 1817 - DNA, 85 bp, synthetic construct
  misc_feature 1..85: note = Description of Artificial Sequence: Synthetic oligonucleotide
  source 1..85: mol_type = other DNA
yggtaygttttttttttyggtygtttttttttatataagygtaggtagagggygygttagttatgttttgtttttgygttygtyg

SEQ ID NO: 1818 - DNA, 230 bp, synthetic construct
  misc_feature 1..230: note = Description of Artificial Sequence: Synthetic polynucleotide
  source 1..230: mol_type = other DNA
yggtttygygaaattyggttttttagttygygggaygygttgtttgttaggygggttyggyggtatttygggggygggaggggtyggtygtagggtttttagtttggygttygyggggygttygtagygaaggggtgggtgtygttygtgaaygtagtagggattagtttagttygygttygtttttgggtttyggttatygttttttygttattttttyggtttttgyg

SEQ ID NO: 1819 - DNA, 84 bp, synthetic construct
  misc_feature 1..84: note = Description of Artificial Sequence: Synthetic oligonucleotide
  source 1..84: mol_type = other DNA
ygggtygttagttttagggtgtygggttttaattaaggtttygaagtttttaygtatttgagggtattttgattagtttttgyg

SEQ ID NO: 1820 - DNA, 42 bp, synthetic construct
  misc_feature 1..42: note = Description of Artificial Sequence: Synthetic oligonucleotide
  source 1..42: mol_type = other DNA
ygygatttttttttgatttagttaaayggaaaagttygygyg

SEQ ID NO: 1821 - DNA, 45 bp, synthetic construct
  misc_feature 1..45: note = Description of Artificial Sequence: Synthetic oligonucleotide
  source 1..45: mol_type = other DNA
ygtygtgttttttttygttttygaaagggtagaaagagtygttyg

SEQ ID NO: 1822 - DNA, 26 bp, synthetic construct
  misc_feature 1..26: note = Description of Artificial Sequence: Synthetic oligonucleotide
  source 1..26: mol_type = other DNA
ygttygttagtattttttgtttygyg

SEQ ID NO: 1823 - DNA, 50 bp, synthetic construct
  misc_feature 1..50: note = Description of Artificial Sequence: Synthetic oligonucleotide
  source 1..50: mol_type = other DNA
ygaggtttaggtggaggttgaggttgtygygygtygygggaggagtttyg

SEQ ID NO: 1824 - DNA, 56 bp, synthetic construct
  misc_feature 1..56: note = Description of Artificial Sequence: Synthetic oligonucleotide
  source 1..56: mol_type = other DNA
ygtttttgagttagggaygygygtggggggtgggygtgtaygygggtgggttagyg

SEQ ID NO: 1825 - DNA, 44 bp, synthetic construct
  misc_feature 1..44: note = Description of Artificial Sequence: Synthetic oligonucleotide
  source 1..44: mol_type = other DNA
ygtttttatygygtaygygtttttttygygygygtataygttyg

SEQ ID NO: 1826-1827 - skipped (2 entries)

SEQ ID NO: 1828 - DNA, 58 bp, synthetic construct
  misc_feature 1..58: note = Description of Artificial Sequence: Synthetic oligonucleotide
  source 1..58: mol_type = other DNA
ygyggggtagttgtttaagtggatygatattatygtttgtttggygggtaggygggyg

SEQ ID NO: 1829 - DNA, 151 bp, synthetic construct
  misc_feature 1..151: note = Description of Artificial Sequence: Synthetic polynucleotide
  source 1..151: mol_type = other DNA
yggtagaagatagygtttttaggattagygattttgtggtttattyggttattgggtttyggygtaaattttttttaggtagtgygggygatgttgattgtagaygtygggtagggttttygtgygggygggagygggggaagttagtgyg

SEQ ID NO: 1830 - DNA, 17 bp, synthetic construct
  misc_feature 1..17: note = Description of Artificial Sequence: Synthetic oligonucleotide
  source 1..17: mol_type = other DNA
yggattttttaggatyg

SEQ ID NO: 1831 - DNA, 70 bp, synthetic construct
  misc_feature 1..70: note = Description of Artificial Sequence: Synthetic oligonucleotide
  source 1..70: mol_type = other DNA
ygttygttgtttttygttgygtttagggatggagggttttattatttatggaattgttggtttttttgyg

SEQ ID NO: 1832 - DNA, 59 bp, synthetic construct
  misc_feature 1..59: note = Description of Artificial Sequence: Synthetic oligonucleotide
  source 1..59: mol_type = other DNA
ygtttttgagatttygttgagaaatttttagygggttagygtttgggygttgggygtyg

SEQ ID NO: 1833 - DNA, 25 bp, synthetic construct
  misc_feature 1..25: note = Description of Artificial Sequence: Synthetic oligonucleotide
  source 1..25: mol_type = other DNA
ygttgggtaatttttattygagtyg

SEQ ID NO: 1834 - DNA, 57 bp, synthetic construct
  misc_feature 1..57: note = Description of Artificial Sequence: Synthetic oligonucleotide
  source 1..57: mol_type = other DNA
yggygttgaygttttggttttgggggttgtttggttggtgttaggtagyggaagayg

SEQ ID NO: 1835 - DNA, 111 bp, synthetic construct
  misc_feature 1..111: note = Description of Artificial Sequence: Synthetic polynucleotide
  source 1..111: mol_type = other DNA
ygagtagttttaygttttgttaaggayggtaggtgtaagggtygggggattttttgayggggtygttttttygggtayggggaggtttttatygagttttaattttgaayg

SEQ ID NO: 1836 - DNA, 211 bp, synthetic construct
  misc_feature 1..211: note = Description of Artificial Sequence: Synthetic polynucleotide
  source 1..211: mol_type = other DNA
ygggtygttgtttttgttgtattatgtaaaggtggttgggaaagygygttgatttatatttatatagtttattttttttttatagtatgtgattaataygtatttyggggaggagggagygyggttgggggtgttaatyggaagggaatagatagtgagtgttattttgttgggaggttttagaagtaaagygttaaygaygatagtagyg

SEQ ID NO: 1837 - DNA, 75 bp, synthetic construct
  misc_feature 1..75: note = Description of Artificial Sequence: Synthetic oligonucleotide
  source 1..75: mol_type = other DNA
ygtttttaygygygttgtyggtatttgttygttttgttgtaatttgttgtagtgtttgaaagagtagtaggagyg

SEQ ID NO: 1838 - skipped

SEQ ID NO: 1839 - DNA, 66 bp, synthetic construct
  misc_feature 1..66: note = Description of Artificial Sequence: Synthetic oligonucleotide
  source 1..66: mol_type = other DNA
ygggygttggagaaggygtttggygygaagttgggyggygtttygagggyggaggataggtggtyg

SEQ ID NO: 1840 - skipped

SEQ ID NO: 1841 - DNA, 163 bp, synthetic construct
  misc_feature 1..163: note = Description of Artificial Sequence: Synthetic polynucleotide
  source 1..163: mol_type = other DNA
yggggyggygggygtatgygygtgygyggtgyggttttagttttggttgtygtygtttgtygtygtygtygygatgtttattttagttaaagyggttgygggtttggggattyggttygggtagyggagttttyggattygtygattygtygaggagygygyg

SEQ ID NO: 1842 - DNA, 99 bp, synthetic construct
  misc_feature 1..99: note = Description of Artificial Sequence: Synthetic oligonucleotide
  source 1..99: mol_type = other DNA
yggagtaaagttagygygtttygyggttyggaatttagttggttygttatttttttatttttgygattttattttygatygygttttagggtagaagyg

SEQ ID NO: 1843 - DNA, 96 bp, synthetic construct
  misc_feature 1..96: note = Description of Artificial Sequence: Synthetic oligonucleotide
  source 1..96: mol_type = other DNA
yggyggyggyggtagttttagtygygttygttatatatatttttattygttyggtgtataygtygygtygygggtagtgtygtttgyggaggygyg

SEQ ID NO: 1844 - skipped

SEQ ID NO: 1845 - DNA, 16 bp, synthetic construct
  misc_feature 1..16: note = Description of Artificial Sequence: Synthetic oligonucleotide
  source 1..16: mol_type = other DNA
ygtgttaatttygtyg

SEQ ID NO: 1846 - skipped

SEQ ID NO: 1847 - DNA, 141 bp, synthetic construct
  misc_feature 1..141: note = Description of Artificial Sequence: Synthetic polynucleotide
  source 1..141: mol_type = other DNA
ygtttattttgtagtygagtatataaggttygtygaagttatygagtaggttttgtagttgtaggtagttttygtygtygygttttattaygtygtggaaggtaggtaygtagtygygtagygygttagttattagtygyg

SEQ ID NO: 1848 - skipped

SEQ ID NO: 1849 - DNA, 37 bp, synthetic construct
  misc_feature 1..37: note = Description of Artificial Sequence: Synthetic oligonucleotide
  source 1..37: mol_type = other DNA
ygaggtgttgygggttttgtgyggttggttgggaayg

SEQ ID NO: 1850 - DNA, 52 bp, synthetic construct
  misc_feature 1..52: note = Description of Artificial Sequence: Synthetic oligonucleotide
  source 1..52: mol_type = other DNA
ygaggygttttygttttygttatttatatagggygttaagtgtttygattyg

SEQ ID NO: 1851-1854 - skipped (4 entries)

SEQ ID NO: 1855 - DNA, 17 bp, synthetic construct
  misc_feature 1..17: note = Description of Artificial Sequence: Synthetic oligonucleotide
  source 1..17: mol_type = other DNA
ygtttygttttaattyg

SEQ ID NO: 1856 - DNA, 136 bp, synthetic construct
  misc_feature 1..136: note = Description of Artificial Sequence: Synthetic polynucleotide
  source 1..136: mol_type = other DNA
ygyggggggaggtttttggttygtygttttygttgtygtttgatygtatttttggagggtttygtattttgttaggtttttggaggtaaatatatattttygatttataattggttttygygttaggggattygyg

SEQ ID NO: 1857 - DNA, 31 bp, synthetic construct
  misc_feature 1..31: note = Description of Artificial Sequence: Synthetic oligonucleotide
  source 1..31: mol_type = other DNA
yggttagggagtgagyggggygttgggygyg

SEQ ID NO: 1858 - DNA, 25 bp, synthetic construct
  misc_feature 1..25: note = Description of Artificial Sequence: Synthetic oligonucleotide
  source 1..25: mol_type = other DNA
ygttaattagattttagggtgtayg

SEQ ID NO: 1859 - DNA, 12 bp, synthetic construct
  misc_feature 1..12: note = Description of Artificial Sequence: Synthetic oligonucleotide
  source 1..12: mol_type = other DNA
ygttygttaayg

SEQ ID NO: 1860 - skipped

SEQ ID NO: 1861 - DNA, 199 bp, synthetic construct
  misc_feature 1..199: note = Description of Artificial Sequence: Synthetic polynucleotide
  source 1..199: mol_type = other DNA
ygtagygtgtagtygyggaatagygtttttagttttgggtaagygaatttttygtygtaygttyggagttygygtyggyggtttgtttyggtygttygttyggygttttygggttygttygygtygttttygtygtygttttygtygygyggygttttygttattttagygttatgtagyggtygyggtygygggygyg

SEQ ID NO: 1862 - DNA, 91 bp, synthetic construct
  misc_feature 1..91: note = Description of Artificial Sequence: Synthetic oligonucleotide
  source 1..91: mol_type = other DNA
ygtgggggygyggygygggygataygtgygggtygttaggagggggagggggaygygygtygtygggttygttattttgtattyggggtyg

SEQ ID NO: 1863 - DNA, 108 bp, synthetic construct
  misc_feature 1..108: note = Description of Artificial Sequence: Synthetic polynucleotide
  source 1..108: mol_type = other DNA
ygttttttttatggattttttagtatttgtaggttataggataatagaagttatagtagagttatygaggaattttaggaayggaggagatggaatagtggagaygyg

SEQ ID NO: 1864 - DNA, 13 bp, synthetic construct
  misc_feature 1..13: note = Description of Artificial Sequence: Synthetic oligonucleotide
  source 1..13: mol_type = other DNA
ygaaatyggtgyg

SEQ ID NO: 1865 - DNA, 176 bp, synthetic construct
  misc_feature 1..176: note = Description of Artificial Sequence: Synthetic polynucleotide
  source 1..176: mol_type = other DNA
ygggggyggyggggtgatagttttygtgtatgaattagttattttttaggtttygtttyggygggggtyggtyggaygttygtttygtataaagygggtattygggtygtttggagtagaaagtygygtattttttttygttaggygttttttyggaygttttgtttagygggtyg

SEQ ID NO: 1866 - skipped

SEQ ID NO: 1867 - DNA, 157 bp, synthetic construct
  misc_feature 1..157: note = Description of Artificial Sequence: Synthetic polynucleotide
  source 1..157: mol_type = other DNA
ygggygtttttttaggtttggtygaggggygtygygtagaggyggyggyggygtayggaggyggtagaygaygygttttyggygttygtagtttyggtttygygttttygyggtttaaagtaattttgggagtygtygtttttygyggaatttttyg

SEQ ID NO: 1868 - DNA, 66 bp, synthetic construct
  misc_feature 1..66: note = Description of Artificial Sequence: Synthetic oligonucleotide
  source 1..66: mol_type = other DNA
yggtygyggygggagggatagggggtttgggtgggaagggagygygagggtttttagyggttygyg

SEQ ID NO: 1869 - DNA, 498 bp, synthetic construct
  misc_feature 1..498: note = Description of Artificial Sequence: Synthetic polynucleotide
  source 1..498: mol_type = other DNA
ygtgygttaggyggaaatgttttagtaggttttygygtatygggtygttyggggggtagtaggggtaggyggyggygggtaggtygagygygtygggyggtggygtagyggggtaygagtattttttgtgygttaggtaggtttygaggttgtggaagtttaygyggtaggtygtgtattygtggtagtyggttagygtyggtgtyggggtttyggggagygggygtygyggttttttgtttaggtygatggggtygtyggtygyggggtygggygagygygtaggggygaggtyggggtygttttygttttygttttygggtygyggygattygggygygggggygtggtygggyggyggggggggyggggygtyggtygygtgtagttygtagagtttgyggygtttgygygtgygtataggygyggygggagagggggtygggggygyggtyggtttagggggtttygggggygyggtyggtyggygyggyggyg

SEQ ID NO: 1870 - DNA, 27 bp, synthetic construct
  misc_feature 1..27: note = Description of Artificial Sequence: Synthetic oligonucleotide
  source 1..27: mol_type = other DNA
ygagygygaagggygttyggattygyg

SEQ ID NO: 1871-1872 - skipped (2 entries)

SEQ ID NO: 1873 - DNA, 16 bp, synthetic construct
  misc_feature 1..16: note = Description of Artificial Sequence: Synthetic oligonucleotide
  source 1..16: mol_type = other DNA
ygygaggtaggygayg

SEQ ID NO: 1874 - DNA, 53 bp, synthetic construct
  misc_feature 1..53: note = Description of Artificial Sequence: Synthetic oligonucleotide
  source 1..53: mol_type = other DNA
ygtygtaagagaagttgttaagtttygtaggttttgattyggygtttttygyg

SEQ ID NO: 1875-1878 - skipped (4 entries)

SEQ ID NO: 1879 - DNA, 14 bp, synthetic construct
  misc_feature 1..14: note = Description of Artificial Sequence: Synthetic oligonucleotide
  source 1..14: mol_type = other DNA
ygtaggtggatayg

SEQ ID NO: 1880 - DNA, 186 bp, synthetic construct
  misc_feature 1..186: note = Description of Artificial Sequence: Synthetic polynucleotide
  source 1..186: mol_type = other DNA
ygttatggagaaaattaatggaggaaaaattatagagttattygaaatagttgygttgtttattattyggtgtttgagtttgttttttttgtaattagattatatgtgaggtagttttagttaattgtttgtgttatttatyggggaattttagttttatttgtgaatatttaggttttttygtyg

SEQ ID NO: 1881 - DNA, 79 bp, synthetic construct
  misc_feature 1..79: note = Description of Artificial Sequence: Synthetic oligonucleotide
  source 1..79: mol_type = other DNA
ygygtattttttttatttygatatttattgttatttttatagyggagygaggggtttygtygagggygagygtatttyg

SEQ ID NO: 1882 - DNA, 49 bp, synthetic construct
  misc_feature 1..49: note = Description of Artificial Sequence: Synthetic oligonucleotide
  source 1..49: mol_type = other DNA
ygygggggygtttttygttgtttgtagggagygyggygyggaygyggyg

SEQ ID NO: 1883 - DNA, 17 bp, synthetic construct
  misc_feature 1..17: note = Description of Artificial Sequence: Synthetic oligonucleotide
  source 1..17: mol_type = other DNA
ygygaayggtttattyg

SEQ ID NO: 1884-1886 - skipped (3 entries)

SEQ ID NO: 1887 - DNA, 165 bp, synthetic construct
  misc_feature 1..165: note = Description of Artificial Sequence: Synthetic polynucleotide
  source 1..165: mol_type = other DNA
yggggtttggtaggaagtgtagtgtattttttagttttagggtaattaggatagtatgaattttttattttgtggtagaataaayggttagygtttygatgtggygygttygatttttttttatagagtttaaaagttaygtttaattaaattgtagygttttyg

SEQ ID NO: 1888 - DNA, 14 bp, synthetic construct
  misc_feature 1..14: note = Description of Artificial Sequence: Synthetic oligonucleotide
  source 1..14: mol_type = other DNA
ygttgattygygyg

SEQ ID NO: 1889-1890 - skipped (2 entries)

SEQ ID NO: 1891 - DNA, 97 bp, synthetic construct
  misc_feature 1..97: note = Description of Artificial Sequence: Synthetic oligonucleotide
  source 1..97: mol_type = other DNA
ygtttygtaygttygtaygtttagyggggttygtattgagtatgggygyggyggtygtgygttggtatttgtgygtgttgttggttttgggtatayg

SEQ ID NO: 1892 - skipped

SEQ ID NO: 1893 - DNA, 98 bp, synthetic construct
  misc_feature 1..98: note = Description of Artificial Sequence: Synthetic oligonucleotide
  source 1..98: mol_type = other DNA
ygaggtttagtttttggttttaaggaataaattygttggtttgaaagggagttayggtagaagtttaggggtagagyggygggagygygygattygyg

SEQ ID NO: 1894 - DNA, 69 bp, synthetic construct
  misc_feature 1..69: note = Description of Artificial Sequence: Synthetic oligonucleotide
  source 1..69: mol_type = other DNA
ygyggaaggttygygygttttgygtygtygtygtttagtgtygtygttagtatttttttygttttttyg

SEQ ID NO: 1895-1898 - skipped (4 entries)

SEQ ID NO: 1899 - DNA, 103 bp, synthetic construct
  misc_feature 1..103: note = Description of Artificial Sequence: Synthetic polynucleotide
  source 1..103: mol_type = other DNA
ygygttygtygttttyggaggagygggttggtygatygttatygygtygtttttyggtygttttygaagtygttttatygyggtttttgtygttttggggtyg

SEQ ID NO: 1900 - skipped

SEQ ID NO: 1901 - DNA, 21 bp, synthetic construct
  misc_feature 1..21: note = Description of Artificial Sequence: Synthetic oligonucleotide
  source 1..21: mol_type = other DNA
ygtygtygtygttgagagtyg

SEQ ID NO: 1902 - DNA, 148 bp, synthetic construct
  misc_feature 1..148: note = Description of Artificial Sequence: Synthetic polynucleotide
  source 1..148: mol_type = other DNA
ygygygggygygaggggttgggaygygggagttttttgagtgyggagygyggagttttggtgtttyggygtattgtagttatattttygggtygygygttttygtygttttttattygygtygtagggtttttttttttgaggygtyg

SEQ ID NO: 1903-1904 - skipped (2 entries)

SEQ ID NO: 1905 - DNA, 26 bp, synthetic construct
  misc_feature 1..26: note = Description of Artificial Sequence: Synthetic oligonucleotide
  source 1..26: mol_type = other DNA
yggttattaygygttgtttttyggyg

SEQ ID NO: 1906 - DNA, 119 bp, synthetic construct
  misc_feature 1..119: note = Description of Artificial Sequence: Synthetic polynucleotide
  source 1..119: mol_type = other DNA
ygttygatgatgaggatgtatttttygtaggtgtagtttttgaagyggtagtaaygtttgtggtttttgagttaggataggaygttatggttgyggtagygygygtatttgggygtgyg

SEQ ID NO: 1907 - DNA, 66 bp, synthetic construct
  misc_feature 1..66: note = Description of Artificial Sequence: Synthetic oligonucleotide
  source 1..66: mol_type = other DNA
ygttttattttgttgaggtygttttyggttttttttgatttaggttgggygggaaaggtygggtyg

SEQ ID NO: 1908 - DNA, 60 bp, synthetic construct
  misc_feature 1..60: note = Description of Artificial Sequence: Synthetic oligonucleotide
  source 1..60: mol_type = other DNA
ygyggttggggtttygygttttttggagygttttttgtttagataygaygatttygttyg

SEQ ID NO: 1909 - skipped

SEQ ID NO: 1910 - DNA, 124 bp, synthetic construct
  misc_feature 1..124: note = Description of Artificial Sequence: Synthetic polynucleotide
  source 1..124: mol_type = other DNA
yggyggtaggagaagtttaaggttygagyggttygtagtttttaygtttgtatttttttattttygttagttygatggttygtttygyggygtgtattggagtaagtaggtttygtttygagyg

SEQ ID NO: 1911 - skipped

SEQ ID NO: 1912 - DNA, 156 bp, synthetic construct
  misc_feature 1..156: note = Description of Artificial Sequence: Synthetic polynucleotide
  source 1..156: mol_type = other DNA
ygtttyggtttttatygtygygtttttataggttattaggtgtygttygtttagaatgttaattatggygtagataygtagttatttgagattygaggatatttgtaggaggatgattatttgyggggaggyggyggygagygtygyggtgtttyg

SEQ ID NO: 1913 - skipped

SEQ ID NO: 1914 - DNA, 91 bp, synthetic construct
  misc_feature 1..91: note = Description of Artificial Sequence: Synthetic oligonucleotide
  source 1..91: mol_type = other DNA
ygttttaggaatgattyggtgatatyggtygatgattttttttatagtttgtyggtgagyggyggyggaggtaaggtttyggyggygygyg

SEQ ID NO: 1915-1916 - skipped (2 entries)

SEQ ID NO: 1917 - DNA, 89 bp, synthetic construct
  misc_feature 1..89: note = Description of Artificial Sequence: Synthetic oligonucleotide
  source 1..89: mol_type = other DNA
ygtygagttgtaggygygygtttaatygttttgttgggtttaygyggtttgagaggtyggagygtttaattgttggtaygygagtaayg

SEQ ID NO: 1918 - DNA, 13 bp, synthetic construct
  misc_feature 1..13: note = Description of Artificial Sequence: Synthetic oligonucleotide
  source 1..13: mol_type = other DNA
yggattaaagayg

SEQ ID NO: 1919 - skipped

SEQ ID NO: 1920 - DNA, 47 bp, synthetic construct
  misc_feature 1..47: note = Description of Artificial Sequence: Synthetic oligonucleotide
  source 1..47: mol_type = other DNA
ygygatgtggtttygtttggttttttgttgttggggtttggygttyg

SEQ ID NO: 1921-1922 - skipped (2 entries)

SEQ ID NO: 1923 - DNA, 159 bp, synthetic construct
  misc_feature 1..159: note = Description of Artificial Sequence: Synthetic polynucleotide
  source 1..159: mol_type = other DNA
ygtttttygtygaggygtaggggtagttatattgyggggygtttgggygayggygttaaagttagggttataagggtaygggataagyggggyggggggagtaggagattaggatagaggtyggygttygtygygggygtttttaygtygygggtatyg

SEQ ID NO: 1924-1926 - skipped (3 entries)

SEQ ID NO: 1927 - DNA, 78 bp, synthetic construct
  misc_feature 1..78: note = Description of Artificial Sequence: Synthetic oligonucleotide
  source 1..78: mol_type = other DNA
yggtygttttttygaygttygyggttttttattgygtygaggygagygttayggttaaagtttaagtttyggygttyg

SEQ ID NO: 1928 - skipped

SEQ ID NO: 1929 - DNA, 48 bp, synthetic construct
  misc_feature 1..48: note = Description of Artificial Sequence: Synthetic oligonucleotide
  source 1..48: mol_type = other DNA
ygygttaattyggtygttgtgtayggtygggtgygaaattttttygyg

SEQ ID NO: 1930-1932 - skipped (3 entries)

SEQ ID NO: 1933 - DNA, 157 bp, synthetic construct
  misc_feature 1..157: note = Description of Artificial Sequence: Synthetic polynucleotide
  source 1..157: mol_type = other DNA
ygtgtttaattggtatttgttattaatatgtttgtttttatttaaatggtttagagtaaggttttgattaaattagtatttttaygttaatatttagtagygtttttggtttttggtagattttttttttagttgttaaagtaaaattatagaagyg

SEQ ID NO: 1934 - skipped

SEQ ID NO: 1935 - DNA, 82 bp, synthetic construct
  misc_feature 1..82: note = Description of Artificial Sequence: Synthetic oligonucleotide
  source 1..82: mol_type = other DNA
ygtattygyggggagggyggygagyggggattagtygaagtygggagaggggygtttttayggggygggaaattggygygyg

SEQ ID NO: 1936 - DNA, 23 bp, synthetic construct
  misc_feature 1..23: note = Description of Artificial Sequence: Synthetic oligonucleotide
  source 1..23: mol_type = other DNA
yggttaggtgaggyggttaggyg

SEQ ID NO: 1937 - DNA, 38 bp, synthetic construct
  misc_feature 1..38: note = Description of Artificial Sequence: Synthetic oligonucleotide
  source 1..38: mol_type = other DNA
ygaattygtaaagttgttygtagaygygygggaattyg

SEQ ID NO: 1938 - skipped

SEQ ID NO: 1939 - DNA, 165 bp, synthetic construct
  misc_feature 1..165: note = Description of Artificial Sequence: Synthetic polynucleotide
  source 1..165: mol_type = other DNA
ygygggttgtttagygtgttagattttttttttttggaygtgygtaagttgttggtggtyggtaatygtatttagyggattttygaggatttttttattttttayggygatttggtttatttggattttaggaataattygttgygttygttggaggagggtayg

SEQ ID NO: 1940-1942 - skipped (3 entries)

SEQ ID NO: 1943 - DNA, 23 bp, synthetic construct
  misc_feature 1..23: note = Description of Artificial Sequence: Synthetic oligonucleotide
  source 1..23: mol_type = other DNA
ygataggyggttttyggatatyg

SEQ ID NO: 1944 - skipped

SEQ ID NO: 1945 - DNA, 66 bp, synthetic construct
  misc_feature 1..66: note = Description of Artificial Sequence: Synthetic oligonucleotide
  source 1..66: mol_type = other DNA
yggygttttyggggttgttgygygttygygtttagagttgtygttttagggagttygttayggtyg

SEQ ID NO: 1946 - DNA, 43 bp, synthetic construct
  misc_feature 1..43: note = Description of Artificial Sequence: Synthetic oligonucleotide
  source 1..43: mol_type = other DNA
ygggygygtagttygttygygyggtttggattttttttgttyg

SEQ ID NO: 1947 - skipped

SEQ ID NO: 1948 - DNA, 62 bp, synthetic construct
  misc_feature 1..62: note = Description of Artificial Sequence: Synthetic oligonucleotide
  source 1..62: mol_type = other DNA
ygygttgtaygaggatggttaygaggygtagttggagtygtygtygtygtygtatttgggyg

SEQ ID NO: 1949 - skipped

SEQ ID NO: 1950 - DNA, 138 bp, synthetic construct
  misc_feature 1..138: note = Description of Artificial Sequence: Synthetic polynucleotide
  source 1..138: mol_type = other DNA
ygttttygggygtayggaaattatttgttaggaaatttttaaygttttttttygtttatttttttttattttttttttggygygttttttttttttttagaggtaygtagtggagtttttggagtttygaatttttyg

SEQ ID NO: 1951-1954 - skipped (4 entries)

SEQ ID NO: 1955 - DNA, 187 bp, synthetic construct
  misc_feature 1..187: note = Description of Artificial Sequence: Synthetic polynucleotide
  source 1..187: mol_type = other DNA
ygagyggttttaatttygtttygtttgttgttgttgttgttggtgttgtttyggttgtagttgttgtygttttaygatttyggggygttgaggtaatagggttttttttttttattttttatttttttyggtttttttatagaagygtygtttttagtaatttttygtgtattttttatttttgtyg

SEQ ID NO: 1956-1957 - skipped (2 entries)

SEQ ID NO: 1958 - DNA, 110 bp, synthetic construct
  misc_feature 1..110: note = Description of Artificial Sequence: Synthetic polynucleotide
  source 1..110: mol_type = other DNA
ygtaggttaagatttggttttagaattatygttataagttgaagygygttygygttttaggggyggyggagtygtttgatttggtagtattygtygagttgtaygtygyg

SEQ ID NO: 1959 - skipped

SEQ ID NO: 1960 - DNA, 189 bp, synthetic construct
  misc_feature 1..189: note = Description of Artificial Sequence: Synthetic polynucleotide
  source 1..189: mol_type = other DNA
ygtgttttygttygygtttgggtttygtygtattttagtagaagttattatagagaataaattatttttttgttttygagatgggttttyggggaggaaggtaaattgtttgtttygtgtataataagttaggygtggagagtagygyggaggaggtygyggtagttatygagygggtagagtttttyg

SEQ ID NO: 1961 - DNA, 42 bp, synthetic construct
  misc_feature 1..42: note = Description of Artificial Sequence: Synthetic oligonucleotide
  source 1..42: mol_type = other DNA
ygygagtgtatttaagygttttygttttatttatttttagyg

SEQ ID NO: 1962 - DNA, 33 bp, synthetic construct
  misc_feature 1..33: note = Description of Artificial Sequence: Synthetic oligonucleotide
  source 1..33: mol_type = other DNA
ygtggagygtaaagtgtttgaagttttygygyg

SEQ ID NO: 1963 - DNA, 15 bp, synthetic construct
  misc_feature 1..15: note = Description of Artificial Sequence: Synthetic oligonucleotide
  source 1..15: mol_type = other DNA
ygttyggttggygyg

SEQ ID NO: 1964 - DNA, 51 bp, synthetic construct
  misc_feature 1..51: note = Description of Artificial Sequence: Synthetic oligonucleotide
  source 1..51: mol_type = other DNA
ygtttattayggygatttgyggtagttttagtaggtagttttgttttagyg

SEQ ID NO: 1965 - skipped

SEQ ID NO: 1966 - DNA, 268 bp, synthetic construct
  misc_feature 1..268: note = Description of Artificial Sequence: Synthetic polynucleotide
  source 1..268: mol_type = other DNA
ygaagatgggaaayggtygtttgttgagagggggtatttgtagtttttttagaaaaggttggggtaggagagygtgyggttagaggggtgggggtatyggagggggggttttattttttgttttatagtygggtttttttygygaggygttgggaagtatgaggtatgtagtatttaaaatgttttttgaaaaagayggatttgaagtttttttttataaataygttattgtatttattttttatttagagaygggttgygygtttyg

SEQ ID NO: 1967 - skipped

SEQ ID NO: 1968 - DNA, 33 bp, synthetic construct
  misc_feature 1..33: note = Description of Artificial Sequence: Synthetic oligonucleotide
  source 1..33: mol_type = other DNA
yggtgatyggtttgattgtttttgggggtttyg

SEQ ID NO: 1969 - DNA, 23 bp, synthetic construct
  misc_feature 1..23: note = Description of Artificial Sequence: Synthetic oligonucleotide
  source 1..23: mol_type = other DNA
ygaaagtttygggttagtgggyg

SEQ ID NO: 1970 - DNA, 40 bp, synthetic construct
  misc_feature 1..40: note = Description of Artificial Sequence: Synthetic oligonucleotide
  source 1..40: mol_type = other DNA
ygaggtatttggtygggyggggaggygtygggtyggggyg

SEQ ID NO: 1971 - DNA, 10 bp, synthetic construct
  misc_feature 1..10: note = Description of Artificial Sequence: Synthetic oligonucleotide
  source 1..10: mol_type = other DNA
yggagtygyg

SEQ ID NO: 1972 - DNA, 181 bp, synthetic construct
  misc_feature 1..181: note = Description of Artificial Sequence: Synthetic polynucleotide
  source 1..181: mol_type = other DNA
ygaaaaygaaatttatttttttgygtttatttttgttagaggtttgtaggaygtgttttaatttggtatttygagtttagaataaaagttaygggggttgyggtatgggtagggggaaggygygyggtggttgaygyggggtaggggttttggygagygygggaggggyggttagtagtyg

SEQ ID NO: 1973 - DNA, 195 bp, synthetic construct
  misc_feature 1..195: note = Description of Artificial Sequence: Synthetic polynucleotide
  source 1..195: mol_type = other DNA
ygttaagtagtaggattatagygttagygtttggtttyggaggaaagataagttggagtaygtaagggygattygttttygggggtttyggttaggtatttgtygtatgtatttttttygtggtggtggtatgagygygygyggggygyggggggtaggygaggggattttggtaggygtygaygttttaggtyg

SEQ ID NO: 1974 - skipped

SEQ ID NO: 1975 - DNA, 358 bp, synthetic construct
  misc_feature 1..358: note = Description of Artificial Sequence: Synthetic polynucleotide
  source 1..358: mol_type = other DNA
ygygagttygggtgagagttatyggaatgygggaaygtagtttagtygggaatagggttttygataggggtygttygtggttaggaygyggtygttgaatagaggtygygyggyggtttttgttygagggatttygtgggygggggttatayggaggtygygtayggttttyggggttggygggggtaggtgggaggatttttttygggttygygaatttgatttggtagyggttaggtgtttggaagygtttttaaatgatagggttataaagatatgttggttaggtttgtagttagygtagtaaygtggtttgtaggagygtagaaygaggttagatagggttattyggaygtyg

SEQ ID NO: 1976 - DNA, 13 bp, synthetic construct
  misc_feature 1..13: note = Description of Artificial Sequence: Synthetic oligonucleotide
  source 1..13: mol_type = other DNA
ygttataattgyg

SEQ ID NO: 1977-1978 - skipped (2 entries)

SEQ ID NO: 1979 - DNA, 95 bp, synthetic construct
  misc_feature 1..95: note = Description of Artificial Sequence: Synthetic oligonucleotide
  source 1..95: mol_type = other DNA
ygggtattygggaygaggygagggygtagaaaatttggagtttaattagtayggagttgagttttygygttttaatttttaggtgatttygtgyg

SEQ ID NO: 1980 - DNA, 45 bp, synthetic construct
  misc_feature 1..45: note = Description of Artificial Sequence: Synthetic oligonucleotide
  source 1..45: mol_type = other DNA
ygtygagagggtaggaygygtayggtgygttttaatttgttgtyg

SEQ ID NO: 1981 - DNA, 104 bp, synthetic construct
  misc_feature 1..104: note = Description of Artificial Sequence: Synthetic polynucleotide
  source 1..104: mol_type = other DNA
ygygagttagggggaggygygtyggaaagygagagtgataagtagtttataagtygaaaagtttttygygggaggygygygtygygtgggtttygatttagtyg

SEQ ID NO: 1982 - DNA, 87 bp, synthetic construct
  misc_feature 1..87: note = Description of Artificial Sequence: Synthetic oligonucleotide
  source 1..87: mol_type = other DNA
ygggagggtggyggaaggtggtgtatygtagygtggttttygtygttgtygtygyggttttgtaaagtgttagygggggygaaagyg

SEQ ID NO: 1983 - DNA, 62 bp, synthetic construct
  misc_feature 1..62: note = Description of Artificial Sequence: Synthetic oligonucleotide
  source 1..62: mol_type = other DNA
ygatattgaataataatygyggggaggagaggttatttgtagtygaggttygtaaattgtyg

SEQ ID NO: 1984-1991 - skipped (8 entries)

SEQ ID NO: 1992 - DNA, 145 bp, synthetic construct
  misc_feature 1..145: note = Description of Artificial Sequence: Synthetic polynucleotide
  source 1..145: mol_type = other DNA
ygggaatygtaggagaggattggggttttaggtggayggtgttgattgtattggttttgaagattggaagtgggtgtaggaggaatttgygatagttgagattagggygygygggtagatgygttaggtygttagtaaatyggyg

SEQ ID NO: 1993 - skipped

SEQ ID NO: 1994 - DNA, 19 bp, synthetic construct
  misc_feature 1..19: note = Description of Artificial Sequence: Synthetic oligonucleotide
  source 1..19: mol_type = other DNA
yggtttttggyggtgggyg

SEQ ID NO: 1995 - DNA, 35 bp, synthetic construct
  misc_feature 1..35: note = Description of Artificial Sequence: Synthetic oligonucleotide
  source 1..35: mol_type = other DNA
yggaggtttygttaatggggtygtygtygtygtyg

SEQ ID NO: 1996-1997 - skipped (2 entries)

SEQ ID NO: 1998 - DNA, 36 bp, synthetic construct
  misc_feature 1..36: note = Description of Artificial Sequence: Synthetic oligonucleotide
  source 1..36: mol_type = other DNA
yggtttttttgtagttagyggattagygttagttyg

SEQ ID NO: 1999 - skipped

SEQ ID NO: 2000 - DNA, 42 bp, synthetic construct
  misc_feature 1..42: note = Description of Artificial Sequence: Synthetic oligonucleotide
  source 1..42: mol_type = other DNA
ygtataatggtaaatgggattaggtaggygaaggtttagtyg

SEQ ID NO: 2001-2002 - skipped (2 entries)

SEQ ID NO: 2003 - DNA, 18 bp, synthetic construct
  misc_feature 1..18: note = Description of Artificial Sequence: Synthetic oligonucleotide
  source 1..18: mol_type = other DNA
yggygygggygttgygyg

SEQ ID NO: 2004-2006 - skipped (3 entries)

SEQ ID NO: 2007 - DNA, 118 bp, synthetic construct
  misc_feature 1..118: note = Description of Artificial Sequence: Synthetic polynucleotide
  source 1..118: mol_type = other DNA
ygygtygttgttttgttttaggtttyggtgyggttttaagttttagtttagggtttttaggtttttttaggyggyggtggyggtatttatttgggtygyggagtyggggtttggtayg

SEQ ID NO: 2008 - DNA, 22 bp, synthetic construct
  misc_feature 1..22: note = Description of Artificial Sequence: Synthetic oligonucleotide
  source 1..22: mol_type = other DNA
ygttygygtygttygyggttyg

SEQ ID NO: 2009-2012 - skipped (4 entries)

SEQ ID NO: 2013 - DNA, 31 bp, synthetic construct
  misc_feature 1..31: note = Description of Artificial Sequence: Synthetic oligonucleotide
  source 1..31: mol_type = other DNA
ygtaatatattttagtatygagtttttgtyg

SEQ ID NO: 2014-2022 - skipped (9 entries)

SEQ ID NO: 2023 - DNA, 69 bp, synthetic construct
  misc_feature 1..69: note = Description of Artificial Sequence: Synthetic oligonucleotide
  source 1..69: mol_type = other DNA
ygtttttyggttygtttttttygagygtygtygataygttagttaaayggtygttggtygtttttagyg

SEQ ID NO: 2024 - DNA, 415 bp, synthetic construct
  misc_feature 1..415: note = Description of Artificial Sequence: Synthetic polynucleotide
  source 1..415: mol_type = other DNA
ygtaygggttgggtttgggaatggggatygygaggttttagtatttygatgttttgaaagttttttygtttyggggatttgtttttgtgttgtagttggtaggggtygtttgaagtgggagtagygtttggagaaggygggaggagttyggttygggggaygggyggygggatagygggatttyggyggygyggtgygttttagggygtagyggyggtygtagatygagtttygggygyggtaagaggyggygggagtyggtggyggttyggtattatgygtygagggygtttgttggagatygttttgggatttatygtgtttttagygttttataygagttatggggyggaygttaatttggaggttgggaaygtgaaggaaattagagttagtygggttaagagaagaggyg

SEQ ID NO: 2025-2029 - skipped (5 entries)

SEQ ID NO: 2030 - DNA, 62 bp, synthetic construct
  misc_feature 1..62: note = Description of Artificial Sequence: Synthetic oligonucleotide
  source 1..62: mol_type = other DNA
ygtgygtattttaagygygtgygggagtgtgygaggygttgtgygagttagyggygggygyg

SEQ ID NO: 2031-2034 - skipped (4 entries)

SEQ ID NO: 2035 - DNA, 20 bp, synthetic construct
  misc_feature 1..20: note = Description of Artificial Sequence: Synthetic oligonucleotide
  source 1..20: mol_type = other DNA
yggaggtttttgygtttgyg

SEQ ID NO: 2036 - DNA, 69 bp, synthetic construct
  misc_feature 1..69: note = Description of Artificial Sequence: Synthetic oligonucleotide
  source 1..69: mol_type = other DNA
ygttgygttttttygtttgttggygtttttgttttagygggattyggtagttaggggttttagggggyg

SEQ ID NO: 2037 - skipped

SEQ ID NO: 2038 - DNA, 318 bp, synthetic construct
  misc_feature 1..318: note = Description of Artificial Sequence: Synthetic polynucleotide
  source 1..318: mol_type = other DNA
ygagaygyggtagatttttagagyggtttatttatttatygaagyggattttgggyggtttygggttgattygygttgttagggygyggattttatttygggygtattgttaggagaaggggtttttyggggyggygygtttygattttgggttttyggtgttygtagagggyggagattygyggygttttaggttatttattygtattttttygagttaaatttttagygtttattyggattygayggtttaagtattgatttttaggtaagagtygttttttttggtttttagggaattgatattatygygggayg

SEQ ID NO: 2039 - DNA, 27 bp, synthetic construct
  misc_feature 1..27: note = Description of Artificial Sequence: Synthetic oligonucleotide
  source 1..27: mol_type = other DNA
ygygttttygttyggggagttattayg

SEQ ID NO: 2040 - skipped

SEQ ID NO: 2041 - DNA, 13 bp, synthetic construct
  misc_feature 1..13: note = Description of Artificial Sequence: Synthetic oligonucleotide
  source 1..13: mol_type = other DNA
ygyggggagttyg

SEQ ID NO: 2042 - DNA, 189 bp, synthetic construct
  misc_feature 1..189: note = Description of Artificial Sequence: Synthetic polynucleotide
  source 1..189: mol_type = other DNA
ygtaatttttagttaaagttatygygggyggattatggtttagggygttagaggggttagaggtaygggaagaggaaaagayggttaattgggaaaaaaagagaaaaygaaagaaaagttaaaygatgagtttttataaggaggayggagtgaatagtttgtgttagaaggttttgtatatygttatyg

SEQ ID NO: 2043-2044 - skipped (2 entries)

SEQ ID NO: 2045 - DNA, 13 bp, synthetic construct
  misc_feature 1..13: note = Description of Artificial Sequence: Synthetic oligonucleotide
  source 1..13: mol_type = other DNA
ygtttagttttyg

SEQ ID NO: 2046 - DNA, 51 bp, synthetic construct
  misc_feature 1..51: note = Description of Artificial Sequence: Synthetic oligonucleotide
  source 1..51: mol_type = other DNA
ygaaggygaggtygtttagttygtattttattttaygtayggtataygtyg

SEQ ID NO: 2047 - DNA, 289 bp, synthetic construct
  misc_feature 1..289: note = Description of Artificial Sequence: Synthetic polynucleotide
  source 1..289: mol_type = other DNA
yggtagtgtttttttaagaaggggtaaaaaaatttgtttatggttatttttttttygttttattttttttttttttgatagtttyggttttggttgttygagtygggggtgtgttttyggttttttttagatttgggyggggggygggaggagtgagygatttgggaagtttygggggtggagagggggygtttyggggtttgggggygaygtggatattttttttggagtayggyggtgygtttgggatttgaaggaagggtygaaggaagyggggtgygggygggyg

SEQ ID NO: 2048 - skipped

SEQ ID NO: 2049 - DNA, 165 bp, synthetic construct
  misc_feature 1..165: note = Description of Artificial Sequence: Synthetic polynucleotide
  source 1..165: mol_type = other DNA
ygttttgggaagygtagaggygggggtgttgttygygttggggagtaygtgaggggatatttagggattgttygygygaatggtttttaaygtatgygttttattttatattttatagtygttatgaygatygggaggttygtaayggttgyggggataagttyg

SEQ ID NO: 2050 - DNA, 21 bp, synthetic construct
  misc_feature 1..21: note = Description of Artificial Sequence: Synthetic oligonucleotide
  source 1..21: mol_type = other DNA
ygaagtggtgtaggggyggyg

SEQ ID NO: 2051-2053 - skipped (3 entries)

SEQ ID NO: 2054 - DNA, 159 bp, synthetic construct
  misc_feature 1..159: note = Description of Artificial Sequence: Synthetic polynucleotide
  source 1..159: mol_type = other DNA
ygtgttygtggatgygtagygttaygyggttgtttattatttagygatataygyggtttayggagaaggtgaggtygtagygggtygatttgtygyggtttaggyggtygtygtyggygttgtttatgttgtagagggatagtgyggttagygtagtyg

SEQ ID NO: 2055 - skipped

SEQ ID NO: 2056 - DNA, 129 bp, synthetic construct
  misc_feature 1..129: note = Description of Artificial Sequence: Synthetic polynucleotide
  source 1..129: mol_type = other DNA
ygtgygttygagtggggtatttgttygaggtyggggattgtgaatygaaagattttatttagttttgttgtttttttggtattgygatttgggggygggttattttatttttttgaatttygtttttyg

SEQ ID NO: 2057 - skipped

SEQ ID NO: 2058 - DNA, 120 bp, synthetic construct
  misc_feature 1..120: note = Description of Artificial Sequence: Synthetic polynucleotide
  source 1..120: mol_type = other DNA
ygttttttttttttttttttttttttttttttttttttttttttttttttttttttggtattatagagttgttttgaaaatagaagatagagggagtttyggagttygttatttttagyg

SEQ ID NO: 2059 - skipped

SEQ ID NO: 2060 - DNA, 171 bp, synthetic construct
  misc_feature 1..171: note = Description of Artificial Sequence: Synthetic polynucleotide
  source 1..171: mol_type = other DNA
ygttyggttgttgtatttgttagtgttgggtttaggttgagaggygatttttagtttttataataatgtttygggttttttggtttgggttttygtagygttygattgatygttagygataygaygagaaygaggatttgtyggaygtggaggagatygttagygttygyg

SEQ ID NO: 2061-2063 - skipped (3 entries)

SEQ ID NO: 2064 - DNA, 64 bp, synthetic construct
  misc_feature 1..64: note = Description of Artificial Sequence: Synthetic oligonucleotide
  source 1..64: mol_type = other DNA
yggggaaagttgggygygygagtygaggttgttgtttatttgtagtygygtygtttatttgtyg

SEQ ID NO: 2065-2068 - skipped (4 entries)

SEQ ID NO: 2069 - DNA, 16 bp, synthetic construct
  misc_feature 1..16: note = Description of Artificial Sequence: Synthetic oligonucleotide
  source 1..16: mol_type = other DNA
ygagttttgyggagyg

SEQ ID NO: 2070-2072 - skipped (3 entries)

SEQ ID NO: 2073 - DNA, 18 bp, synthetic construct
  misc_feature 1..18: note = Description of Artificial Sequence: Synthetic oligonucleotide
  source 1..18: mol_type = other DNA
ygyggtygagggaatgyg

SEQ ID NO: 2074 - DNA, 118 bp, synthetic construct
  misc_feature 1..118: note = Description of Artificial Sequence: Synthetic polynucleotide
  source 1..118: mol_type = other DNA
ygygtttttgtttttgggtagatttttttatttgtgtattttggtttttttatttagtaaagagatgtgygaagtgtgygtttggagaygagtygtttyggtgatttttattygttyg

SEQ ID NO: 2075-2079 - skipped (5 entries)

SEQ ID NO: 2080 - DNA, 22 bp, synthetic construct
  misc_feature 1..22: note = Description of Artificial Sequence: Synthetic oligonucleotide
  source 1..22: mol_type = other DNA
yggatttttttggggyggygyg

SEQ ID NO: 2081 - DNA, 112 bp, synthetic construct
  misc_feature 1..112: note = Description of Artificial Sequence: Synthetic polynucleotide
  source 1..112: mol_type = other DNA
ygaggtagggaggygttttygtagtttttgattttataattygygygygtgtgtatygagtygygggtatatygygaatatatatatatatatatatattygtgygttttyg

SEQ ID NO: 2082 - DNA, 109 bp, synthetic construct
  misc_feature 1..109: note = Description of Artificial Sequence: Synthetic polynucleotide
  source 1..109: mol_type = other DNA
ygtggaggagtggggttaggtggttattattagtatgtttattygttaygttygtaygtagtttttgagttttatttagaaygtaagtgggtttagtttaggtagagyg

SEQ ID NO: 2083-2085 - skipped (3 entries)

SEQ ID NO: 2086 - DNA, 431 bp, synthetic construct
  misc_feature 1..431: note = Description of Artificial Sequence: Synthetic polynucleotide
  source 1..431: mol_type = other DNA
ygtgtttttttataggttttatttgtaattgagaygaatgattatagtggggygggaaggagtagttgtttattaattaatttttaattaaaagtgtttttygttttygggtgattaaagagaaatatygttygttgggygatattgattyggatggaatttatttgttaaygttyggaggaatggttttttygtttatygygyggtygggattgttttggtttttttyggtttgagtygtyggygagtgatyggygagtttgyggttaggtygggttgygygaggtggggttgaygttagagtttttttygttttaagtygygtatatttgatttgaygggttygygygattygtttttttttttttttttttygtaaaatatgtatttttgtygtygttgygaggtygttyggttttagagttttttyg

SEQ ID NO: 2087 - skipped

SEQ ID NO: 2088 - DNA, 40 bp, synthetic construct
  misc_feature 1..40: note = Description of Artificial Sequence: Synthetic oligonucleotide
  source 1..40: mol_type = other DNA
ygtttttatttttttagyggagttatagyggggygyggyg

SEQ ID NO: 2089 - skipped

SEQ ID NO: 2090 - DNA, 22 bp, synthetic construct
  misc_feature 1..22: note = Description of Artificial Sequence: Synthetic oligonucleotide
  source 1..22: mol_type = other DNA
ygtggttttgaatttgttggyg

SEQ ID NO: 2091 - skipped

SEQ ID NO: 2092 - DNA, 47 bp, synthetic construct
  misc_feature 1..47: note = Description of Artificial Sequence: Synthetic oligonucleotide
  source 1..47: mol_type = other DNA
ygagttggagaattatagtatgtattgygtgtaatgtaagatgttyg

SEQ ID NO: 2093 - DNA, 24 bp, synthetic construct
  misc_feature 1..24: note = Description of Artificial Sequence: Synthetic oligonucleotide
  source 1..24: mol_type = other DNA
ygtgttagaagttttttaayggyg

SEQ ID NO: 2094 - skipped

SEQ ID NO: 2095 - DNA, 45 bp, synthetic construct
  misc_feature 1..45: note = Description of Artificial Sequence: Synthetic oligonucleotide
  source 1..45: mol_type = other DNA
ygagggttttagttaattagtttgttgggtgggtttggagtttyg

SEQ ID NO: 2096 - skipped

SEQ ID NO: 2097 - DNA, 258 bp, synthetic construct
  misc_feature 1..258: note = Description of Artificial Sequence: Synthetic polynucleotide
  source 1..258: mol_type = other DNA
ygygtatttgtttaggygttgyggtttagygygttttaatttttagttygggyggagagygggggygggattgaagtatygtgttttttaaagtattttttygtygtyggtagttttggtttygtaaatgttttagygygtttaggygtaygtagagattggygyggtagttttygggttaayggtaygygagtaaagttggttggygatttgggataygtagtagaagttgaggttgtatygattttygtygtttyg

SEQ ID NO: 2098 - DNA, 45 bp, synthetic construct
  misc_feature 1..45: note = Description of Artificial Sequence: Synthetic oligonucleotide
  source 1..45: mol_type = other DNA
ygygatygtaagttygagtttaggtttttyggagtygttagggyg

SEQ ID NO: 2099-2100 - skipped (2 entries)

SEQ ID NO: 2101 - DNA, 67 bp, synthetic construct
  misc_feature 1..67: note = Description of Artificial Sequence: Synthetic oligonucleotide
  source 1..67: mol_type = other DNA
ygaggtygtttygttggttggtgtaagaattagtttgtaatttaagttttgagttgttggygtttyg

SEQ ID NO: 2102 - DNA, 43 bp, synthetic construct
  misc_feature 1..43: note = Description of Artificial Sequence: Synthetic oligonucleotide
  source 1..43: mol_type = other DNA
ygttygagttttygttgttgtygttgtygttgygggttagtyg

SEQ ID NO: 2103-2104 - skipped (2 entries)

SEQ ID NO: 2105 - DNA, 113 bp, synthetic construct
  misc_feature 1..113: note = Description of Artificial Sequence: Synthetic polynucleotide
  source 1..113: mol_type = other DNA
ygttygagattygggagagattaggggttygtaaagtagaagagtagatttagaaagaaaaaaaaaaaagygagaagtgygagaaaaatatattgaatttagttaaatatayg

SEQ ID NO: 2106-2107 - skipped (2 entries)

SEQ ID NO: 2108 - DNA, 84 bp, synthetic construct
  misc_feature 1..84: note = Description of Artificial Sequence: Synthetic oligonucleotide
  source 1..84: mol_type = other DNA
ygggttttggggygttggtgttygygtagttttagtygttttygtagttatygtygttyggtttygyggaggyggygygtagyg

SEQ ID NO: 2109 - skipped

SEQ ID NO: 2110 - DNA, 48 bp, synthetic construct
  misc_feature 1..48: note = Description of Artificial Sequence: Synthetic oligonucleotide
  source 1..48: mol_type = other DNA
ygtaggttaagatttggttttagaattatygttataagatgaagygyg

SEQ ID NO: 2111 - DNA, 228 bp, synthetic construct
  misc_feature 1..228: note = Description of Artificial Sequence: Synthetic polynucleotide
  source 1..228: mol_type = other DNA
ygtygttattaygtygygygtygtatttygygttaagaatggggyggttaagttgtttaagtygttygtygtygtygtygtygtygyggtygaggygttyggygtyggygygggtatggagygttygtagagtygttttagtttgttygtttttttygaggygttygttatttatttttygtgtatgaattttttygaygaygaggaygtaggtaagygygyggttyg

SEQ ID NO: 2112 - DNA, 47 bp, synthetic construct
  misc_feature 1..47: note = Description of Artificial Sequence: Synthetic oligonucleotide
  source 1..47: mol_type = other DNA
ygttggtgygtggyggygtggagygygtttgttayggttaaggtgyg

SEQ ID NO: 2113 - DNA, 185 bp, synthetic construct
  misc_feature 1..185: note = Description of Artificial Sequence: Synthetic polynucleotide
  source 1..185: mol_type = other DNA
ygtygtttttyggtttagagtttttattttyggtttgtgagtttgyggygttggtggagttyggttttaggaagaggagtttattyggttttttttgattggatagtagygaggttttatygggygttttygyggtttaaaatygaagygggggygagggggaggtagagttygttttttgygyg

SEQ ID NO: 2114 - DNA, 216 bp, synthetic construct
  misc_feature 1..216: note = Description of Artificial Sequence: Synthetic polynucleotide
  source 1..216: mol_type = other DNA
yggygttttatttattggygtttayggttygtaggtaaagygtggaaggagttgaaygyggyggagaagyggtttttygtggaggaagtygaayggttgygygtgtagtatttgygygattattttaattataagtatyggtygygtygtaagaagtaggygygtaaggttyggyggttggagttyggttttttgttttygggattagygttttyg

SEQ ID NO: 2115 - DNA, 344 bp, synthetic construct
  misc_feature 1..344: note = Description of Artificial Sequence: Synthetic polynucleotide
  source 1..344: mol_type = other DNA
ygaataatagaaattgttaattttaataatttagagtaggttaaygaggttttgttttttygattygaattaaaggtttttygtttygtgygttgttaygagyggtgttttttggggttttaatgtagygagttgtgttygaggggttyggaaggygtaagttgggtagygatatggggaaygyggagygggtttyggggtttyggagttttgggttagtatttaygttgttgttgttygtygyggygttattggtygtgtyggaygtattygggygttttttygaggaggaygaggagttagtggtgtyggagttggagygygtttygggataygggattayg

SEQ ID NO: 2116 - DNA, 28 bp, synthetic construct
  misc_feature 1..28: note = Description of Artificial Sequence: Synthetic oligonucleotide
  source 1..28: mol_type = other DNA
ygtttyggtttggttgttaaatagaayg

SEQ ID NO: 2117 - DNA, 124 bp, synthetic construct
  misc_feature 1..124: note = Description of Artificial Sequence: Synthetic polynucleotide
  source 1..124: mol_type = other DNA
yggygygtayggttaaggtaygygygttggtataygygggygyggataygygyggatatataygtgygggataygttttttttygayggyggygttaatttttyggtaagtttagygttttayg

SEQ ID NO: 2118 - DNA, 80 bp, synthetic construct
  misc_feature 1..80: note = Description of Artificial Sequence: Synthetic oligonucleotide
  source 1..80: mol_type = other DNA
ygaggtgtaggyggygygggygtttatygtgagygtygtgttgttggygttygttgygtttttygtgattttggygggyg

SEQ ID NO: 2119 - DNA, 62 bp, synthetic construct
  misc_feature 1..62: note = Description of Artificial Sequence: Synthetic oligonucleotide
  source 1..62: mol_type = other DNA
ygaggygtggaggggtagtygyggyggggygatttttatttgtttattgyggggtttgttyg

SEQ ID NO: 2120 - DNA, 165 bp, synthetic construct
  misc_feature 1..165: note = Description of Artificial Sequence: Synthetic polynucleotide
  source 1..165: mol_type = other DNA
ygttatttgatttygttattaagtttaaggtgttttggatttayggtaagtatagygtygttgtagttggtygtgygtttttattatygtygttaggtttygaggtygygtttagttttagtaagaggaaayggaygtttagygataaatyggygtatayggtyg

SEQ ID NO: 2121 - DNA, 43 bp, synthetic construct
  misc_feature 1..43: note = Description of Artificial Sequence: Synthetic oligonucleotide
  source 1..43: mol_type = other DNA
ygygtttygaggaagygtyggaattattagaagtatagggayg

SEQ ID NO: 2122 - DNA, 86 bp, synthetic construct
  misc_feature 1..86: note = Description of Artificial Sequence: Synthetic oligonucleotide
  source 1..86: mol_type = other DNA
ygttatttttaattagttgtaagtygagttgtttatttgggatygggtyggttyggygggtttggttttyggygaaggyggyggyg

SEQ ID NO: 2123 - DNA, 23 bp, synthetic construct
  misc_feature 1..23: note = Description of Artificial Sequence: Synthetic oligonucleotide
  source 1..23: mol_type = other DNA
ygtttttttattttaygggttyg

SEQ ID NO: 2124 - skipped

SEQ ID NO: 2125 - DNA, 99 bp, synthetic construct
  misc_feature 1..99: note = Description of Artificial Sequence: Synthetic oligonucleotide
  source 1..99: mol_type = other DNA
yggtaggagtagtttatagttaggagygttttttygtttttaaygtygygtttttttttttaaaayggtttaaaaaaatttattaattgtatggtygyg

SEQ ID NO: 2126 - DNA, 73 bp, synthetic construct
  misc_feature 1..73: note = Description of Artificial Sequence: Synthetic oligonucleotide
  source 1..73: mol_type = other DNA
ygattatttttgtgtttttaggagtttattttgggyggtagggaggygttgygtggggtttaygagttttayg

SEQ ID NO: 2127 - skipped

SEQ ID NO: 2128 - DNA, 52 bp, synthetic construct
  misc_feature 1..52: note = Description of Artificial Sequence: Synthetic oligonucleotide
  source 1..52: mol_type = other DNA
ygtttttaggattttygttygtttttttttgattyggtttttgttygtttyg

SEQ ID NO: 2129 - DNA, 50 bp, synthetic construct
  misc_feature 1..50: note = Description of Artificial Sequence: Synthetic oligonucleotide
  source 1..50: mol_type = other DNA
ygtagtygtygygttygtatttgattatggagtgygtttttttgttygyg

SEQ ID NO: 2130 - DNA, 50 bp, synthetic construct
  misc_feature 1..50: note = Description of Artificial Sequence: Synthetic oligonucleotide
  source 1..50: mol_type = other DNA
ygaaygtagagtttataygtggattttygygtttgtgatgtttygattyg

SEQ ID NO: 2131-2132 - skipped (2 entries)

SEQ ID NO: 2133 - DNA, 52 bp, synthetic construct
  misc_feature 1..52: note = Description of Artificial Sequence: Synthetic oligonucleotide
  source 1..52: mol_type = other DNA
ygtttggggtttaygygagtygygagtttttgtttgtttttgygttatttyg

SEQ ID NO: 2134-2136 - skipped (3 entries)

SEQ ID NO: 2137 - DNA, 138 bp, synthetic construct
  misc_feature 1..138: note = Description of Artificial Sequence: Synthetic polynucleotide
  source 1..138: mol_type = other DNA
ygyggygtttttagttgttttttattygtttygttygttagtttttttttygygygatggtttyggygttgagttatgtttttaagtttaagtttttygtgattttgttygttatttygtttttgttgttgttattyg

SEQ ID NO: 2138-2140 - skipped (3 entries)

SEQ ID NO: 2141 - DNA, 1017 bp, synthetic construct
  misc_feature 1..1017: note = Description of Artificial Sequence: Synthetic polynucleotide
  source 1..1017: mol_type = other DNA
cgtttatttgagttttaaaagttgttgaatttatatggttacgtttcggggagcggggttttagatttggttcgtttaggttatttgcgcggcgttcgcgttcgttcgttttcgtttcgcggcgtcggttttcggttttcggttcgtcgtttttcgtcgttcgtcggtcgcggggcgtatagcgagttagagcgcggtcgcgcggggttttatgtcggtcggcgcgtcgtcgtcgttggggcgtatggtttaggttgggcggttcgcgggggcgtatatttttcggtcggggcgcggggttcgcggtttttttcgtcggcggtatagcgaaggcggtagcgaggcggggcgtgtttcggcgttgtcgcggcgtagtaaagggttggggagtcgcggtttcgtttttcggggcggcgaggagggaggtcggcggcgttgtcgtttacggtgcgtgtttttcggcgcgcggtttttgtttttagtcggagtttcgcgtcgatggggcggcgttgtttagggtttggggtgacgcgacgcggacggacgcgagtttttttcgcgttgtcgggtcggggggttttgttagaggtttcgtcgtcgatcggcgttatttaagttgttcgggggtttcgtttgagcgttcgttttgtagacggtcgcggttcggagattggtaggaggcgggtacgagaggcgcgcggggcgagggcgtcgtggagcgcggggcgtggggacgcgcggcggcggcgtcgcgcggaggaggcgcgcggggatttcggggtttcgtcgttcgcgtttatcgcgttcgtcgtagagtcgttcgcgttgtttagtcgttttttttttcgcgtttgttttttcgcgcgttcgttttcgtttttcggagtcggttttaatttcgttcgttcggttcggtttacgttattcgtttttttcgtttttcgaacgggagttcgagtttttggtttggtttcggtttttgttcgtcgttttattttgcgggggtcggggtcgtcg

SEQ ID NO: 2142 - DNA, 166 bp, synthetic construct
  misc_feature 1..166: note = Description of Artificial Sequence: Synthetic polynucleotide
  source 1..166: mol_type = other DNA
cgcgcgttgagggtgcggtgagttgagtgcggggttaagtatgttttggcgtcgatttcgtttaggggtttaggatttggcgtttaaggggttttttggcgacggagattttcgacgtagtagcgattcgcggttgtttaagttgatttcgttcgcgtttcgagcg

SEQ ID NO: 2143-2148 - skipped (6 entries)

SEQ ID NO: 2149 - DNA, 14 bp, synthetic construct
  misc_feature 1..14: note = Description of Artificial Sequence: Synthetic oligonucleotide
  source 1..14: mol_type = other DNA
cgcgttgagacgcg

SEQ ID NO: 2150-2152 - skipped (3 entries)

SEQ ID NO: 2153 - DNA, 125 bp, synthetic construct
  misc_feature 1..125: note = Description of Artificial Sequence: Synthetic polynucleotide
  source 1..125: mol_type = other DNA
cgtttcgcgttttcgtttcgttatgtttttgttgttggggttgtgtttggggttgtttttgtgtgtggggtcgtaggaagaggcgtagagttggggttatttttcggagtaggtaagtggagtcg

SEQ ID NO: 2154 - skipped

SEQ ID NO: 2155 - DNA, 131 bp, synthetic construct
  misc_feature 1..131: note = Description of Artificial Sequence: Synthetic polynucleotide
  source 1..131: mol_type = other DNA
cgtgcgtagtttagtttttttcggacgttttcgttttcgttcgggtatatcgtgtttcgtatcgaggtagagaggggtacgcggattttagtttttgcgagtttttttgttcgtcgttattttatatttcg

SEQ ID NO: 2156 - DNA, 94 bp, synthetic construct
  misc_feature 1..94: note = Description of Artificial Sequence: Synthetic oligonucleotide
  source 1..94: mol_type = other DNA
cgggtcgcgtgggtttgggcgcgtcgtggtgggtaagcggggttagcggagcgggaattcgtatatttttcgagcggagtcgaggataggttcg

SEQ ID NO: 2157-2158 - skipped (2 entries)

SEQ ID NO: 2159 - DNA, 27 bp, synthetic construct
  misc_feature 1..27: note = Description of Artificial Sequence: Synthetic oligonucleotide
  source 1..27: mol_type = other DNA
cgcgtaagtatttttttttttatcgcg

SEQ ID NO: 2160 - DNA, 164 bp, synthetic construct
  misc_feature 1..164: note = Description of Artificial Sequence: Synthetic polynucleotide
  source 1..164: mol_type = other DNA
cgcgatttttttcgggaggtgtttgcgaaggcggttttgtcgcggtgggggtggggaggttagggtttcggatcgttggagttggggtcgtagttagtttttggcgagtgttttttggttgttgtcgtaggggtttgttttttcggattttttttttaatttcg

SEQ ID NO: 2161-2162 - skipped (2 entries)

SEQ ID NO: 2163 - DNA, 68 bp, synthetic construct
  misc_feature 1..68: note = Description of Artificial Sequence: Synthetic oligonucleotide
  source 1..68: mol_type = other DNA
cgtatttgaaaatttcgtcgtagttattttttttttatgggaaagtttcgatttcggcgggtttagcg

SEQ ID NO: 2164 - DNA, 508 bp, synthetic construct
  misc_feature 1..508: note = Description of Artificial Sequence: Synthetic polynucleotide
  source 1..508: mol_type = other DNA
cgtaatttgggcgcgttagtataaattcggttttcggtttttttgaagttagttaagttcgtatagggtttttagcgtttggaaatttgagaggcgtggaagggtggggagtttcgcgaagtttttagtttttgggtgtttttcggtttcgcgggggagcgggtttggagttaaatcggtcggtcgtaggttggagtagcgggcgtcggagcgcgcggtggggatgttcgaaaaggagttagaggtttagtcggagagttcgagaatacgagggatgtttattttgtaatatggttttaagtttttttttgtttacgcggaagcgtttttcgttttatttcgggttgtgtagggtcgtttcggcgattaagtcgttttcggagtcgggtattggggagtcggtgttgcgttcgttgttggagtcggggttcgattgcgtcgttaggtagtcgggttttttttgggcggttatggtgggcgcgtagcgttcgggttttcgttgtcgtcg

SEQ ID NO: 2165-2174 - skipped (10 entries)

SEQ ID NO: 2175 - DNA, 396 bp, synthetic construct
  misc_feature 1..396: note = Description of Artificial Sequence: Synthetic polynucleotide
  source 1..396: mol_type = other DNA
cgggcggcggcggttcgttgtatatatttcggcgtatttcgttaggtcgcgtatagcgtttcgagtttaggcgttttttcgtttttttttcgcgttttgcggcggcggcggcggcggtagtagtagtagtaatatggttgttgatgggtgtttggggtggcgttggcggcgggaggagttttttcgagtttttgcgtcggttgttcgttgttagttatggtaaatggtggcggcggcggcggcggtagtagcggcggcggcggcggcggcggaggtagtagttttagaatgagtagtaatatttacgcgaattattttagtttagacgcgttttttttttttttttttttttttttttttttttttttttttttttttttttttttttcgtttttg

SEQ ID NO: 2176 - skipped

SEQ ID NO: 2177 - DNA, 70 bp, synthetic construct
  misc_feature 1..70: note = Description of Artificial Sequence: Synthetic oligonucleotide
  source 1..70: mol_type = other DNA
cgtgatttttttatttagagattatttagggagatgttttggatgggataagtagataaatggcggttcg

SEQ ID NO: 2178 - skipped

SEQ ID NO: 2179 - DNA, 68 bp, synthetic construct
  misc_feature 1..68: note = Description of Artificial Sequence: Synthetic oligonucleotide
  source 1..68: mol_type = other DNA
cgggagttcggtcgcgttttttagtttcggtattcgcgtttagcgcgtcgcgtttcgcgtttttcgcg

SEQ ID NO: 2180 - DNA, 88 bp, synthetic construct
  misc_feature 1..88: note = Description of Artificial Sequence: Synthetic oligonucleotide
  source 1..88: mol_type = other DNA
cgtttcgcgtatcgttttcgttttagtttttagtggcgcggcgttttttcgcgatattcgcgggtttttaggagcgagtcgattttcg

SEQ ID NO: 2181-2182 - skipped (2 entries)

SEQ ID NO: 2183 - DNA, 87 bp, synthetic construct
  misc_feature 1..87: note = Description of Artificial Sequence: Synthetic oligonucleotide
  source 1..87: mol_type = other DNA
cgggggttttttaggtcgcggcgtttttcgtttttttttatttttcgattttttttcgtttttaaaatgaggaaacggagtaattcg

SEQ ID NO: 2184 - DNA, 45 bp, synthetic construct
  misc_feature 1..45: note = Description of Artificial Sequence: Synthetic oligonucleotide
  source 1..45: mol_type = other DNA
cgtggtaaattcgggtttcgacgatagaggtagcgtagaagttcg

SEQ ID NO: 2185 - skipped

SEQ ID NO: 2186 - DNA, 173 bp, synthetic construct
  misc_feature 1..173: note = Description of Artificial Sequence: Synthetic polynucleotide
  source 1..173: mol_type = other DNA
cgggtcgtggttgatatcgcggagaagttaggatttttatagtttttgttagatttgaaagtaagttggaaatcgatagttgttttagttgttttagattttaatttggtttgggttttttttttttttatttgaaaatagatttagggtaatgtttaagagaattttaatcg

SEQ ID NO: 2187 - skipped

SEQ ID NO: 2188 - DNA, 48 bp, synthetic construct
  misc_feature 1..48: note = Description of Artificial Sequence: Synthetic oligonucleotide
  source 1..48: mol_type = other DNA
cggggtttttgtttttggttgtagttggagttttgcgtttcgttttcg

SEQ ID NO: 2189-2190 - skipped (2 entries)

SEQ ID NO: 2191 - DNA, 36 bp, synthetic construct
  misc_feature 1..36: note = Description of Artificial Sequence: Synthetic oligonucleotide
  source 1..36: mol_type = other DNA
cggggtagagggggcgggaagttggcgttacggtcg

SEQ ID NO: 2192-2196 - skipped (5 entries)

SEQ ID NO: 2197 - DNA, 97 bp, synthetic construct
  misc_feature 1..97: note = Description of Artificial Sequence: Synthetic oligonucleotide
  source 1..97: mol_type = other DNA
cgattcgggagggaaaatttttgttttttttcggggtttgttttgttcgttttttaaattcgttttatatttttttcgattttcgtttttgtaagcg

SEQ ID NO: 2198-2199 - skipped (2 entries)

SEQ ID NO: 2200 - DNA, 67 bp, synthetic construct
  misc_feature 1..67: note = Description of Artificial Sequence: Synthetic oligonucleotide
  source 1..67: mol_type = other DNA
cgatgtttgtgtttgtggttttttgaggtagtgggagtggcgtgtgaaggattgtgagagtttggcg

SEQ ID NO: 2201 - skipped

SEQ ID NO: 2202 - DNA, 29 bp, synthetic construct
  misc_feature 1..29: note = Description of Artificial Sequence: Synthetic oligonucleotide
  source 1..29: mol_type = other DNA
cgggtgattgttgattttttgttttgtcg

SEQ ID NO: 2203 - DNA, 49 bp, synthetic construct
  misc_feature 1..49: note = Description of Artificial Sequence: Synthetic oligonucleotide
  source 1..49: mol_type = other DNA
cgaggtttcgcgtattttcgttcgcgttttagttatttaggttcggtcg

SEQ ID NO: 2204 - DNA, 188 bp, synthetic construct
  misc_feature 1..188: note = Description of Artificial Sequence: Synthetic polynucleotide
  source 1..188: mol_type = other DNA
cgtttattgaaaatttttagttggtgttggagcggcggcgtgtggttaacgttaaggagcgtgagcgggtgagggatttttagggtcgacgttcgttttttttttttttgttttattattaaatatttggttaatattcgggggttcgtttatcgtttattttcgttcgaggcgatttcgagttttcg

SEQ ID NO: 2205-2206 - skipped (2 entries)

SEQ ID NO: 2207 - DNA, 113 bp, synthetic construct
  misc_feature 1..113: note = Description of Artificial Sequence: Synthetic polynucleotide
  source 1..113: mol_type = other DNA
cgcgggtgaaggcggagtcgtagggttggtttttaaagggatgttttcgttcgagcggcgagattagtttcgttcgtttttcgtcgcggtcgcgtcgtagtcgtttacggtcg

SEQ ID NO: 2208 - DNA, 208 bp, synthetic construct
  misc_feature 1..208: note = Description of Artificial Sequence: Synthetic polynucleotide
  source 1..208: mol_type = other DNA
cgcgttcgttatagtagcgcgttaggcggacgtcgcgggaatttgacgttcgaggttcgcggtttttaatgagagttttagaatatttttcgtttttgacggttagcggtagcgtcgtcgtttttcgtagagcgttcgttttttcgtttttagagttttagttttttttcgagcgatttcgtagtttttttttcgtttttattcgtcg

SEQ ID NO: 2209 - DNA, 96 bp, synthetic construct
  misc_feature 1..96: note = Description of Artificial Sequence: Synthetic oligonucleotide
  source 1..96: mol_type = other DNA
cgtattttttcgtattcggcgtcgtcgtttcgtcgttttttttcgtttgtagggtcgtttcgggtattttagggttgttgaggggcgggcgggtcg

SEQ ID NO: 2210 - DNA, 236 bp, synthetic construct
  misc_feature 1..236: note = Description of Artificial Sequence: Synthetic polynucleotide
  source 1..236: mol_type = other DNA
cgcgtggaggttgcgcgtaggggttcgggacgcgggatagggatttcgcgtagtttaggcgtcggggaatcggggttggagtcggggatttgagtttagcggacgtttttttcgtttggaggttcggtacggatcgggatattagggcgttcgtggtcgtggttcggtttttggttgttgcgggtcgcggtttttagtgggtttttaggatttttttttacggcgggtatttatcg

SEQ ID NO: 2211 - DNA, 211 bp, synthetic construct
  misc_feature 1..211: note = Description of Artificial Sequence: Synthetic polynucleotide
  source 1..211: mol_type = other DNA
cgtcgttcgcgttttttgttttttattttttaatttttgcgtggttttagggtttatatttttggagtttttttttttagtaaatagtgttgttttttatttaatagtagaggcgtttaggagtttaggcgatgtgtttaaggtcgaatagagggatagtagtgagttgtttaatttttttagttgcgtagttaggatacggttgggggcg

SEQ ID NO: 2212 - DNA, 193 bp, synthetic construct
  misc_feature 1..193: note = Description of Artificial Sequence: Synthetic polynucleotide
  source 1..193: mol_type = other DNA
cgcgggggattttaggtcgggacggagttttttttggttcgttgtgcgcgtacgtttggaaaggcgggatttaaggtagcgatgttgcgggaggttttgtagtgttaacgagttttcgaacggtttcgttttattttttttttgtgtgtttcgtaagtttttgtttagtaaatcgttatagtttcggcgcgcg

SEQ ID NO: 2213 - skipped

SEQ ID NO: 2214 - DNA, 199 bp, synthetic construct
  misc_feature 1..199: note = Description of Artificial Sequence: Synthetic polynucleotide
  source 1..199: mol_type = other DNA
cgtaataaattttcgtagatatcgtatttttaatgcggtgtttttttgtgttagtgtttcggcggtttttgtagggtgttaatgttacggttgtatatcgttttttttttttattatttttatttgaatagatttggaggaggcggaaatggaaattagggtatgtttataagttggattcgttagatttttttgttcg

SEQ ID NO: 2215 - DNA, 87 bp, synthetic construct
  misc_feature 1..87: note = Description of Artificial Sequence: Synthetic oligonucleotide
  source 1..87: mol_type = other DNA
cgcggtcgttacgtttcgttttttgtatttagtttttttggcgttttcgttgtagtatttaagattaggcgtcgtttttgttagtcg

SEQ ID NO: 2216 - DNA, 68 bp, synthetic construct
  misc_feature 1..68: note = Description of Artificial Sequence: Synthetic oligonucleotide
  source 1..68: mol_type = other DNA
cgtaaattgattatgaaatatacgatgttaattcggagttgtattttttagttgggtattttcgcgcg

SEQ ID NO: 2217 - DNA, 61 bp, synthetic construct
  misc_feature 1..61: note = Description of Artificial Sequence: Synthetic oligonucleotide
  source 1..61: mol_type = other DNA
cggtgaaaattagtttgtggtgtattgagatttgtaaattattttttgaatgttaggggcg

SEQ ID NO: 2218 - DNA, 40 bp, synthetic construct
  misc_feature 1..40: note = Description of Artificial Sequence: Synthetic oligonucleotide
  source 1..40: mol_type = other DNA
cggatcggcggtagtagaagcggtagcggtaaagtattcg

SEQ ID NO: 2219 - DNA, 647 bp, synthetic construct
  misc_feature 1..647: note = Description of Artificial Sequence: Synthetic polynucleotide
  source 1..647: mol_type = other DNA
cggttgttgttattgttttgtcgttgtcgagtcggttatttgggtattcgcggagtcgcgtcgttgttatcgtttcggcggtttttcggagtgcgcggagggggcggcggaggagcgagatatttatagtaatcgaggatgcgaggggcgtttagtagtagcgagtgtttgggagttaggaggaggttttcgcgcgtcggtaatttttagtgttaggcgttttgtagttttcgcgcgtcgcgtttgggttcgtatcgttttcgtagtgagggttcgttcgagcggtaagtttttttcggcggttaagtcgatatttttttttcgtttcgtcgtttatttcgggtagtagtcgcggaataatggagagcgtagttagtagttttggagacggcgttcgggggaggacgcgtcgtcgtcgtcgtcgttgtcgttagggtaggcgcgcgtcgcgtggagtcgggcgggtgcgagggcgcgcggcggggggtggggggtacgcgtcgcgcggggggcgggggtagtggggggcgcgcgcgcgggttcggggagttcgcggggagagttcggcgttcggcgtagcgcggcgcggttaagtttcgcgtttttttcgttttttttcggcgcgttcgttttcgtttcgtcgttcg

SEQ ID NO: 2220 - DNA, 327 bp, synthetic construct
  misc_feature 1..327: note = Description of Artificial Sequence: Synthetic polynucleotide
  source 1..327: mol_type = other DNA
cgaggcgcgggttgagtttttagtatttggtttgagcggcgtgggtagtagtttgtatcgcggatatttttaattttgtcgcgtttgcgtcgtattttggtcgtggtagcgatttttcgggtatttttgaggtcgtttttagttttataagtatttagtcgtttattttagagtagcggcgtcgatcgttttaagaggagttagttttcgatatcgttttttatttatttttttatatttttatcgttggagggggtgagtgtcgtggataggcgttttcgttcggggatagtttagcggcggtagttagttcgattttttttcgcg

SEQ ID NO: 2221 - skipped

SEQ ID NO: 2222 - DNA, 324 bp, synthetic construct
  misc_feature 1..324: note = Description of Artificial Sequence: Synthetic polynucleotide
  source 1..324: mol_type = other DNA
cgtaagggtaattattggacgttggattcggtttgcgaagatatgttcgagaagggtaattatcggcgtcgtcgtcgtatgaagaggttttttcggtcgtcgttcgcgtatttttagttcggtaaggggtttttcggggtcggaggcgtcgtaggcgggtgcggcgtggcgggcgtcggggtcgacggttacggttatttggcgttttttaagtatttgtagtttggtttttttaataattcgtggtcgttatcgtagttttttttatttatgttttatgttttttgttagatggcggtagtcgtagcggttgtagtagttgcg

SEQ ID NO: 2223 - DNA, 77 bp, synthetic construct
  misc_feature 1..77: note = Description of Artificial Sequence: Synthetic oligonucleotide
  source 1..77: mol_type = other DNA
cgtttcgtcgtgttcgatgggtgcgtttttagcgttgtcgtcgcggcgttcggtttcgggttttcgtcgttgcgtcg

SEQ ID NO: 2224 - DNA, 158 bp, synthetic construct
  misc_feature 1..158: note = Description of Artificial Sequence: Synthetic polynucleotide
  source 1..158: mol_type = other DNA
cgtttttatttcggtatagatagtttttaaagttgttcgtattttttagatttcgttttttgtttagttttcggatttcgtttaggggttgagttgacgttcgcgggtggatttttttggttcgttgcgtagggaattgatttcgggaatttagggcg

SEQ ID NO: 2225 - DNA, 79 bp, synthetic construct
  misc_feature 1..79: note = Description of Artificial Sequence: Synthetic oligonucleotide
  source 1..79: mol_type = other DNA
cgcgcgtttcgcgtttttggcggtcgtagcgttgtttattaattgatttttttattgatttatttaatttttaggagcg

SEQ ID NO: 2226 - DNA, 137 bp, synthetic construct
  misc_feature 1..137: note = Description of Artificial Sequence: Synthetic polynucleotide
  source 1..137: mol_type = other DNA
cgttttggagcggtgggaggacgcggagcgtcgttttttggttttcgatattttgttcgttttttttagtgggtttgtggttgcgttttttcgaaggaagtaataaatttttttgattttgggggttagaggagacg

SEQ ID NO: 2227 - DNA, 112 bp, synthetic construct
  misc_feature 1..112: note = Description of Artificial Sequence: Synthetic polynucleotide
  source 1..112: mol_type = other DNA
cgttgcggtatttagcggtttatcggggttgtattgttgtagcggttttttgtgttatttgtagtttaggaggttgagtatagtgagtattagtagtagtgtatagttcgcg

SEQ ID NO: 2228-2229 - skipped (2 entries)

SEQ ID NO: 2230 - DNA, 282 bp, synthetic construct
  misc_feature 1..282: note = Description of Artificial Sequence: Synthetic polynucleotide
  source 1..282: mol_type = other DNA
cggttttttagttttagttgtgcgttttcgttcgggcgaggtggggttgatcgcggtcgtttgtatacgttttttttggttcgcgttttcggtttgggagggcggattcgtttattttacgatggtttcggttttggaagggattgttttcgtgattcgtttttttaatagtcgttaataattttttttaacgttttttgcgcggttcgtttttgagaattttggttcgggagagcgacgcggggttttcggggttgcgtaggttgcggcgttttgtttacg

SEQ ID NO: 2231 - DNA, 81 bp, synthetic construct
  misc_feature 1..81: note = Description of Artificial Sequence: Synthetic oligonucleotide
  source 1..81: mol_type = other DNA
cggcgcggcggcggggggcgtttcgtaagttcgcggttttgagcggttattcgcgtagtaagttgggcgagttggtagtcg

SEQ ID NO: 2232 - DNA, 53 bp, synthetic construct
  misc_feature 1..53: note = Description of Artificial Sequence: Synthetic oligonucleotide
  source 1..53: mol_type = other DNA
cgcggtttttgttttttgcgttagcgtgagttcggttagggtttttacggtcg

SEQ ID NO: 2233 - DNA, 40 bp, synthetic construct
  misc_feature 1..40: note = Description of Artificial Sequence: Synthetic oligonucleotide
  source 1..40: mol_type = other DNA
cggcgttagtttacgttttcgttggcgttttttcggcgcg

SEQ ID NO: 2234 - DNA, 206 bp, synthetic construct
  misc_feature 1..206: note = Description of Artificial Sequence: Synthetic polynucleotide
  source 1..206: mol_type = other DNA
cggtcgatttatttggtgtcgcgtgcgttggcggttcgcgcggtagttaagttaaaggtcgaggtcgaggtcgagcgcggcgtttagtagtacggcgggggttagtagggcgggcgtcggtcgtagcgcgtttcgttttagtagtagtcgcgcgtcgtttttgtaggtcgtttcgtcgcgggttattcggggcgtttaggttgtcg

SEQ ID NO: 2235 - DNA, 38 bp, synthetic construct
  misc_feature 1..38: note = Description of Artificial Sequence: Synthetic oligonucleotide
  source 1..38: mol_type = other DNA
cgttgttgttgcgcggggcggcggtcgtcgtgttttcg

SEQ ID NO: 2236 - skipped

SEQ ID NO: 2237 - DNA, 25 bp, synthetic construct
  misc_feature 1..25: note = Description of Artificial Sequence: Synthetic oligonucleotide
  source 1..25: mol_type = other DNA
cgtgtgtacgcgttgtattcgttcg

SEQ ID NO: 2238 - DNA, 79 bp, synthetic construct
  misc_feature 1..79: note = Description of Artificial Sequence: Synthetic oligonucleotide
  source 1..79: mol_type = other DNA
cgttttttttttttttttttttttattaaatattatttgggaattgtttaaattttttttttaaaaaaagagagaggcg

SEQ ID NO: 2239 - DNA, 33 bp, synthetic construct
  misc_feature 1..33: note = Description of Artificial Sequence: Synthetic oligonucleotide
  source 1..33: mol_type = other DNA
cggtttcgcgtggcgtttcggtcgttgttttcg

SEQ ID NO: 2240 - DNA, 132 bp, synthetic construct
  misc_feature 1..132: note = Description of Artificial Sequence: Synthetic polynucleotide
  source 1..132: mol_type = other DNA
cggcgggcggcggcggcgcggagttgtatacggagaagacggagtgcgggcgttacggagagtattcgtttaagtaggacgttcgcggggaggtggttatggttagttcggtttacgatcgtttggtttgcg

SEQ ID NO: 2241 - DNA, 32 bp, synthetic construct
  misc_feature 1..32: note = Description of Artificial Sequence: Synthetic oligonucleotide
  source 1..32: mol_type = other DNA
cgtttggtatttttttttttgtttcgagggcg

SEQ ID NO: 2242-2243 - skipped (2 entries)

SEQ ID NO: 2244 - DNA, 20 bp, synthetic construct
  misc_feature 1..20: note = Description of Artificial Sequence: Synthetic oligonucleotide
  source 1..20: mol_type = other DNA
cgagtatgttagcggcgtcg

SEQ ID NO: 2245 - DNA, 85 bp, synthetic construct
  misc_feature 1..85: note = Description of Artificial Sequence: Synthetic oligonucleotide
  source 1..85: mol_type = other DNA
cggtacgttttttttttcggtcgtttttttttatataagcgtaggtagagggcgcgttagttatgttttgtttttgcgttcgtcg

SEQ ID NO: 2246 - DNA, 230 bp, synthetic construct
  misc_feature 1..230: note = Description of Artificial Sequence: Synthetic polynucleotide
  source 1..230: mol_type = other DNA
cggtttcgcgaaattcggttttttagttcgcgggacgcgttgtttgttaggcgggttcggcggtatttcgggggcgggaggggtcggtcgtagggtttttagtttggcgttcgcggggcgttcgtagcgaaggggtgggtgtcgttcgtgaacgtagtagggattagtttagttcgcgttcgtttttgggtttcggttatcgttttttcgttattttttcggtttttgcg

SEQ ID NO: 2247 - DNA, 84 bp, synthetic construct
  misc_feature 1..84: note = Description of Artificial Sequence: Synthetic oligonucleotide
  source 1..84: mol_type = other DNA
cgggtcgttagttttagggtgtcgggttttaattaaggtttcgaagtttttacgtatttgagggtattttgattagtttttgcg

SEQ ID NO: 2248 - DNA, 42 bp, synthetic construct
  misc_feature 1..42: note = Description of Artificial Sequence: Synthetic oligonucleotide
  source 1..42: mol_type = other DNA
cgcgatttttttttgatttagttaaacggaaaagttcgcgcg

SEQ ID NO: 2249 - DNA, 45 bp, synthetic construct
  misc_feature 1..45: note = Description of Artificial Sequence: Synthetic oligonucleotide
  source 1..45: mol_type = other DNA
cgtcgtgttttttttcgttttcgaaagggtagaaagagtcgttcg

SEQ ID NO: 2250 - DNA, 26 bp, synthetic construct
  misc_feature 1..26: note = Description of Artificial Sequence: Synthetic oligonucleotide
  source 1..26: mol_type = other DNA
cgttcgttagtattttttgtttcgcg

SEQ ID NO: 2251 - DNA, 50 bp, synthetic construct
  misc_feature 1..50: note = Description of Artificial Sequence: Synthetic oligonucleotide
  source 1..50: mol_type = other DNA
cgaggtttaggtggaggttgaggttgtcgcgcgtcgcgggaggagtttcg

SEQ ID NO: 2252 - DNA, 56 bp, synthetic construct
  misc_feature 1..56: note = Description of Artificial Sequence: Synthetic oligonucleotide
  source 1..56: mol_type = other DNA
cgtttttgagttagggacgcgcgtggggggtgggcgtgtacgcgggtgggttagcg

SEQ ID NO: 2253 - DNA, 44 bp, synthetic construct
  misc_feature 1..44: note = Description of Artificial Sequence: Synthetic oligonucleotide
  source 1..44: mol_type = other DNA
cgtttttatcgcgtacgcgtttttttcgcgcgcgtatacgttcg

SEQ ID NO: 2254-2255 - skipped (2 entries)

SEQ ID NO: 2256 - DNA, 58 bp, synthetic construct
  misc_feature 1..58: note = Description of Artificial Sequence: Synthetic oligonucleotide
  source 1..58: mol_type = other DNA
cgcggggtagttgtttaagtggatcgatattatcgtttgtttggcgggtaggcgggcg

SEQ ID NO: 2257 - DNA, 151 bp, synthetic construct
  misc_feature 1..151: note = Description of Artificial Sequence: Synthetic polynucleotide
  source 1..151: mol_type = other DNA
cggtagaagatagcgtttttaggattagcgattttgtggtttattcggttattgggtttcggcgtaaattttttttaggtagtgcgggcgatgttgattgtagacgtcgggtagggttttcgtgcgggcgggagcgggggaagttagtgcg

SEQ ID NO: 2258 - DNA, 17 bp, synthetic construct
  misc_feature 1..17: note = Description of Artificial Sequence: Synthetic oligonucleotide
  source 1..17: mol_type = other DNA
cggattttttaggatcg

SEQ ID NO: 2259 - DNA, 70 bp, synthetic construct
  misc_feature 1..70: note = Description of Artificial Sequence: Synthetic oligonucleotide
  source 1..70: mol_type = other DNA
cgttcgttgtttttcgttgcgtttagggatggagggttttattatttatggaattgttggtttttttgcg

SEQ ID NO: 2260 - DNA, 59 bp, synthetic construct
  misc_feature 1..59: note = Description of Artificial Sequence: Synthetic oligonucleotide
  source 1..59: mol_type = other DNA
cgtttttgagatttcgttgagaaatttttagcgggttagcgtttgggcgttgggcgtcg

SEQ ID NO: 2261 - DNA, 25 bp, synthetic construct
  misc_feature 1..25: note = Description of Artificial Sequence: Synthetic oligonucleotide
  source 1..25: mol_type = other DNA
cgttgggtaatttttattcgagtcg

SEQ ID NO: 2262 - DNA, 57 bp, synthetic construct
  misc_feature 1..57: note = Description of Artificial Sequence: Synthetic oligonucleotide
  source 1..57: mol_type = other DNA
cggcgttgacgttttggttttgggggttgtttggttggtgttaggtagcggaagacg

SEQ ID NO: 2263 - DNA, 111 bp, synthetic construct
  misc_feature 1..111: note = Description of Artificial Sequence: Synthetic polynucleotide
  source 1..111: mol_type = other DNA
cgagtagttttacgttttgttaaggacggtaggtgtaagggtcgggggattttttgacggggtcgttttttcgggtacggggaggtttttatcgagttttaattttgaacg

SEQ ID NO: 2264 - DNA, 211 bp, synthetic construct
  misc_feature 1..211: note = Description of Artificial Sequence: Synthetic polynucleotide
  source 1..211: mol_type = other DNA
cgggtcgttgtttttgttgtattatgtaaaggtggttgggaaagcgcgttgatttatatttatatagtttattttttttttatagtatgtgattaatacgtatttcggggaggagggagcgcggttgggggtgttaatcggaagggaatagatagtgagtgttattttgttgggaggttttagaagtaaagcgttaacgacgatagtagcg

SEQ ID NO: 2265 - DNA, 75 bp, synthetic construct
  misc_feature 1..75: note = Description of Artificial Sequence: Synthetic oligonucleotide
  source 1..75: mol_type = other DNA
cgtttttacgcgcgttgtcggtatttgttcgttttgttgtaatttgttgtagtgtttgaaagagtagtaggagcg

SEQ ID NO: 2266 - skipped

SEQ ID NO: 2267 - DNA, 66 bp, synthetic construct
  misc_feature 1..66: note = Description of Artificial Sequence: Synthetic oligonucleotide
  source 1..66: mol_type = other DNA
cgggcgttggagaaggcgtttggcgcgaagttgggcggcgtttcgagggcggaggataggtggtcg

SEQ ID NO: 2268 - skipped

SEQ ID NO: 2269 - DNA, 163 bp, synthetic construct
  misc_feature 1..163: note = Description of Artificial Sequence: Synthetic polynucleotide
  source 1..163: mol_type = other DNA
cggggcggcgggcgtatgcgcgtgcgcggtgcggttttagttttggttgtcgtcgtttgtcgtcgtcgtcgcgatgtttattttagttaaagcggttgcgggtttggggattcggttcgggtagcggagttttcggattcgtcgattcgtcgaggagcgcgcg

SEQ ID NO: 2270 - DNA, 99 bp, synthetic construct
  misc_feature 1..99: note = Description of Artificial Sequence: Synthetic oligonucleotide
  source 1..99: mol_type = other DNA
cggagtaaagttagcgcgtttcgcggttcggaatttagttggttcgttatttttttatttttgcgattttattttcgatcgcgttttagggtagaagcg

SEQ ID NO: 2271 - DNA, 96 bp, synthetic construct
  misc_feature 1..96: note = Description of Artificial Sequence: Synthetic oligonucleotide
  source 1..96: mol_type = other DNA
cggcggcggcggtagttttagtcgcgttcgttatatatatttttattcgttcggtgtatacgtcgcgtcgcgggtagtgtcgtttgcggaggcgcg

SEQ ID NO: 2272 - skipped

SEQ ID NO: 2273 - DNA, 16 bp, synthetic construct
  misc_feature 1..16: note = Description of Artificial Sequence: Synthetic oligonucleotide
  source 1..16: mol_type = other DNA
cgtgttaatttcgtcg

SEQ ID NO: 2274 - skipped

SEQ ID NO: 2275 - DNA, 141 bp, synthetic construct
  misc_feature 1..141: note = Description of Artificial Sequence: Synthetic polynucleotide
  source 1..141: mol_type = other DNA
cgtttattttgtagtcgagtatataaggttcgtcgaagttatcgagtaggttttgtagttgtaggtagttttcgtcgtcgcgttttattacgtcgtggaaggtaggtacgtagtcgcgtagcgcgttagttattagtcgcg

SEQ ID NO: 2276 - skipped

SEQ ID NO: 2277 - DNA, 37 bp, synthetic construct; identical to SEQ ID NO: 565
  misc_feature 1..37: note = Description of Artificial Sequence: Synthetic oligonucleotide
  source 1..37: mol_type = other DNA

SEQ ID NO: 2278 - DNA, 52 bp, synthetic construct
  misc_feature 1..52: note = Description of Artificial Sequence: Synthetic oligonucleotide
  source 1..52: mol_type = other DNA
cgaggcgttttcgttttcgttatttatatagggcgttaagtgtttcgattcg

SEQ ID NO: 2279-2282 - skipped (4 entries)

SEQ ID NO: 2283 - DNA, 17 bp, synthetic construct
  misc_feature 1..17: note = Description of Artificial Sequence: Synthetic oligonucleotide
  source 1..17: mol_type = other DNA
cgtttcgttttaattcg

SEQ ID NO: 2284 - DNA, 136 bp, synthetic construct
  misc_feature 1..136: note = Description of Artificial Sequence: Synthetic polynucleotide
  source 1..136: mol_type = other DNA
cgcggggggaggtttttggttcgtcgttttcgttgtcgtttgatcgtatttttggagggtttcgtattttgttaggtttttggaggtaaatatatattttcgatttataattggttttcgcgttaggggattcgcg

SEQ ID NO: 2285 - DNA, 31 bp, synthetic construct
  misc_feature 1..31: note = Description of Artificial Sequence: Synthetic oligonucleotide
  source 1..31: mol_type = other DNA
cggttagggagtgagcggggcgttgggcgcg

SEQ ID NO: 2286 - DNA, 25 bp, synthetic construct
  misc_feature 1..25: note = Description of Artificial Sequence: Synthetic oligonucleotide
  source 1..25: mol_type = other DNA
cgttaattagattttagggtgtacg

SEQ ID NO: 2287 - DNA, 12 bp, synthetic construct
  misc_feature 1..12: note = Description of Artificial Sequence: Synthetic oligonucleotide
  source 1..12: mol_type = other DNA
cgttcgttaacg

SEQ ID NO: 2288 - skipped

SEQ ID NO: 2289 - DNA, 199 bp, synthetic construct
  misc_feature 1..199: note = Description of Artificial Sequence: Synthetic polynucleotide
  source 1..199: mol_type = other DNA
cgtagcgtgtagtcgcggaatagcgtttttagttttgggtaagcgaatttttcgtcgtacgttcggagttcgcgtcggcggtttgtttcggtcgttcgttcggcgttttcgggttcgttcgcgtcgttttcgtcgtcgttttcgtcgcgcggcgttttcgttattttagcgttatgtagcggtcgcggtcgcgggcgcg

SEQ ID NO: 2290 - DNA, 91 bp, synthetic construct
  misc_feature 1..91: note = Description of Artificial Sequence: Synthetic oligonucleotide
  source 1..91: mol_type = other DNA
cgtgggggcgcggcgcgggcgatacgtgcgggtcgttaggagggggagggggacgcgcgtcgtcgggttcgttattttgtattcggggtcg

SEQ ID NO: 2291 - DNA, 108 bp, synthetic construct
  misc_feature 1..108: note = Description of Artificial Sequence: Synthetic polynucleotide
  source 1..108: mol_type = other DNA
cgttttttttatggattttttagtatttgtaggttataggataatagaagttatagtagagttatcgaggaattttaggaacggaggagatggaatagtggagacgcg

SEQ ID NO: 2292 - DNA, 13 bp, synthetic construct
  misc_feature 1..13: note = Description of Artificial Sequence: Synthetic oligonucleotide
  source 1..13: mol_type = other DNA
cgaaatcggtgcg

SEQ ID NO: 2293 - DNA, 176 bp, synthetic construct
  misc_feature 1..176: note = Description of Artificial Sequence: Synthetic polynucleotide
  source 1..176: mol_type = other DNA
cgggggcggcggggtgatagttttcgtgtatgaattagttattttttaggtttcgtttcggcgggggtcggtcggacgttcgtttcgtataaagcgggtattcgggtcgtttggagtagaaagtcgcgtattttttttcgttaggcgttttttcggacgttttgtttagcgggtcg

SEQ ID NO: 2294 - skipped

SEQ ID NO: 2295 - DNA, 157 bp, synthetic construct
  misc_feature 1..157: note = Description of Artificial Sequence: Synthetic polynucleotide
  source 1..157: mol_type = other DNA
cgggcgtttttttaggtttggtcgaggggcgtcgcgtagaggcggcggcggcgtacggaggcggtagacgacgcgttttcggcgttcgtagtttcggtttcgcgttttcgcggtttaaagtaattttgggagtcgtcgtttttcgcggaatttttcg

SEQ ID NO: 2296 - DNA, 66 bp, synthetic construct
  misc_feature 1..66: note = Description of Artificial Sequence: Synthetic oligonucleotide
  source 1..66: mol_type = other DNA
cggtcgcggcgggagggatagggggtttgggtgggaagggagcgcgagggtttttagcggttcgcg

SEQ ID NO: 2297 - DNA, 498 bp, synthetic construct
  misc_feature 1..498: note = Description of Artificial Sequence: Synthetic polynucleotide
  source 1..498: mol_type = other DNA
cgtgcgttaggcggaaatgttttagtaggttttcgcgtatcgggtcgttcggggggtagtaggggtaggcggcggcgggtaggtcgagcgcgtcgggcggtggcgtagcggggtacgagtattttttgtgcgttaggtaggtttcgaggttgtggaagtttacgcggtaggtcgtgtattcgtggtagtcggttagcgtcggtgtcggggtttcggggagcgggcgtcgcggttttttgtttaggtcgatggggtcgtcggtcgcggggtcgggcgagcgcgtaggggcgaggtcggggtcgttttcgttttcgttttcgggtcgcggcgattcgggcgcgggggcgtggtcgggcggcggggggggcggggcgtcggtcgcgtgtagttcgtagagtttgcggcgtttgcgcgtgcgtataggcgcggcgggagagggggtcgggggcgcggtcggtttagggggtttcgggggcgcggtcggtcggcgcggcggcg

SEQ ID NO: 2298 - DNA, 27 bp, synthetic construct
  misc_feature 1..27: note = Description of Artificial Sequence: Synthetic oligonucleotide
  source 1..27: mol_type = other DNA
cgagcgcgaagggcgttcggattcgcg

SEQ ID NO: 2299-2300 - skipped (2 entries)

SEQ ID NO: 2301 - DNA, 16 bp, synthetic construct
  misc_feature 1..16: note = Description of Artificial Sequence: Synthetic oligonucleotide
  source 1..16: mol_type = other DNA
cgcgaggtaggcgacg

SEQ ID NO: 2302 - DNA, 53 bp, synthetic construct
  misc_feature 1..53: note = Description of Artificial Sequence: Synthetic oligonucleotide
  source 1..53: mol_type = other DNA
cgtcgtaagagaagttgttaagtttcgtaggttttgattcggcgtttttcgcg

SEQ ID NO: 2303-2306 - skipped (4 entries)

SEQ ID NO: 2307 - DNA, 14 bp, synthetic construct
  misc_feature 1..14: note = Description of Artificial Sequence: Synthetic oligonucleotide
  source 1..14: mol_type = other DNA
cgtaggtggatacg

SEQ ID NO: 2308 - DNA, 186 bp, synthetic construct
  misc_feature 1..186: note = Description of Artificial Sequence: Synthetic polynucleotide
  source 1..186: mol_type = other DNA
cgttatggagaaaattaatggaggaaaaattatagagttattcgaaatagttgcgttgtttattattcggtgtttgagtttgttttttttgtaattagattatatgtgaggtagttttagttaattgtttgtgttatttatcggggaattttagttttatttgtgaatatttaggttttttcgtcg

SEQ ID NO: 2309 - DNA, 79 bp, synthetic construct
  misc_feature 1..79: note = Description of Artificial Sequence: Synthetic oligonucleotide
  source 1..79: mol_type = other DNA
cgcgtattttttttatttcgatatttattgttatttttatagcggagcgaggggtttcgtcgagggcgagcgtatttcg

SEQ ID NO: 2310 - DNA, 49 bp, synthetic construct
  misc_feature 1..49: note = Description of Artificial Sequence: Synthetic oligonucleotide
  source 1..49: mol_type = other DNA
cgcgggggcgtttttcgttgtttgtagggagcgcggcgcggacgcggcg

SEQ ID NO: 2311 - DNA, 17 bp, synthetic construct
  misc_feature 1..17: note = Description of Artificial Sequence: Synthetic oligonucleotide
  source 1..17: mol_type = other DNA
cgcgaacggtttattcg

SEQ ID NO: 2312-2314 - skipped (3 entries)

SEQ ID NO: 2315 - DNA, 165 bp, synthetic construct
  misc_feature 1..165: note = Description of Artificial Sequence: Synthetic polynucleotide
  source 1..165: mol_type = other DNA
cggggtttggtaggaagtgtagtgtattttttagttttagggtaattaggatagtatgaattttttattttgtggtagaataaacggttagcgtttcgatgtggcgcgttcgatttttttttatagagtttaaaagttacgtttaattaaattgtagcgttttcg

SEQ ID NO: 2316 - DNA, 14 bp, synthetic construct
  misc_feature 1..14: note = Description of Artificial Sequence: Synthetic oligonucleotide
  source 1..14: mol_type = other DNA
cgttgattcgcgcg

SEQ ID NO: 2317-2318 - skipped (2 entries)

SEQ ID NO: 2319 - DNA, 97 bp, synthetic construct
  misc_feature 1..97: note = Description of Artificial Sequence: Synthetic oligonucleotide
  source 1..97: mol_type = other DNA
cgtttcgtacgttcgtacgtttagcggggttcgtattgagtatgggcgcggcggtcgtgcgttggtatttgtgcgtgttgttggttttgggtatacg

SEQ ID NO: 2320 - skipped

SEQ ID NO: 2321 - DNA, 98 bp, synthetic construct
  misc_feature 1..98: note = Description of Artificial Sequence: Synthetic oligonucleotide
  source 1..98: mol_type = other DNA
cgaggtttagtttttggttttaaggaataaattcgttggtttgaaagggagttacggtagaagtttaggggtagagcggcgggagcgcgcgattcgcg

SEQ ID NO: 2322 - DNA, 69 bp, synthetic construct
  misc_feature 1..69: note = Description of Artificial Sequence: Synthetic oligonucleotide
  source 1..69: mol_type = other DNA
cgcggaaggttcgcgcgttttgcgtcgtcgtcgtttagtgtcgtcgttagtatttttttcgttttttcg

SEQ ID NO: 2323-2326 - skipped (4 entries)

SEQ ID NO: 2327 - DNA, 103 bp, synthetic construct
  misc_feature 1..103: note = Description of Artificial Sequence: Synthetic polynucleotide
  source 1..103: mol_type = other DNA
cgcgttcgtcgttttcggaggagcgggttggtcgatcgttatcgcgtcgtttttcggtcgttttcgaagtcgttttatcgcggtttttgtcgttttggggtcg

SEQ ID NO: 2328 - skipped

SEQ ID NO: 2329 - DNA, 21 bp, synthetic construct
  misc_feature 1..21: note = Description of Artificial Sequence: Synthetic oligonucleotide
  source 1..21: mol_type = other DNA
cgtcgtcgtcgttgagagtcg

SEQ ID NO: 2330 - DNA, 148 bp, synthetic construct
  misc_feature 1..148: note = Description of Artificial Sequence: Synthetic polynucleotide
  source 1..148: mol_type = other DNA
cgcgcgggcgcgaggggttgggacgcgggagttttttgagtgcggagcgcggagttttggtgtttcggcgtattgtagttatattttcgggtcgcgcgttttcgtcgttttttattcgcgtcgtagggtttttttttttgaggcgtcg

SEQ ID NO: 2331-2332 - skipped (2 entries)

SEQ ID NO: 2333 - DNA, 26 bp, synthetic construct
  misc_feature 1..26: note = Description of Artificial Sequence: Synthetic oligonucleotide
  source 1..26: mol_type = other DNA
cggttattacgcgttgtttttcggcg

SEQ ID NO: 2334 - DNA, 119 bp, synthetic construct
  misc_feature 1..119: note = Description of Artificial Sequence: Synthetic polynucleotide
  source 1..119: mol_type = other DNA
cgttcgatgatgaggatgtatttttcgtaggtgtagtttttgaagcggtagtaacgtttgtggtttttgagttaggataggacgttatggttgcggtagcgcgcgtatttgggcgtgcg

SEQ ID NO: 2335 - DNA, 66 bp, synthetic construct
  misc_feature 1..66: note = Description of Artificial Sequence: Synthetic oligonucleotide
  source 1..66: mol_type = other DNA
cgttttattttgttgaggtcgttttcggttttttttgatttaggttgggcgggaaaggtcgggtcg

SEQ ID NO: 2336 - DNA, 60 bp, synthetic construct
  misc_feature 1..60: note = Description of Artificial Sequence: Synthetic oligonucleotide
  source 1..60: mol_type = other DNA
cgcggttggggtttcgcgttttttggagcgttttttgtttagatacgacgatttcgttcg

SEQ ID NO: 2337 - skipped

SEQ ID NO: 2338 - DNA, 124 bp, synthetic construct
  misc_feature 1..124: note = Description of Artificial Sequence: Synthetic polynucleotide
  source 1..124: mol_type = other DNA
cggcggtaggagaagtttaaggttcgagcggttcgtagtttttacgtttgtatttttttattttcgttagttcgatggttcgtttcgcggcgtgtattggagtaagtaggtttcgtttcgagcg

SEQ ID NO: 2339 - skipped

SEQ ID NO: 2340 - DNA, 156 bp, synthetic construct
  misc_feature 1..156: note = Description of Artificial Sequence: Synthetic polynucleotide
  source 1..156: mol_type = other DNA
cgtttcggtttttatcgtcgcgtttttataggttattaggtgtcgttcgtttagaatgttaattatggcgtagatacgtagttatttgagattcgaggatatttgtaggaggatgattatttgcggggaggcggcggcgagcgtcgcggtgtttcg

SEQ ID NO: 2341 - skipped

SEQ ID NO: 2342 - DNA, 91 bp, synthetic construct
  misc_feature 1..91: note = Description of Artificial Sequence: Synthetic oligonucleotide
  source 1..91: mol_type = other DNA
cgttttaggaatgattcggtgatatcggtcgatgattttttttatagtttgtcggtgagcggcggcggaggtaaggtttcggcggcgcgcg

SEQ ID NO: 2343-2344 - skipped (2 entries)

SEQ ID NO: 2345 - DNA, 89 bp, synthetic construct
  misc_feature 1..89: note = Description of Artificial Sequence: Synthetic oligonucleotide
  source 1..89: mol_type = other DNA
cgtcgagttgtaggcgcgcgtttaatcgttttgttgggtttacgcggtttgagaggtcggagcgtttaattgttggtacgcgagtaacg

SEQ ID NO: 2346 - DNA, 13 bp, synthetic construct
  misc_feature 1..13: note = Description of Artificial Sequence: Synthetic oligonucleotide
  source 1..13: mol_type = other DNA
cggattaaagacg

SEQ ID NO: 2347 - skipped

SEQ ID NO: 2348 - DNA, 47 bp, synthetic construct
  misc_feature 1..47: note = Description of Artificial Sequence: Synthetic oligonucleotide
  source 1..47: mol_type = other DNA
cgcgatgtggtttcgtttggttttttgttgttggggtttggcgttcg

SEQ ID NO: 2349-2350 - skipped (2 entries)

SEQ ID NO: 2351 - DNA, 159 bp, synthetic construct
  misc_feature 1..159: note = Description of Artificial Sequence: Synthetic polynucleotide
  source 1..159: mol_type = other DNA
cgtttttcgtcgaggcgtaggggtagttatattgcggggcgtttgggcgacggcgttaaagttagggttataagggtacgggataagcggggcggggggagtaggagattaggatagaggtcggcgttcgtcgcgggcgtttttacgtcgcgggtatcg

SEQ ID NO: 2352-2354 - skipped (3 entries)

SEQ ID NO: 2355 - DNA, 78 bp, synthetic construct
  misc_feature 1..78: note = Description of Artificial Sequence: Synthetic oligonucleotide
  source 1..78: mol_type = other DNA
cggtcgttttttcgacgttcgcggttttttattgcgtcgaggcgagcgttacggttaaagtttaagtttcggcgttcg

SEQ ID NO: 2356 - skipped

SEQ ID NO: 2357 - DNA, 48 bp, synthetic construct
  misc_feature 1..48: note = Description of Artificial Sequence: Synthetic oligonucleotide
  source 1..48: mol_type = other DNA
cgcgttaattcggtcgttgtgtacggtcgggtgcgaaattttttcgcg

SEQ ID NO: 2358-2360 - skipped (3 entries)

SEQ ID NO: 2361 - DNA, 157 bp, synthetic construct
  misc_feature 1..157: note = Description of Artificial Sequence: Synthetic polynucleotide
  source 1..157: mol_type = other DNA
cgtgtttaattggtatttgttattaatatgtttgtttttatttaaatggtttagagtaaggttttgattaaattagtatttttacgttaatatttagtagcgtttttggtttttggtagattttttttttagttgttaaagtaaaattatagaagcg

SEQ ID NO: 2362 - skipped

SEQ ID NO: 2363 - DNA, 82 bp, synthetic construct
  misc_feature 1..82: note = Description of Artificial Sequence: Synthetic oligonucleotide
  source 1..82: mol_type = other DNA
cgtattcgcggggagggcggcgagcggggattagtcgaagtcgggagaggggcgtttttacggggcgggaaattggcgcgcg

SEQ ID NO: 2364 - DNA, 23 bp, synthetic construct
  misc_feature 1..23: note = Description of Artificial Sequence: Synthetic oligonucleotide
  source 1..23: mol_type = other DNA
cggttaggtgaggcggttaggcg

SEQ ID NO: 2365 - DNA, 38 bp, synthetic construct
  misc_feature 1..38: note = Description of Artificial Sequence: Synthetic oligonucleotide
  source 1..38: mol_type = other DNA
cgaattcgtaaagttgttcgtagacgcgcgggaattcg

SEQ ID NO: 2366 - skipped

SEQ ID NO: 2367 - DNA, 165 bp, synthetic construct
  misc_feature 1..165: note = Description of Artificial Sequence: Synthetic polynucleotide
  source 1..165: mol_type = other DNA
cgcgggttgtttagcgtgttagattttttttttttggacgtgcgtaagttgttggtggtcggtaatcgtatttagcggattttcgaggatttttttattttttacggcgatttggtttatttggattttaggaataattcgttgcgttcgttggaggagggtacg

SEQ ID NO: 2368-2370 - skipped (3 entries)

SEQ ID NO: 2371 - DNA, 23 bp, synthetic construct
  misc_feature 1..23: note = Description of Artificial Sequence: Synthetic oligonucleotide
  source 1..23: mol_type = other DNA
cgataggcggttttcggatatcg

SEQ ID NO: 2372 - skipped

SEQ ID NO: 2373 - DNA, 66 bp, synthetic construct
  misc_feature 1..66: note = Description of Artificial Sequence: Synthetic oligonucleotide
  source 1..66: mol_type = other DNA
cggcgttttcggggttgttgcgcgttcgcgtttagagttgtcgttttagggagttcgttacggtcg

SEQ ID NO: 2374 - DNA, 43 bp, synthetic construct
  misc_feature 1..43: note = Description of Artificial Sequence: Synthetic oligonucleotide
  source 1..43: mol_type = other DNA
cgggcgcgtagttcgttcgcgcggtttggattttttttgttcg

SEQ ID NO: 2375 - skipped

SEQ ID NO: 2376 - DNA, 62 bp, synthetic construct
  misc_feature 1..62: note = Description of Artificial Sequence: Synthetic oligonucleotide
  source 1..62: mol_type = other DNA
cgcgttgtacgaggatggttacgaggcgtagttggagtcgtcgtcgtcgtcgtatttgggcg

SEQ ID NO: 2377 - skipped

SEQ ID NO: 2378 - DNA, 138 bp, synthetic construct
  misc_feature 1..138: note = Description of Artificial Sequence: Synthetic polynucleotide
  source 1..138: mol_type = other DNA
cgttttcgggcgtacggaaattatttgttaggaaatttttaacgttttttttcgtttatttttttttattttttttttggcgcgttttttttttttttagaggtacgtagtggagtttttggagtttcgaatttttcg

SEQ ID NO: 2379-2382 - skipped (4 entries)

SEQ ID NO: 2383 - DNA, 187 bp, synthetic construct
  misc_feature 1..187: note = Description of Artificial Sequence: Synthetic polynucleotide
  source 1..187: mol_type = other DNA
cgagcggttttaatttcgtttcgtttgttgttgttgttgttggtgttgtttcggttgtagttgttgtcgttttacgatttcggggcgttgaggtaatagggttttttttttttattttttatttttttcggtttttttatagaagcgtcgtttttagtaatttttcgtgtattttttatttttgtcg

SEQ ID NO: 2384-2385 - skipped (2 entries)

SEQ ID NO: 2386 - DNA, 110 bp, synthetic construct
  misc_feature 1..110: note = Description of Artificial Sequence: Synthetic polynucleotide
  source 1..110: mol_type = other DNA
cgtaggttaagatttggttttagaattatcgttataagttgaagcgcgttcgcgttttaggggcggcggagtcgtttgatttggtagtattcgtcgagttgtacgtcgcg

SEQ ID NO: 2387 - skipped

SEQ ID NO: 2388 - DNA, 189 bp, synthetic construct
  misc_feature 1..189: note = Description of Artificial Sequence: Synthetic polynucleotide
  source 1..189: mol_type = other DNA
cgtgttttcgttcgcgtttgggtttcgtcgtattttagtagaagttattatagagaataaattatttttttgttttcgagatgggttttcggggaggaaggtaaattgtttgtttcgtgtataataagttaggcgtggagagtagcgcggaggaggtcgcggtagttatcgagcgggtagagtttttcg

SEQ ID NO: 2389 - DNA, 42 bp, synthetic construct
  misc_feature 1..42: note = Description of Artificial Sequence: Synthetic oligonucleotide
  source 1..42: mol_type = other DNA
cgcgagtgtatttaagcgttttcgttttatttatttttagcg

SEQ ID NO: 2390 - DNA, 33 bp, synthetic construct
  misc_feature 1..33: note = Description of Artificial Sequence: Synthetic oligonucleotide
  source 1..33: mol_type = other DNA
cgtggagcgtaaagtgtttgaagttttcgcgcg

SEQ ID NO: 2391 - DNA, 15 bp, synthetic construct
  misc_feature 1..15: note = Description of Artificial Sequence: Synthetic oligonucleotide
  source 1..15: mol_type = other DNA
cgttcggttggcgcg

SEQ ID NO: 2392 - DNA, 51 bp, synthetic construct
  misc_feature 1..51: note = Description of Artificial Sequence: Synthetic oligonucleotide
  source 1..51: mol_type = other DNA
cgtttattacggcgatttgcggtagttttagtaggtagttttgttttagcg

SEQ ID NO: 2393 - skipped

SEQ ID NO: 2394 - DNA, 268 bp, synthetic construct
  misc_feature 1..268: note = Description of Artificial Sequence: Synthetic polynucleotide
  source 1..268: mol_type = other DNA
cgaagatgggaaacggtcgtttgttgagagggggtatttgtagtttttttagaaaaggttggggtaggagagcgtgcggttagaggggtgggggtatcggagggggggttttattttttgttttatagtcgggtttttttcgcgaggcgttgggaagtatgaggtatgtagtatttaaaatgttttttgaaaaagacggatttgaagtttttttttataaatacgttattgtatttattttttatttagagacgggttgcgcgtttcg

SEQ ID NO: 2395 - skipped

SEQ ID NO: 2396 - DNA, 33 bp, synthetic construct
  misc_feature 1..33: note = Description of Artificial Sequence: Synthetic oligonucleotide
  source 1..33: mol_type = other DNA
cggtgatcggtttgattgtttttgggggtttcg

SEQ ID NO: 2397 - DNA, 23 bp, synthetic construct
  misc_feature 1..23: note = Description of Artificial Sequence: Synthetic oligonucleotide
  source 1..23: mol_type = other DNA
cgaaagtttcgggttagtgggcg

SEQ ID NO: 2398 - DNA, 40 bp, synthetic construct
  misc_feature 1..40: note = Description of Artificial Sequence: Synthetic oligonucleotide
  source 1..40: mol_type = other DNA
cgaggtatttggtcgggcggggaggcgtcgggtcggggcg

SEQ ID NO: 2399 - DNA, 10 bp, synthetic construct
  misc_feature 1..10: note = Description of Artificial Sequence: Synthetic oligonucleotide
  source 1..10: mol_type = other DNA
cggagtcgcg

SEQ ID NO: 2400 - DNA, 181 bp, synthetic construct
  misc_feature 1..181: note = Description of Artificial Sequence: Synthetic polynucleotide
  source 1..181: mol_type = other DNA
cgaaaacgaaatttatttttttgcgtttatttttgttagaggtttgtaggacgtgttttaatttggtatttcgagtttagaataaaagttacgggggttgcggtatgggtagggggaaggcgcgcggtggttgacgcggggtaggggttttggcgagcgcgggaggggcggttagtagtcg

SEQ ID NO: 2401 - DNA, 195 bp, synthetic construct
  misc_feature 1..195: note = Description of Artificial Sequence: Synthetic polynucleotide
  source 1..195: mol_type = other DNA
cgttaagtagtaggattatagcgttagcgtttggtttcggaggaaagataagttggagtacgtaagggcgattcgttttcgggggtttcggttaggtatttgtcgtatgtatttttttcgtggtggtggtatgagcgcgcgcggggcgcggggggtaggcgaggggattttggtaggcgtcgacgttttaggtcg

SEQ ID NO: 2402 - skipped

SEQ ID NO: 2403 - DNA, 358 bp, synthetic construct
  misc_feature 1..358: note = Description of Artificial Sequence: Synthetic polynucleotide
  source 1..358: mol_type = other DNA
cgcgagttcgggtgagagttatcggaatgcgggaacgtagtttagtcgggaatagggttttcgataggggtcgttcgtggttaggacgcggtcgttgaatagaggtcgcgcggcggtttttgttcgagggatttcgtgggcgggggttatacggaggtcgcgtacggttttcggggttggcgggggtaggtgggaggatttttttcgggttcgcgaatttgatttggtagcggttaggtgtttggaagcgtttttaaatgatagggttataaagatatgttggttaggtttgtagttagcgtagtaacgtggtttgtaggagcgtagaacgaggttagatagggttattcggacgtcg

SEQ ID NO: 2404 - DNA, 13 bp, synthetic construct
  misc_feature 1..13: note = Description of Artificial Sequence: Synthetic oligonucleotide
  source 1..13: mol_type = other DNA
cgttataattgcg

SEQ ID NO: 2405-2406 - skipped (2 entries)

SEQ ID NO: 2407 - DNA, 95 bp, synthetic construct
  misc_feature 1..95: note = Description of Artificial Sequence: Synthetic oligonucleotide
  source 1..95: mol_type = other DNA
cgggtattcgggacgaggcgagggcgtagaaaatttggagtttaattagtacggagttgagttttcgcgttttaatttttaggtgatttcgtgcg

SEQ ID NO: 2408 - DNA, 45 bp, synthetic construct
  misc_feature 1..45: note = Description of Artificial Sequence: Synthetic oligonucleotide
  source 1..45: mol_type = other DNA
cgtcgagagggtaggacgcgtacggtgcgttttaatttgttgtcg

SEQ ID NO: 2409 - DNA, 104 bp, synthetic construct
  misc_feature 1..104: note = Description of Artificial Sequence: Synthetic polynucleotide
  source 1..104: mol_type = other DNA
cgcgagttagggggaggcgcgtcggaaagcgagagtgataagtagtttataagtcgaaaagtttttcgcgggaggcgcgcgtcgcgtgggtttcgatttagtcg

SEQ ID NO: 2410 - DNA, 87 bp, synthetic construct
  misc_feature 1..87: note = Description of Artificial Sequence: Synthetic oligonucleotide
  source 1..87: mol_type = other DNA
cgggagggtggcggaaggtggtgtatcgtagcgtggttttcgtcgttgtcgtcgcggttttgtaaagtgttagcgggggcgaaagcg

SEQ ID NO: 2411 - DNA, 62 bp, synthetic construct
  misc_feature 1..62: note = Description of Artificial Sequence: Synthetic oligonucleotide
  source 1..62: mol_type = other DNA
cgatattgaataataatcgcggggaggagaggttatttgtagtcgaggttcgtaaattgtcg

SEQ ID NO: 2412-2419 - skipped (8 entries)

SEQ ID NO: 2420 - DNA, 145 bp, synthetic construct
  misc_feature 1..145: note = Description of Artificial Sequence: Synthetic polynucleotide
  source 1..145: mol_type = other DNA
cgggaatcgtaggagaggattggggttttaggtggacggtgttgattgtattggttttgaagattggaagtgggtgtaggaggaatttgcgatagttgagattagggcgcgcgggtagatgcgttaggtcgttagtaaatcggcg

SEQ ID NO: 2421 - skipped

SEQ ID NO: 2422 - DNA, 19 bp, synthetic construct
  misc_feature 1..19: note = Description of Artificial Sequence: Synthetic oligonucleotide
  source 1..19: mol_type = other DNA
cggtttttggcggtgggcg

SEQ ID NO: 2423 - DNA, 35 bp, synthetic construct
  misc_feature 1..35: note = Description of Artificial Sequence: Synthetic oligonucleotide
  source 1..35: mol_type = other DNA
cggaggtttcgttaatggggtcgtcgtcgtcgtcg

SEQ ID NO: 2424-2425 - skipped (2 entries)

SEQ ID NO: 2426 - DNA, 36 bp, synthetic construct
  misc_feature 1..36: note = Description of Artificial Sequence: Synthetic oligonucleotide
  source 1..36: mol_type = other DNA
cggtttttttgtagttagcggattagcgttagttcg

SEQ ID NO: 2427 - skipped

SEQ ID NO: 2428 - DNA, 42 bp, synthetic construct
  misc_feature 1..42: note = Description of Artificial Sequence: Synthetic oligonucleotide
  source 1..42: mol_type = other DNA
cgtataatggtaaatgggattaggtaggcgaaggtttagtcg

SEQ ID NO: 2429-2430 - skipped (2 entries)

SEQ ID NO: 2431 - DNA, 18 bp, synthetic construct
  misc_feature 1..18: note = Description of Artificial Sequence: Synthetic oligonucleotide
  source 1..18: mol_type = other DNA
cggcgcgggcgttgcgcg

SEQ ID NO: 2432-2434 - skipped (3 entries)

SEQ ID NO: 2435 - DNA, 118 bp, synthetic construct
  misc_feature 1..118: note = Description of Artificial Sequence: Synthetic polynucleotide
  source 1..118: mol_type = other DNA
cgcgtcgttgttttgttttaggtttcggtgcggttttaagttttagtttagggtttttaggtttttttaggcggcggtggcggtatttatttgggtcgcggagtcggggtttggtacg

SEQ ID NO: 2436 - DNA, 22 bp, synthetic construct
  misc_feature 1..22: note = Description of Artificial Sequence: Synthetic oligonucleotide
  source 1..22: mol_type = other DNA
cgttcgcgtcgttcgcggttcg

SEQ ID NO: 2437-2440 - skipped (4 entries)

SEQ ID NO: 2441 - DNA, 31 bp, synthetic construct
  misc_feature 1..31: note = Description of Artificial Sequence: Synthetic oligonucleotide
  source 1..31: mol_type = other DNA
cgtaatatattttagtatcgagtttttgtcg

SEQ ID NO: 2442-2450 - skipped (9 entries)

SEQ ID NO: 2451 - DNA, 69 bp, synthetic construct
  misc_feature 1..69: note = Description of Artificial Sequence: Synthetic oligonucleotide
  source 1..69: mol_type = other DNA
cgtttttcggttcgtttttttcgagcgtcgtcgatacgttagttaaacggtcgttggtcgtttttagcg

SEQ ID NO: 2452 - DNA, 415 bp, synthetic construct
  misc_feature 1..415: note = Description of Artificial Sequence: Synthetic polynucleotide
  source 1..415: mol_type = other DNA
cgtacgggttgggtttgggaatggggatcgcgaggttttagtatttcgatgttttgaaagttttttcgtttcggggatttgtttttgtgttgtagttggtaggggtcgtttgaagtgggagtagcgtttggagaaggcgggaggagttcggttcgggggacgggcggcgggatagcgggatttcggcggcgcggtgcgttttagggcgtagcggcggtcgtagatcgagtttcgggcgcggtaagaggcggcgggagtcggtggcggttcggtattatgcgtcgagggcgtttgttggagatcgttttgggatttatcgtgtttttagcgttttatacgagttatggggcggacgttaatttggaggttgggaacgtgaaggaaattagagttagtcgggttaagagaagaggcg

SEQ ID NO: 2453-2457 - skipped (5 entries)

SEQ ID NO: 2458 - DNA, 62 bp, synthetic construct
  misc_feature 1..62: note = Description of Artificial Sequence: Synthetic oligonucleotide
  source 1..62: mol_type = other DNA
cgtgcgtattttaagcgcgtgcgggagtgtgcgaggcgttgtgcgagttagcggcgggcgcg

SEQ ID NO: 2459-2462 - skipped (4 entries)

SEQ ID NO: 2463 - DNA, 20 bp, synthetic construct
  misc_feature 1..20: note = Description of Artificial Sequence: Synthetic oligonucleotide
  source 1..20: mol_type = other DNA
cggaggtttttgcgtttgcg

SEQ ID NO: 2464 - DNA, 69 bp, synthetic construct
  misc_feature 1..69: note = Description of Artificial Sequence: Synthetic oligonucleotide
  source 1..69: mol_type = other DNA
cgttgcgttttttcgtttgttggcgtttttgttttagcgggattcggtagttaggggttttagggggcg

SEQ ID NO: 2465 - skipped

SEQ ID NO: 2466 - DNA, 318 bp, synthetic construct
  misc_feature 1..318: note = Description of Artificial Sequence: Synthetic polynucleotide
  source 1..318: mol_type = other DNA
cgagacgcggtagatttttagagcggtttatttatttatcgaagcggattttgggcggtttcgggttgattcgcgttgttagggcgcggattttatttcgggcgtattgttaggagaaggggtttttcggggcggcgcgtttcgattttgggttttcggtgttcgtagagggcggagattcgcggcgttttaggttatttattcgtattttttcgagttaaatttttagcgtttattcggattcgacggtttaagtattgatttttaggtaagagtcgttttttttggtttttagggaattgatattatcgcgggacg

SEQ ID NO: 2467 - DNA, 27 bp, synthetic construct
  misc_feature 1..27: note = Description of Artificial Sequence: Synthetic oligonucleotide
  source 1..27: mol_type = other DNA
cgcgttttcgttcggggagttattacg

SEQ ID NO: 2468 - skipped

SEQ ID NO: 2469 - DNA, 13 bp, synthetic construct
  misc_feature 1..13: note = Description of Artificial Sequence: Synthetic oligonucleotide
  source 1..13: mol_type = other DNA
cgcggggagttcg

SEQ ID NO: 2470 - DNA, 189 bp, synthetic construct
  misc_feature 1..189: note = Description of Artificial Sequence: Synthetic polynucleotide
  source 1..189: mol_type = other DNA
cgtaatttttagttaaagttatcgcgggcggattatggtttagggcgttagaggggttagaggtacgggaagaggaaaagacggttaattgggaaaaaaagagaaaacgaaagaaaagttaaacgatgagtttttataaggaggacggagtgaatagtttgtgttagaaggttttgtatatcgttatcg

SEQ ID NO: 2471-2472 - skipped (2 entries)

SEQ ID NO: 2473 - DNA, 13 bp, synthetic construct
  misc_feature 1..13: note = Description of Artificial Sequence: Synthetic oligonucleotide
  source 1..13: mol_type = other DNA
cgtttagttttcg

SEQ ID NO: 2474 - DNA, 51 bp, synthetic construct
  misc_feature 1..51: note = Description of Artificial Sequence: Synthetic oligonucleotide
  source 1..51: mol_type = other DNA
cgaaggcgaggtcgtttagttcgtattttattttacgtacggtatacgtcg

SEQ ID NO: 2475 - DNA, 289 bp, synthetic construct
  misc_feature 1..289: note = Description of Artificial Sequence: Synthetic polynucleotide
  source 1..289: mol_type = other DNA
cggtagtgtttttttaagaaggggtaaaaaaatttgtttatggttatttttttttcgttttattttttttttttttgatagtttcggttttggttgttcgagtcgggggtgtgttttcggttttttttagatttgggcggggggcgggaggagtgagcgatttgggaagtttcgggggtggagagggggcgtttcggggtttgggggcgacgtggatattttttttggagtacggcggtgcgtttgggatttgaaggaagggtcgaaggaagcggggtgcgggcgggcg

SEQ ID NO: 2476 - skipped

SEQ ID NO: 2477 - DNA, 165 bp, synthetic construct
  misc_feature 1..165: note = Description of Artificial Sequence: Synthetic polynucleotide
  source 1..165: mol_type = other DNA
cgttttgggaagcgtagaggcgggggtgttgttcgcgttggggagtacgtgaggggatatttagggattgttcgcgcgaatggtttttaacgtatgcgttttattttatattttatagtcgttatgacgatcgggaggttcgtaacggttgcggggataagttcg

SEQ ID NO: 2478 - DNA, 21 bp, synthetic construct
  misc_feature 1..21: note = Description of Artificial Sequence: Synthetic oligonucleotide
  source 1..21: mol_type = other DNA
cgaagtggtgtaggggcggcg

SEQ ID NO: 2479-2481 - skipped (3 entries)

SEQ ID NO: 2482 - DNA, 159 bp, synthetic construct
  misc_feature 1..159: note = Description of Artificial Sequence: Synthetic polynucleotide
  source 1..159: mol_type = other DNA
cgtgttcgtggatgcgtagcgttacgcggttgtttattatttagcgatatacgcggtttacggagaaggtgaggtcgtagcgggtcgatttgtcgcggtttaggcggtcgtcgtcggcgttgtttatgttgtagagggatagtgcggttagcgtagtcg

SEQ ID NO: 2483 - skipped

SEQ ID NO: 2484 - DNA, 129 bp, synthetic construct
  misc_feature 1..129: note = Description of Artificial Sequence: Synthetic polynucleotide
  source 1..129: mol_type = other DNA
cgtgcgttcgagtggggtatttgttcgaggtcggggattgtgaatcgaaagattttatttagttttgttgtttttttggtattgcgatttgggggcgggttattttatttttttgaatttcgtttttcg

SEQ ID NO: 2485 - skipped

SEQ ID NO: 2486 - DNA, 120 bp, synthetic construct
  misc_feature 1..120: note = Description of Artificial Sequence: Synthetic polynucleotide
  source 1..120: mol_type = other DNA
cgttttttttttttttttttttttttttttttttttttttttttttttttttttttggtattatagagttgttttgaaaatagaagatagagggagtttcggagttcgttatttttagcg

SEQ ID NO: 2487 - skipped

SEQ ID NO: 2488 - DNA, 171 bp, synthetic construct
  misc_feature 1..171: note = Description of Artificial Sequence: Synthetic polynucleotide
  source 1..171: mol_type = other DNA
cgttcggttgttgtatttgttagtgttgggtttaggttgagaggcgatttttagtttttataataatgtttcgggttttttggtttgggttttcgtagcgttcgattgatcgttagcgatacgacgagaacgaggatttgtcggacgtggaggagatcgttagcgttcgcg

SEQ ID NO: 2489-2491 - skipped (3 entries)

SEQ ID NO: 2492 - DNA, 64 bp, synthetic construct
  misc_feature 1..64: note = Description of Artificial Sequence: Synthetic oligonucleotide
  source 1..64: mol_type = other DNA
cggggaaagttgggcgcgcgagtcgaggttgttgtttatttgtagtcgcgtcgtttatttgtcg

SEQ ID NO: 2493-2496 - skipped (4 entries)

SEQ ID NO: 2497 - DNA, 16 bp, synthetic construct
  misc_feature 1..16: note = Description of Artificial Sequence: Synthetic oligonucleotide
  source 1..16: mol_type = other DNA
cgagttttgcggagcg

SEQ ID NO: 2498-2500 - skipped (3 entries)

SEQ ID NO: 2501 - DNA, 18 bp, synthetic construct
  misc_feature 1..18: note = Description of Artificial Sequence: Synthetic oligonucleotide
  source 1..18: mol_type = other DNA
cgcggtcgagggaatgcg

SEQ ID NO: 2502 - DNA, 118 bp, synthetic construct
  misc_feature 1..118: note = Description of Artificial Sequence: Synthetic polynucleotide
  source 1..118: mol_type = other DNA
cgcgtttttgtttttgggtagatttttttatttgtgtattttggtttttttatttagtaaagagatgtgcgaagtgtgcgtttggagacgagtcgtttcggtgatttttattcgttcg

SEQ ID NO: 2503-2507 - skipped (5 entries)

SEQ ID NO: 2508 - DNA, 22 bp, synthetic construct
  misc_feature 1..22: note = Description of Artificial Sequence: Synthetic oligonucleotide
  source 1..22: mol_type = other DNA
cggatttttttggggcggcgcg

SEQ ID NO: 2509 - DNA, 112 bp, synthetic construct
  misc_feature 1..112: note = Description of Artificial Sequence: Synthetic polynucleotide
  source 1..112: mol_type = other DNA
cgaggtagggaggcgttttcgtagtttttgattttataattcgcgcgcgtgtgtatcgagtcgcgggtatatcgcgaatatatatatatatatatatattcgtgcgttttcg

SEQ ID NO: 2510 - DNA, 109 bp, synthetic construct
  misc_feature 1..109: note = Description of Artificial Sequence: Synthetic polynucleotide
  source 1..109: mol_type = other DNA
cgtggaggagtggggttaggtggttattattagtatgtttattcgttacgttcgtacgtagtttttgagttttatttagaacgtaagtgggtttagtttaggtagagcg

SEQ ID NO: 2511-2513 - skipped (3 entries)

SEQ ID NO: 2514 - DNA, 431 bp, synthetic construct
  misc_feature 1..431: note = Description of Artificial Sequence: Synthetic polynucleotide
  source 1..431: mol_type = other DNA
cgtgtttttttataggttttatttgtaattgagacgaatgattatagtggggcgggaaggagtagttgtttattaattaatttttaattaaaagtgtttttcgttttcgggtgattaaagagaaatatcgttcgttgggcgatattgattcggatggaatttatttgttaacgttcggaggaatggttttttcgtttatcgcgcggtcgggattgttttggtttttttcggtttgagtcgtcggcgagtgatcggcgagtttgcggttaggtcgggttgcgcgaggtggggttgacgttagagtttttttcgttttaagtcgcgtatatttgatttgacgggttcgcgcgattcgtttttttttttttttttttcgtaaaatatgtatttttgtcgtcgttgcgaggtcgttcggttttagagttttttcg

SEQ ID NO: 2515 - skipped

SEQ ID NO: 2516 - DNA, 40 bp, synthetic construct
  misc_feature 1..40: note = Description of Artificial Sequence: Synthetic oligonucleotide
  source 1..40: mol_type = other DNA
cgtttttatttttttagcggagttatagcggggcgcggcg

SEQ ID NO: 2517 - skipped

SEQ ID NO: 2518 - DNA, 22 bp, synthetic construct
  misc_feature 1..22: note = Description of Artificial Sequence: Synthetic oligonucleotide
  source 1..22: mol_type = other DNA
cgtggttttgaatttgttggcg

SEQ ID NO: 2519 - skipped

SEQ ID NO: 2520 - DNA, 47 bp, synthetic construct
  misc_feature 1..47: note = Description of Artificial Sequence: Synthetic oligonucleotide
  source 1..47: mol_type = other DNA
cgagttggagaattatagtatgtattgcgtgtaatgtaagatgttcg

SEQ ID NO: 2521 - DNA, 24 bp, synthetic construct
  misc_feature 1..24: note = Description of Artificial Sequence: Synthetic oligonucleotide
  source 1..24: mol_type = other DNA
cgtgttagaagttttttaacggcg

SEQ ID NO: 2522 - skipped

SEQ ID NO: 2523 - DNA, 45 bp, synthetic construct
  misc_feature 1..45: note = Description of Artificial Sequence: Synthetic oligonucleotide
  source 1..45: mol_type = other DNA
cgagggttttagttaattagtttgttgggtgggtttggagtttcg

SEQ ID NO: 2524 - skipped

SEQ ID NO: 2525 - DNA, 258 bp, synthetic construct
  misc_feature 1..258: note = Description of Artificial Sequence: Synthetic polynucleotide
  source 1..258: mol_type = other DNA
cgcgtatttgtttaggcgttgcggtttagcgcgttttaatttttagttcgggcggagagcgggggcgggattgaagtatcgtgttttttaaagtattttttcgtcgtcggtagttttggtttcgtaaatgttttagcgcgtttaggcgtacgtagagattggcgcggtagttttcgggttaacggtacgcgagtaaagttggttggcgatttgggatacgtagtagaagttgaggttgtatcgattttcgtcgtttcg

SEQ ID NO: 2526 - DNA, 45 bp, synthetic construct
  misc_feature 1..45: note = Description of Artificial Sequence: Synthetic oligonucleotide
  source 1..45: mol_type = other DNA
cgcgatcgtaagttcgagtttaggtttttcggagtcgttagggcg

SEQ ID NO: 2527-2528 - skipped (2 entries)

SEQ ID NO: 2529 - DNA, 67 bp, synthetic construct
  misc_feature 1..67: note = Description of Artificial Sequence: Synthetic oligonucleotide
  source 1..67: mol_type = other DNA
cgaggtcgtttcgttggttggtgtaagaattagtttgtaatttaagttttgagttgttggcgtttcg

SEQ ID NO: 2530 - DNA, 43 bp, synthetic construct
  misc_feature 1..43: note = Description of Artificial Sequence: Synthetic oligonucleotide
  source 1..43: mol_type = other DNA
cgttcgagttttcgttgttgtcgttgtcgttgcgggttagtcg

SEQ ID NO: 2531-2532 - skipped (2 entries)

SEQ ID NO: 2533 - DNA, 113 bp, synthetic construct
  misc_feature 1..113: note = Description of Artificial Sequence: Synthetic polynucleotide
  source 1..113: mol_type = other DNA
cgttcgagattcgggagagattaggggttcgtaaagtagaagagtagatttagaaagaaaaaaaaaaaagcgagaagtgcgagaaaaatatattgaatttagttaaatatacg

SEQ ID NO: 2534-2535 - skipped (2 entries)

SEQ ID NO: 2536 - DNA, 84 bp, synthetic construct
  misc_feature 1..84: note = Description of Artificial Sequence: Synthetic oligonucleotide
  source 1..84: mol_type = other DNA
cgggttttggggcgttggtgttcgcgtagttttagtcgttttcgtagttatcgtcgttcggtttcgcggaggcggcgcgtagcg

SEQ ID NO: 2537 - skipped

SEQ ID NO: 2538 - DNA, 48 bp, synthetic construct
  misc_feature 1..48: note = Description of Artificial Sequence: Synthetic oligonucleotide
  source 1..48: mol_type = other DNA
cgtaggttaagatttggttttagaattatcgttataagatgaagcgcg

SEQ ID NO: 2539 - DNA, 228 bp, synthetic construct
  misc_feature 1..228: note = Description of Artificial Sequence: Synthetic polynucleotide
  source 1..228: mol_type = other DNA
cgtcgttattacgtcgcgcgtcgtatttcgcgttaagaatggggcggttaagttgtttaagtcgttcgtcgtcgtcgtcgtcgtcgcggtcgaggcgttcggcgtcggcgcgggtatggagcgttcgtagagtcgttttagtttgttcgtttttttcgaggcgttcgttatttatttttcgtgtatgaattttttcgacgacgaggacgtaggtaagcgcgcggttcg

SEQ ID NO: 2540 - DNA, 47 bp, synthetic construct
  misc_feature 1..47: note = Description of Artificial Sequence: Synthetic oligonucleotide
  source 1..47: mol_type = other DNA
cgttggtgcgtggcggcgtggagcgcgtttgttacggttaaggtgcg

SEQ ID NO: 2541 - DNA, 185 bp, synthetic construct
  misc_feature 1..185: note = Description of Artificial Sequence: Synthetic polynucleotide
  source 1..185: mol_type = other DNA
cgtcgtttttcggtttagagtttttattttcggtttgtgagtttgcggcgttggtggagttcggttttaggaagaggagtttattcggttttttttgattggatagtagcgaggttttatcgggcgttttcgcggtttaaaatcgaagcgggggcgagggggaggtagagttcgttttttgcgcg

SEQ ID NO: 2542 - DNA, 216 bp, synthetic construct
  misc_feature 1..216: note = Description of Artificial Sequence: Synthetic polynucleotide
  source 1..216: mol_type = other DNA
cggcgttttatttattggcgtttacggttcgtaggtaaagcgtggaaggagttgaacgcggcggagaagcggtttttcgtggaggaagtcgaacggttgcgcgtgtagtatttgcgcgattattttaattataagtatcggtcgcgtcgtaagaagtaggcgcgtaaggttcggcggttggagttcggttttttgttttcgggattagcgttttcg

SEQ ID NO: 2543 - DNA, 344 bp, synthetic construct
  misc_feature 1..344: note = Description of Artificial Sequence: Synthetic polynucleotide
  source 1..344: mol_type = other DNA
cgaataatagaaattgttaattttaataatttagagtaggttaacgaggttttgttttttcgattcgaattaaaggtttttcgtttcgtgcgttgttacgagcggtgttttttggggttttaatgtagcgagttgtgttcgaggggttcggaaggcgtaagttgggtagcgatatggggaacgcggagcgggtttcggggtttcggagttttgggttagtatttacgttgttgttgttcgtcgcggcgttattggtcgtgtcggacgtattcgggcgttttttcgaggaggacgaggagttagtggtgtcggagttggagcgcgtttcgggatacgggattacg

SEQ ID NO: 2544 - DNA, 28 bp, synthetic construct
  misc_feature 1..28: note = Description of Artificial Sequence: Synthetic oligonucleotide
  source 1..28: mol_type = other DNA
cgtttcggtttggttgttaaatagaacg

SEQ ID NO: 2545 - DNA, 124 bp, synthetic construct
  misc_feature 1..124: note = Description of Artificial Sequence: Synthetic polynucleotide
  source 1..124: mol_type = other DNA
cggcgcgtacggttaaggtacgcgcgttggtatacgcgggcgcggatacgcgcggatatatacgtgcgggatacgttttttttcgacggcggcgttaatttttcggtaagtttagcgttttacg

SEQ ID NO: 2546 - DNA, 80 bp, synthetic construct
  misc_feature 1..80: note = Description of Artificial Sequence: Synthetic oligonucleotide
  source 1..80: mol_type = other DNA
cgaggtgtaggcggcgcgggcgtttatcgtgagcgtcgtgttgttggcgttcgttgcgtttttcgtgattttggcgggcg

SEQ ID NO: 2547 - DNA, 62 bp, synthetic construct
  misc_feature 1..62: note = Description of Artificial Sequence: Synthetic oligonucleotide
  source 1..62: mol_type = other DNA
cgaggcgtggaggggtagtcgcggcggggcgatttttatttgtttattgcggggtttgttcg

SEQ ID NO: 2548 - DNA, 165 bp, synthetic construct
  misc_feature 1..165: note = Description of Artificial Sequence: Synthetic polynucleotide
  source 1..165: mol_type = other DNA
cgttatttgatttcgttattaagtttaaggtgttttggatttacggtaagtatagcgtcgttgtagttggtcgtgcgtttttattatcgtcgttaggtttcgaggtcgcgtttagttttagtaagaggaaacggacgtttagcgataaatcggcgtatacggtcg

SEQ ID NO: 2549 - DNA, 43 bp, synthetic construct
  misc_feature 1..43: note = Description of Artificial Sequence: Synthetic oligonucleotide
  source 1..43: mol_type = other DNA
cgcgtttcgaggaagcgtcggaattattagaagtatagggacg

SEQ ID NO: 2550 - DNA, 86 bp, synthetic construct
  misc_feature 1..86: note = Description of Artificial Sequence: Synthetic oligonucleotide
  source 1..86: mol_type = other DNA
cgttatttttaattagttgtaagtcgagttgtttatttgggatcgggtcggttcggcgggtttggttttcggcgaaggcggcggcg

SEQ ID NO: 2551 - DNA, 23 bp, synthetic construct
  misc_feature 1..23: note = Description of Artificial Sequence: Synthetic oligonucleotide
  source 1..23: mol_type = other DNA
cgtttttttattttacgggttcg

SEQ ID NO: 2552 - skipped

SEQ ID NO: 2553 - DNA, 99 bp, synthetic construct
  misc_feature 1..99: note = Description of Artificial Sequence: Synthetic oligonucleotide
  source 1..99: mol_type = other DNA
cggtaggagtagtttatagttaggagcgttttttcgtttttaacgtcgcgtttttttttttaaaacggtttaaaaaaatttattaattgtatggtcgcg

SEQ ID NO: 2554 - DNA, 73 bp, synthetic construct
  misc_feature 1..73: note = Description of Artificial Sequence: Synthetic oligonucleotide
  source 1..73: mol_type = other DNA
cgattatttttgtgtttttaggagtttattttgggcggtagggaggcgttgcgtggggtttacgagttttacg

SEQ ID NO: 2555 - skipped

SEQ ID NO: 2556 - DNA, 52 bp, synthetic construct
  misc_feature 1..52: note = Description of Artificial Sequence: Synthetic oligonucleotide
  source 1..52: mol_type = other DNA
cgtttttaggattttcgttcgtttttttttgattcggtttttgttcgtttcg

SEQ ID NO: 2557 - DNA, 50 bp, synthetic construct
  misc_feature 1..50: note = Description of Artificial Sequence: Synthetic oligonucleotide
  source 1..50: mol_type = other DNA
cgtagtcgtcgcgttcgtatttgattatggagtgcgtttttttgttcgcg

SEQ ID NO: 2558 - DNA, 50 bp, synthetic construct
  misc_feature 1..50: note = Description of Artificial Sequence: Synthetic oligonucleotide
  source 1..50: mol_type = other DNA
cgaacgtagagtttatacgtggattttcgcgtttgtgatgtttcgattcg

SEQ ID NO: 2559-2560 - skipped (2 entries)

SEQ ID NO: 2561 - DNA, 52 bp, synthetic construct
  misc_feature 1..52: note = Description of Artificial Sequence: Synthetic oligonucleotide
  source 1..52: mol_type = other DNA
cgtttggggtttacgcgagtcgcgagtttttgtttgtttttgcgttatttcg

SEQ ID NO: 2562-2564 - skipped (3 entries)

SEQ ID NO: 2565 - DNA, 138 bp, synthetic construct
  misc_feature 1..138: note = Description of Artificial Sequence: Synthetic polynucleotide
  source 1..138: mol_type = other DNA
cgcggcgtttttagttgttttttattcgtttcgttcgttagtttttttttcgcgcgatggtttcggcgttgagttatgtttttaagtttaagtttttcgtgattttgttcgttatttcgtttttgttgttgttattcg

SEQ ID NO: 2566-2568 - skipped (3 entries)

SEQ ID NO: 2569 - DNA, 1216 bp, Homo sapiens
  source 1..1216: mol_type = unassigned DNA
caaggtggggaccgggacgcgaccggggatggggaagggggctgcaggaggccccgcctgcgctgtcgcccctgctgggcacagcgccccccaccacccgcggcgaccccggcccccgcaaggtggggcggcgagcaggagccggggccaggccaggggctcgagctcccgttcgaggggcggggaaggcgggtgacgtgagccgggccgggcgggcggagttgggaccggctccgggaggcgggggcgagcgcgcggagaggcagacgcgaggagggaggcggctgagcagcgcgggcggctctgcggcgggcgcggtgggcgcgggcggcggggccccgggatccccgcgcgcctcctccgcgcggcgccgccgccgcgcgtccccacgccccgcgctccacggcgccctcgccccgcgcgcctctcgtgcccgcctcctgccagtctccgggccgcggccgtctgcagagcgagcgctcagacggagcccccgggcaacttgagtggcgccgatcggcggcggagcctctggcagagccccccgacccggcagcgcggaggggactcgcgtccgtccgcgtcgcgtcaccccaaaccctaagcagcgccgccccatcggcgcggagctccggctggaggcaagagccgcgcgccgggagacacgcaccgtgagcggcagcgccgccggcctccctcctcgccgccccggagggcgaagccgcggctccccagccctttgctgcgccgcgacagcgccggaacacgccccgcctcgctgccgccttcgctgtgccgccggcggagggggccgcgagccccgcgccccggccggaggatgtgcgcccccgcgggccgcccagcctgagccatgcgccccaacggcggcggcgcgccggccggcatggagccccgcgcggccgcgctctgactcgctgtgcgccccgcggccggcgggcggcgggaggcggcggaccgagagccggagaccggcgccgcgggacggaagcgagcgggcgcgggcgccgcgcagatggcctgggcgagccaggtctgaggccccgctccccgaaacgtgaccatgtggattcaacagcttttaggactcaggtgagcgacccggccggcgccgggtgcgtgtgggcgcgtgggtgccaggctgggcggaagcggcgctttcctctatgttgcaaatcaagggacccctcttcgcttc

SEQ ID NO: 2570 - DNA, 365 bp, Homo sapiens
  source 1..365: mol_type = unassigned DNA
ggcgtccgacgcccaccccgggcttggcgtccccttccggccaccacgcggcgccgccccccgggatcctccagtccccggagccccgcgcgcccagagccgctcggagcgcgggcggggtcagcttgggcagccgcgggtcgctgctgcgtcggaagtctccgtcgccagggagccccttgggcgccaggtcctgggcccctgggcgaagtcgacgccagaacatgcttggccccgcactcagctcaccgcaccctcagcgcgcgtgggtggggggcgccggctgaggtggggagggcatagtccagccccaggccatagtgccccgggcggggcagcgcggtgcggggtgaacgccaccggcc

SEQ ID NO: 2571 - DNA, 201 bp, Homo sapiens
  source 1..201: mol_type = unassigned DNA
tggcgtgacggcttgtggggcctgcggggtgcgctgcccccggacctgcggggggaggcggctgagctggcggcgctcgcgggcccagtggtgagtgcggcgtcctcacgcccagcccgacgcctccggagcggccgccgcgcaggggtgggcgcgggcttccaggagggagggcggctgtgaacgcgccttgctttccgc

SEQ ID NO: 2572 - DNA, 201 bp, Homo sapiens
  source 1..201: mol_type = unassigned DNA
atcacgtcgcccgtgctcatcatccacggcacggaggacgaggtgatcgacttctcgcacgggctggcgctctacgagcgctgccccaaggcggtggagccgctgtgggtggagggcgccgggcacaacgacatcgagctctacagccagtacctggagcgcctgcgtcgcttcatctcccaggagctgcccagccagcgc

SEQ ID NO: 2573 - DNA, 201 bp, Homo sapiens
  source 1..201: mol_type = unassigned DNA
gggcgcggcgggcgaggggtccgggctgagctgcgggccggcccggatggcgggcggcgcgggctggtcgggcgcccccgcggctctgctgcgctccgtgcgccgcctgcgcgaggtgttcgaggtgtgcggccgcgaccccgacggcttcctgcgcgtggagcgcgtcgcggcgctcggactgcgcttcggccagggcga

SEQ ID NO: 2574 - DNA, 201 bp, Homo sapiens
  source 1..201: mol_type = unassigned DNA
ggcgctctcccctcgcccctggcccaggcccggctcgcgggtgtagctcttcctagggccccctcccctttccgggccgcgcgtccgccccgcatcgcggcggctcctcggcagtgtttgtttttattggacgcacagtgaccgtgacgggcacggggcgcgagctctcatcaccacaatgggtgtgcatggcgcggggcg

SEQ ID NO: 2575 - DNA, 201 bp, Homo sapiens
  source 1..201: mol_type = unassigned DNA
cccccccttaattgacctaactttctaaccctagctcttcgcttctggcaccggtcccctcccaagtctccagaccctaaccctggctcccgacccgccccgctacagcttgggaagcgggagaagcagcgcgcgcccttctgcggaccccctcccagggaagattgtggtgttagctgcctagggggaccagggggccac

SEQ ID NO: 2576 - DNA, 201 bp, Homo sapiens
  source 1..201: mol_type = unassigned DNA
agcccaggggtagggggctcagggcagccagacctccctaggctcaggaagagtagtcttcagcgctcggctgtcaggcaatccggtccccggttccccacggcggtctcctcggtgtgccccaccaagagcgacagggctggtgacccgaggggcgcgtgcgcggtcgtcagcctgggatttgcacggacccccttctcc

SEQ ID NO: 2577 - DNA, 213 bp, Homo sapiens
  source 1..213: mol_type = unassigned DNA
gcctcttgcctgaaccaaagtggccaggcactcagtttgtaagatgaacaaatgaaggaaagaaggaacgaatgaataagggctcatcttgcagagcgttcgcgtctcagcgcgcaccaggcacatcagtgccaaaggtgctgggggtcgggcccagcgcccggcgcggctggaatgggggcggcgaggagctcctcctagccagccgcaggg

SEQ ID NO: 2578 - DNA, 201 bp, Homo sapiens
  source 1..201: mol_type = unassigned DNA
gggaggcggcaggcagggggcgctgcggggcgaggcaagtgcagtccgccgctgcctgcctgcgagtctggggctgcgcgccgctccccacctagctgcgcgacccgagcgccgcgcccaccgcgctccgtgggctcccgcgcctcgaagggtcgggatccggtctgagcctctcctggctctcggtgcaagccgctgggc

SEQ ID NO: 2579 - DNA, 201 bp, Homo sapiens
  source 1..201: mol_type = unassigned DNA
cggggcactcggccgtgccgccgccgccgccccagctgccgcctttgcccccgctcccgcgaccgctgtcagagcgcatcacccgcgaggaggtggagggcgaaagcctggacctgtgcctgcagcagctctacaaatagttaagtagctgggcttggctggtggtgggcccgcggtccccaccgcgccggcctcggacgc

SEQ ID NO: 2580 - DNA, 201 bp, Homo sapiens
  source 1..201: mol_type = unassigned DNA
aaggggggcctggctcgttagcgcaggggatccgagctgggcaggacatgtgagatagtcacagttttccagagatcacgacaagatctaaccagtcgcgcgtggtccccggcgccggagcgggccagctcagcccggcccagcccggccccgcgcagagcccccgccgcccccgcgcacagagccgggtgccccttgcgg

SEQ ID NO: 2581 - DNA, 324 bp, Homo sapiens
  source 1..324: mol_type = unassigned DNA
ggtgggggcctgggagacggtcgaagggggcccgggcagaagctccgcggccgggccggcggagggaagggggcggccgcgcccgggacccggctcccctcggctccacttacctgctccgaagagtggccccagctctgcgcctcttcctgcgaccccacacacagggacagccccaggcacagccccagcagcaggagcatggcggggcgagggcgcgggacgctcggggacccggcgggacacgctttgcagcgcccagggctccagccactgcgggacgctctcggggccgcccaccccgcggtcccagcccggaccccg

SEQ ID NO: 2582 - DNA, 201 bp, Homo sapiens
  source 1..201: mol_type = unassigned DNA
ccgcggtgctgccgcgccaagcgaaggaggaggagggctcggcgaccctggggacgaacgtcttggacgcttcgcccgcgtccttctctcgcgtccgccgcgcgcctgtctgctcggcctcttcttcgccttctctccggccgcccgggtcaaaacccaaggccaggttcttgagggtccgggtcctccagccgccccctc

SEQ ID NO: 2583 - DNA, 330 bp, Homo sapiens
  source 1..330: mol_type = unassigned DNA
ggactctggcgcccctccaggctgctgcgcgcgggctggggaccgtgcaccgctttgcgcgccagacgatgcatcttctggaacggcagctgaggcaatgcggggtgtgaagtggcggcgggcagaggggctcgcaggggctgggatccgcgtgcccctctctgcctcggtgcggagcacgatgtgcccgggcgggggcgaggacgtccgggaggggctgggctgcgcacgctcgcggggccgtcgcagatgggcggtttggaggcgctgcagtccctgggaaatgggagcctccgtcctgttctctctgctgcttggctgggctgggct

SEQ ID NO: 2584 - DNA, 293 bp, Homo sapiens
  source 1..293: mol_type = unassigned DNA
ttcagcatctcagcttttaagcctccctgagccggggctgcgttctcgttgtctccttcggccgccgcttcctggcgccagagggaccccgcggcccgcacgggcctgtcctcggctccgctcggagggtgtgcgggttcccgctccgctggccccgcttgcccaccacggcgcgcccaaacccacgcggcccgcggccccttgcgtgctctgccgaccccgggccgcaggaggggttagcctcgccggtccccacgcggggtctgcgccggcagcgccacgggctggaacgc

SEQ ID NO: 2585 - DNA, 201 bp, Homo sapiens
  source 1..201: mol_type = unassigned DNA
cgtccccgccccggtcctccgtcggcctggcgggcggcgacgtggggaggggccgctcagaagccggggtcgcccgggccggggaacttcctcgcgccgacgcccactccccacgggccgcactcgccgaggggccgaaaggggctccagtggaggacgcggtgggagctgggtcccgctctagctgccgacgccggcggt

SEQ ID NO: 2586 - DNA, 201 bp, Homo sapiens
  source 1..201: mol_type = unassigned DNA
tatcccgctaaagccggacaaagcgtggccagagtgcggcccagcctctcagcctgcggcccggggaggagggcagcgcgggcgcgggctgggggtggcgcggggcggcgctcaggatttcggtgcaggcgagagtgcggcggatttgctccaagaggagagcgaggcggatttgctccaagaggagagcgtggggcgccg

SEQ ID NO: 2587 - DNA, 226 bp, Homo sapiens
  source 1..226: mol_type = unassigned DNA
atggcgatgcctccactctcctcggcaggttttttcaattaaaaagttggaaacgggaatccgtaaacaacgacttagggcttcaaactacttgcaaagacgcgatggggaggggaatacttgcgcgcttcaaaaccccaacctcgaggtctccagccgcgcctgacccgggagccgggtgcgcccccagtgtccgcgcacgaacccggcgccctggcagccccga

SEQ ID NO: 2588 - DNA, 363 bp, Homo sapiens
  source 1..363: mol_type = unassigned DNA
ttgcaagggaccacagttacaatttactaggtaaccacacccaccgcattgcagaagccatgaacttggcgggcgtgggggggaaggggaagaagtccggcgagattagaggggaaatccgaaaaagcaagcccctgcggcagcagccaggaaacactcgccaggaactggctgcgaccccaactccagcggtccgaagccctagcctccccacccccaccgcggcagagccgccttcgcagacacctcccgaggagaatcgcggccccgagggcgccaggtgagtcgcgccgccccgagcccccgggccacggcaggccgacccaggcgcccccggcccgcccgtgctcccgcgcccgggtg

SEQ ID NO: 2589 - DNA, 201 bp, Homo sapiens
  source 1..201: mol_type = unassigned DNA
cggcccggtgggggtcccggcgagcgggagggcggttggggaccccggccgcgccgggcgcggggctcgggattcgggagaccgcgcggcgccgaagccacgcgtcagccccactgtcccgcgcgcctcgccccaggcctcgggctcttcctccgcacctcgtaaagccgagaccccctcgcagtcccccactccgagagg

SEQ ID NO: 2590 - DNA, 201 bp, Homo sapiens
  source 1..201: mol_type = unassigned DNA
ccgcgcttccccgccagccgccggccaggagctccccggcttctgagcaggacgcgccaaagggagttgggaggctcagcagcccccagcgtcgccttctcgggtgacgtgacgctctctctggagcgcgggcccgcctccgccaagcctccaccgcaggtccttacagccgagccacgggaagatgcaacgccgggcgag

SEQ ID NO: 2591 - DNA, 267 bp, Homo sapiens
  source 1..267: mol_type = unassigned DNA
cgcggggtgggggcgcgggagccgccccctgcccgccccgcgcgcatgctcccgccgcacctgcctcgctcagtgttccacaccccggggagccgggtggcgctgggcccgccgaggtcggggctttcccatgggagggaggtggctgcggcggaattttcagatgcgtccttctctgtattcgttccctgggaaggattcccccaaatcttggctacttcctgcctgccagcttgctccctggcagcgaagtcccagtagctcacc

SEQ ID NO: 2592 - DNA, 707 bp, Homo sapiens
  source 1..707: mol_type = unassigned DNA
gcggtggcgtcggcggctgcagggggacgagctagcgccgcggcgctgggagccagttgagcccggccggcgagcggaggcggcagcgcaggcagagcggcggcggcagcgggagcccgagcgctgcgcgcccaccatggccgcccagggagagcccggctacctggcggcgcagtcggaccccggctccaacagcgagcgcagcaccgactccccagtgcccggctccgaggacgacttggtcgccggggcgaccctgcacagcccggagtggagcgaggagcgcttccgcgtggacaggaagaaacttgaggccatgttacaaggtaggcatccctcgtgttctcggactctccgactgagcctctaactccttttcggacatccccaccgcgcgctccggcgcccgctactccagcctacggccggccggtttagctccaggcccgctcccccgcggagccggaggacacccagggactggagacttcgcgggactccccacccttccacgcctctcagatttccaggcgctgggggccctgtgcgaacttgactggcttcagaaaagccgaaggccgagtttgtactggcgcgcccaagttgcgttctggactttggagatgccaactttagcccggacacctgggctgtgccatccggaccactcgggccgcacagagtatgcgtgaccctccccattccct

SEQ ID NO: 2593 - DNA, 201 bp, Homo sapiens
  source 1..201: mol_type = unassigned DNA
ggacccaggaccctgtgcccgcgcccctggagccgctggagttcggacttctgcaactgttggcactttgggggcttggcttagcgctctgctgtttacccgtctctcctcgctgcctcggaaccaaagctcccggccccctccgccctcgcgcgcccacccaccgccgccggggagcggcccggcccgcactcagcacca

SEQ ID NO: 2594 - DNA, 201 bp, Homo sapiens
  source 1..201: mol_type = unassigned DNA
caggctccgcgcctgaccctccagcctgcgcagcgggcactcggccgggaagaacctctccagcaggcggctcagcactacgttcacgcgcccgcgcccgcgcccgcgcccgtggccgcgcgggccccagctccacgcagcgctcacagaccgtgagcccgcagggcagtgtcaccggcttgtgcagcagccccgggcagc

SEQ ID NO: 2595 - DNA, 201 bp, Homo sapiens
  source 1..201: mol_type = unassigned DNA
cactgggacccccacatacgagctggcacacactagtcacacacggctaattccagagggctggccctttgtcctgggacgctcccaggttttcgggccgcggtgcggagaactcaggtgggtgcccggcaagttacctaccaggggctgttcccccgcgaccctcgccataagcgcagggacccgggggccgcgctggct

SEQ ID NO: 2596 - DNA, 201 bp, Homo sapiens
  source 1..201: mol_type = unassigned DNA
gaaaactgcaaaacctgggagttatcctgcctcaccctcctgctgcctggggacaccccccgcgagcttgctcggccccgaagaaggagcagaggggacccgcaatccagcccctagagccccgccaggaaaggcgcgagagacctactggccccggcaaccctgccccggcgcccggacggagcccgatgcctgcgcagc

SEQ ID NO: 2597 - DNA, 203 bp, Homo sapiens
  source 1..203: mol_type = unassigned DNA
agcctagagtgcgccgagcaccgccccggcaggtggaggggctgcgggaaataaaataacttgggcaggaacttgattggtagcaggttcatctttggtccgcggtagggaatctaatggagatgaagaatggtggggaagggggggcggtgtctccttgggagcctaacgtacgcttctttattttgtcattctttggagat

SEQ ID NO: 2598 - DNA, 201 bp, Homo sapiens
  source 1..201: mol_type = unassigned DNA
cgcgcgtttccccgcgcgtctcccggacccgcgcctgcccacccctccggctctgctgcggtcgaggccccaagtcggttatcccgtgtccaggcaaccgcgggggcggcggcggcggcgtgaggagcgggcggctgctgctccggggcctcctggctcgagcccttagcccccgactcccggcgtttcggcgcccgatca

SEQ ID NO: 2599 - DNA, 201 bp, Homo sapiens
  source 1..201: mol_type = unassigned DNA
gggcttccagcctggcctttaggcgcggtggcggcggtgggacacgcgccaggcgcccagagaaggacatgggacaatggcccagcccgaggacgccagacgccgccgcccgacccggggaaggaagctcctgcagccggtccgggaacccgaggcggggagggaggccagctctggaggtgcgctgccgctttaaaataa

SEQ ID NO: 2600 - DNA, 208 bp, Homo sapiens
  source 1..208: mol_type = unassigned DNA
gcgccgcgccgccgcccggcctcccgaagtcgccccctgtcggcgcgtcggccgcttgcgccacggcgggcgccacttaccccgggcagagtcttctgctcgtgcagcgcgctctgggccttcagcgctgactcacgctcgcagtaggtgaggaaggcgcagcctggggaggaaagcaagcgccaagaagggtcagtggggcgccccc

SEQ ID NO: 2601 - DNA, 201 bp, Homo sapiens
  source 1..201: mol_type = unassigned DNA
gtaggggggctttatccaccaagctatgctctattagggcgccaggcgggcgaagcaaaggcagggatggcgggcggggcggcggcggaggtggaatgggcgcttttttcttccatctggctttatttatttatttagactagaaaagcgagccggcttggagggagtccgcccggggatccgagcgcgcattcatcagtg

SEQ ID NO: 2602 - DNA, 201 bp, Homo sapiens
  source 1..201: mol_type = unassigned DNA
gcgctccgcctcccgccccggcggctcccgcagccccgccgccgcccgcgcccgcgccccggagccgcgccacaaagggcccgcgcgcagccgccgccgccgccgccgcgcgaggagccaggatggtcctggtccacgtcggctatctcgtgcttccagtgtttggctctgtgcgaaacagaggtatcgctttttcctttc

SEQ ID NO: 2603 - DNA, 595 bp, Homo sapiens
  source 1..595: mol_type = unassigned DNA
aggaggccaggaaagcccaccacatgcgttggccccggctgtcgcacggcacctccatggtcaccgggatgatgagcgcatccatcttgggctcgtggaccgaggacgaggaggaagaggaggaggaagaagaagaagaggaagaggaggaggaggaggaggaggacgcgtctaggctgagatggttcgcgtggatattgctactcattctaagactgctgcctccgccgccgccgccgccgccgctgctgccgccgccgccgccgccaccatttgccatagctagcaacgggcagccggcgcaggggctcgggggagctcctcccgccgccagcgccaccccaaacacccatcaacagccatattgctgctactgctgccgccgccgccgccgccgcggagcgcgggaggggggcggggaggcgcctgggctcggggcgctgtgcgcgacctggcggggtgcgccgagatatatacagcgagccgccgccgcccgcccgggggggagggggatggagtgcgcgggcagctccccctccccggcccgcgccccgctcgccccgggctgcgctggccccgagcgccgagagccagg

SEQ ID NO: 2604 - DNA, 201 bp, Homo sapiens
  source 1..201: mol_type = unassigned DNA
caccgccggcgccgaggcggcgttcatgtctaaccgccgccgccaccgccgccgcctgctcctgcgcccgctcccgcgcctgctgcctccccgccgccgccgccgccgccgccactacagatccgcagacacacagccaagatccctgactcttaacaccaactctcttctccggggaggggaggggacggagggaagggg

SEQ ID NO: 2605 - DNA, 269 bp, Homo sapiens
  source 1..269: mol_type = unassigned DNA
ggtgtgatgtttccggtggataatgtctcccgttccctgccccggggcccagacagttggtgcttaagcgtctacaatgtagagtttcctgcattttcctcgggccgccatttgtctacttgtcccatccaggacatctccctaaataatctctaagtggaaaaatcacggtcctctaggagatttatccgggaacgaacgtgcgtggggcagttcaaattcctgagctcagatttcgtttcccgcggtcagatggtgcggtcggtggg

SEQ ID NO: 2606 - DNA, 201 bp, Homo sapiens
  source 1..201: mol_type = unassigned DNA
tcagcttgtcaccgcacggcggccgggaccgcagcccctgggtgcgcagtgcgcctctcgctgcgccctcctagagcgcgggtcccgtgcctgtgcccggcgcgacgcgatctccctgctagtcgggctccgcgtgctccccgcgcttcccgcagcctccgcgcagcccgcagcgccctccagccccgcctcgcggccgcg

SEQ ID NO: 2607 - DNA, 267 bp, Homo sapiens
  source 1..267: mol_type = unassigned DNA
gcaggagccccggcggcctgcaggggcggtggcgcggcgctgggcgcgcggccgctagatggcagcgcagccccggcccggcccgcgggaggcggccacgcgcgggggacgcggggcgcggcgcgctgagcgcgggtgccgaggctggagggcgcggccgggctcccgagtcctccctccgcggcatccttgtctccaccctcaaatgtcctgcaagccaggagcctccgtaggaaccgctgcatttttattttcctctaaatttca

SEQ ID NO: 2608 - DNA, 287 bp, Homo sapiens
  source 1..287: mol_type = unassigned DNA
ggcggtgtgcagagtggggcctgggcctcctgcccccaagggcagctgggtgggctccgtgctccctccgagtggacttggccccggctccaaacccagccgagggtcggctcgctcctggggacccgcggatgtcgcgagggggcgccgcgccactgaaggctgggacgggggcggtgcgcggggcggcgccggagtccgggatgccggctccagagacgccgcgctccgccccgaggaggccgccggccgggtaagcggagcccggagctcgcggagtctggacc

SEQ ID NO: 2609 - DNA, 201 bp, Homo sapiens
  source 1..201: mol_type = unassigned DNA
ggcctgccccgagcgcggcgggggcgccgggggcgccggcctccactttgcagggcaccggcggcgggaggaggggccggcgcccacgggttctcgccctcgcggcgccgcggaccaggagctggaactgctgcgggagtgcctgggagccgccgtgcctgcccggctgcgcaaggtggcctccgcgctggtgccaggtcg

SEQ ID NO: 2610 - DNA, 201 bp, Homo sapiens
  source 1..201: mol_type = unassigned DNA
gcgcctgctcgcgctctgcccaggtggccccggcggcctcggcgatcccctgcgagcgctgctgctcctgaaggcgctgcagggcctgcgcgtggagtggcgcgggcgggatccgcgcgggccgggtcgggcacagcgcagcgcgggggccaccgccgccgacgggccgtgcgcgctgcgcgagctcagcgtagacctccg

SEQ ID NO: 2611 - DNA, 286 bp, Homo sapiens
  source 1..286: mol_type = unassigned DNA
ctcagggggcgcccccgagccgcgccccgcgcccgcccccaggagggcctccgcgagccggctgcacaccccgaggcggtcccggctgcacaacttggagcgagttgctccgtttcctcattttgggggcgaagaagggtcggggagtgggggaaagcgggaggcgccgcggcctgggaggcccccgcgggtcctagcgccggccgcactgcggtctcctccgcgcgccgccgccgccgccggcccctccccgccccgcctccgcggcccccggcgcctcccgcgc

SEQ ID NO: 2612 - DNA, 244 bp, Homo sapiens
  source 1..244: mol_type = unassigned DNA
tagtagaccctggcgtggggcacctgagatctccgccactgaaaaggcgctatagaaatgcaaggaattatgattttaataaaattgtctcatttaggagcgagcttctgcgctgcctctgtcgtcggagcccgggtttgccacggcaaagtctgtaatcagagaaaaataccagctttgttgagggttagaatatatcattggctaatgtgtgtggttttctttttaaataatgctaagcatt

SEQ ID NO: 2613 - DNA, 201 bp, Homo sapiens
  source 1..201: mol_type = unassigned DNA
gtgggccggggatctcgctgctctgccttcctagcgggaaactgactgcctgagctctggaggacaaacagagacactggggggtcaacgggggcggccgcgggcggggctccaggcctccacccaccgggttgctgagcgcgcacgcagccacccgagggaagatccccgccgcccggggtctcggagaggggttagaac

SEQ ID NO: 2614 - DNA, 372 bp, Homo sapiens
  source 1..372: mol_type = unassigned DNA
gtggcattagcgaatgtggtggactccggcaggcctggggcaggggaatctccggtaacatccctcagtaccgaaggcaggatttcccggccacttccgtcggttggaattctcttaagcattgccctgagtctattttcaaatgaaagggggaaaaacccaaaccagattagaatctgaaacagctgaaacagctatcgatttccagcttgctttcaagtctggcagagactgtgaaagtcctaacttctccgcgatgtcagccacggcccgcggcggtcacggagccacttcagcacctcgcgatggacagtgacccccggcgtggcgcgagttccctgcggtccccacgcgggcctgggcggcgggtcc

SEQ ID NO: 2615 - DNA, 201 bp, Homo sapiens
  source 1..201: mol_type = unassigned DNA
agtcagctccacaatctgcgaccgacttctccttgcccagttcggcctcagtccccttcagccataagatggcaacagcgccgacagccgggccccgcggcgtcctgtctcttccctgccctggcctggagccctctctgggcagctctgcacccacagcgctgcgtctctcccagattgtgcagggagcacgggagggtt

SEQ ID NO: 2616 - DNA, 247 bp, Homo sapiens
  source 1..247: mol_type = unassigned DNA
gcttccggggggtcctggcgtcttagctgtggatcccccaatacccgcaggtcacagagccacagaggctggacctctagcagcagaggacacagaagaacgaagacgagacgcagagctccaactgcagccagagacaaaggccccgccacatcccggaagccgccctgtcctctcctgccccgtgcctgattggacggtttccagcccagcgtccctgattggataacttctaaggtcctgcccc

SEQ ID NO: 2617 - DNA, 201 bp, Homo sapiens
  source 1..201: mol_type = unassigned DNA
gatttggcgcggcctttgtttctcgctgccgccgaagctccaattttcgtctgtctgctttgtgtcctctgcacgtagaagcccagcctgtgtggccctgcgacctgcgggtattgggagatccacagctaagacgccagggccccctggaagcctagaaatggtgagagtgccggtccgacatcccgagagagggaacgg

SEQ ID NO: 2618 - DNA, 201 bp, Homo sapiens
  source 1..201: mol_type = unassigned DNA
ggcgtcttagctgtggatctcccaatgcttgcaggtcagagggccacagaggctgggcctctaagagcaggggacacaaagcagggaagacgagaccaagcgctccagctgcagcgagagacaaaggccccgccaaatcccggaagccgccctgtccgctccagttgcgtgcctgattggacggtccccagctcagggtcc

SEQ ID NO: 2619 - DNA, 235 bp, Homo sapiens
  source 1..235: mol_type = unassigned DNA
cttggtcggactgcgcgcttagggcctctcgcgcctgccagcctccgctctgcgggcattcctcctagcaccgggagcgcgcggctgctcgccctcgccgcgaccgtggcgccagcttcccgccccctctgccccgccctgagcatctgctctgcgccctccgctgcaaccctttatcctccgcctggattgcgggtctgggtgcggggtgttgcaggcttgcaggggacggggt

SEQ ID NO: 2620 - DNA, 201 bp, Homo sapiens
  source 1..201: mol_type = unassigned DNA
atcccgcgcctcccagtccggagtccatttgcataattggattttttttttttgcctccttctttctccctgaaacttgtttgaaaacccaagtgaaaaccgcgacgatctgcacactcaaaagcaagtgccaagtaagtgccctgcggtggcctcggcgcgccccggggtgagcgcgcaaagccgggagcgaggtgccgc

SEQ ID NO: 2621 - DNA, 201 bp, Homo sapiens
  source 1..201: mol_type = unassigned DNA
gggcgcggctctgggagcgggggaaggtgaggggaaatgggacatgatggcattaataatcgttaccaaagacggtgggagtaacaaaggaatgcgtctccgagacgccgcccagccccggggtgttttctggcgcggtcgcggtgcaggaacgcgagccccgccgccgagcctcccgccgcctgcgttcgttggcgcggc

SEQ ID NO: 2622 - DNA, 201 bp, Homo sapiens
  source 1..201: mol_type = unassigned DNA
gcccgggcgcgccggctggggctctggcgctctcgcaggccccgaggccgacagtcccggcgagggcgggcgccccgcgctccagcaccggctgcctgagcgctcctggagcagcaaaccccagacttcttcctccttctctccttccttccttccccctccccttatctttttctttttttagtctctttctccctcttt

SEQ ID NO: 2623 - DNA, 201 bp, Homo sapiens
  source 1..201: mol_type = unassigned DNA
tttgtttcaaaagttcacagcatgctttcttttcttttagaccgggagacagtgatctcacccacacggtaagatcaaaagtctccgctcgcccagcctgcgggcttgggctgggtccagacgtctcccaggatgcagatgcgccgccgctggcctccccggctataaagccgcctccagcgcctttccgcgcgcaggagc

SEQ ID NO: 2624 - DNA, 201 bp, Homo sapiens
  source 1..201: mol_type = unassigned DNA
gggcgaagcgacccagcgcgaggaccagtccccaaccaacccgctcctagttctgggcgccttccccagcagtcagatgggggcttcagaggccggtgcgcggccacatggccccgggccaggcagggggtcgtggggacgcatctgcgctaggcgcacagtattcctgggcgcgggacgggcgaagcgccgtgggttcca

SEQ ID NO: 2625 - DNA, 296 bp, Homo sapiens
  source 1..296: mol_type = unassigned DNA
tgcctccatctcccaccggggtccggctggccagaggcaagcttcgagaccccccaccaaccaccaccaccgttgcgagggccggtgaggctgcagataacgcttgcaaggacgggagtcggggagggtgtagggcgagtttaaaggacgggcagagcaagccccgggaagaggcaggggttttccctcccgggtcgccgccccccgcaccctcggagccagccgcagccacgcagcgccgcctgccgggcacaccaaggacctggcgcgcacgtggcgcttacccccacccccgg

SEQ ID NO: 2626 - DNA, 201 bp, Homo sapiens
  source 1..201: mol_type = unassigned DNA
agcccacgggccagcctggcggggtccgacggcggcggcggtggcggcagcgcccgatccagcggcatcagcctgggctacgaccagcgccacggcagcccgcgctccggtcgctcggacccgcgtcccggtcccgggccgccttcggtgggcagcgcccgctccagcgtttccagcctcggctcccggggctcggccggc

SEQ ID NO: 2627 - DNA, 201 bp, Homo sapiens
  source 1..201: mol_type = unassigned DNA
atccattggctgaaagctccgtctattttagggtgactgagagcgtctcttccttctgtgttgcctggaaacggactgttcgcctagtaacatctgatcacgtttcccattggtcaccgtttccggaagcccgctctcccgtttccggaatccccgcaggcgctgggtctgcagatggcgtccaggtacacagtggcgagt

SEQ ID NO: 2628 - DNA, 266 bp, Homo sapiens
  source 1..266: mol_type = unassigned DNA
gaaagataaaagggaaagcgcctccacgaaatccgcttacggacacgatcccggggccacactcagccagacgaatgtctggcaaatgacagtcacttcacgccagactctcacagtccttcacacgccactcccactgcctcagggaaccacaagcacaggcatcgccccgcccggcgtcctcctccaaagattggggcaccaggaccgcgggcccccactcccacccagcacaaagagtccggcgctcagagctagcggtttcc

SEQ ID NO: 2629 - DNA, 201 bp, Homo sapiens
  source 1..201: mol_type = unassigned DNA
tcgcaggccatctgtgtgactccggtgcgagtggaggttggtaccgttcagtgcgaggctgtcaccccgtgtgcctgtccacgtcctgtgtgactgggtgcgaggaagtcaatggcaccgtggaatgtgaggctgtgagttgaggcgggagcgggcgactgttcgctgcaccttgttgggccgatacccgcggcttctttg

SEQ ID NO: 2630 - DNA, 228 bp, Homo sapiens
  source 1..228: mol_type = unassigned DNA
cagagttcaggacaccccaggcttttcttgactcgattggaacccaccctccacgcttccctggccccaactaaccgccacctgcatgcacaaatggaaacgacagggcagagggtcagcagtcacccgcgtctgggttcgcagctccgggtacgctgtagttccgcacccggttgcccacgcccgggaccacccactgtgtcttttcggaactgtccagcgtgtcct

SEQ ID NO: 2631 - DNA, 248 bp, Homo sapiens
  source 1..248: mol_type = unassigned DNA
agaccccagacacccaccccaaatctaggtcccagcgttttgcaggggaccttcatcctggggcgttcacctctgacttccctcttgggccttttcgctacggccgagcctaagtggctgaagcgcggacgaggatgcgcggggcctcggtctccaactgcaccacaggccgcacccacgaacctggtccggcacagttactaccgcccgggcctccaggcctcagggctgcagaagctcagtcccgg

SEQ ID NO: 2632 - DNA, 387 bp, Homo sapiens
  source 1..387: mol_type = unassigned DNA
gaggcggccaccgcagcggccgccaacgagcagctgcacggaggtgcagaagaaggaggccactgccattctcctgacaagctgggggcgtgggaggcctcgggagctcgaagtcgcctcgagcgggggtgggcggtgagcggacccccgggtgttgaccaggtgtttggtggtagagcagggaaggggggaacggacgtcgaccctagggatccctcacccgctcacgctccttggcgttggccacacgccgccgctccagcaccaactggaggttttcagtggacgagtagccgcccgagggcagccgcttgagccggcagacagcggccagctggggcagcggcccgaactgctcccgcaacacgtcctccagcacctcggctt

SEQ ID NO: 2633 - DNA, 203 bp, Homo sapiens
  source 1..203: mol_type = unassigned DNA
cgctgcttccctgtgcgccaccgggggtctgccctgggcttgcccgacatcgtggctgcccgcctacctgagcgtaggtttttaccctgtgccagggccgcgcgtggctcccgtctgcggcctgctgggcttcggcgtcacaggtactgcggtcccggcgcccgcacgcgggggactgggcgggggctggagagcctaggtcg

SEQ ID NO: 2634 - DNA, 203 bp, Homo sapiens
  source 1..203: mol_type = unassigned DNA
gctgcgctccgctgctcagcccgggcggcccaccgtcccccttgcttgggtggacgcacccttgccctccgcctttattggcggcagcccccgtggggcgcgcgtggggggcgctggggtccccagctcccgcctcgagccccctgccgcggcgctgtcagtcccgggggcctgggcctcacctcgccttggtcttgttcgca

SEQ ID NO: 2635 - DNA, 312 bp, Homo sapiens
  source 1..312: mol_type = unassigned DNA
gccgggggggcgcccggggcggcggcggtggcggcgggcgggggcaggccgggctgcgaatacactccgaagttgtcgccgcagtagagggccatgtcggcggccgtgggcggctgcggcgcggccgcggcgaggggcgagcggggctggtctcgccgctcgggcgagagcatccctttgggggccaaccctgcggctccgccttcacccgcgctgggcgcccggtgctccgggccggggtcgggcgggtgctagcggagcgcctgctagccggcctcttataaccgagcccggcgcggctcctcctgggcc

SEQ ID NO: 2636 - DNA, 407 bp, Homo sapiens
  source 1..407: mol_type = unassigned DNA
cttcgggaggcccaggggcacggcgaggggtcggggaaaggcgatcgcccactacagcccgcgcgcctagactgagggaggagccgggctgcagaaccggcggcggatggagacgggagggaggctgcgaggtcgctcgaggagagactaaggctctagaaacggagaagcgggcgctctgcgggaggcggcggcgctgccgctggccgtcaagggcgggaagtgttctgggactctcattaggggccgcgagcctcgagcgtcaaattcccgcggcgtccgcctagcgcgctgctgtggcgggcgcggagggcgcgcgccggcagtgggggctgcggcggcggagggcacgggcccccgctcagcgtcctcaccttcttggtgcagctgcctcccgcgagccgaga

SEQ ID NO: 2637 - DNA, 295 bp, Homo sapiens
  source 1..295: mol_type = unassigned DNA
gcgcccgccccgcgcgcccctgtactccccgcgccgctcctcggggtcccgcggcgctcgcaggccgcgccgccctgccgcccctctctcgtggcttttacggcccgcccgcccctcagcagccctggggtgcccggggcggccctgcaagcgggagagagcggcgaggcggcggcgccgagtgcggggggatgcggagccgtgcccggccctgtcgcatccctcggccgcccgcccgcgcccggccccgcccggccttgcccgggctgcacgcacttctcccgcggcccagaat

SEQ ID NO: 2638 - DNA, 435 bp, Homo sapiens
  source 1..435: mol_type = unassigned DNA
cctggcccggcctggccagtccccgcggtctctgcccgggctgacgcccaggaatgtggtcgacgagaagccccaacagcacggcgtggcctctcagcctcggtgagtacccgccgtggggaagggtcctggggacccactggaggccgcggcccgcagcagccaggggccgagccacggccacggacgccctggtgtcccggtccgtgccgggcctccaggcggaggaggcgtccgctgggctcagatccccgactccagccccggttccccggcgcctgggctgcgcggagtccctgtcccgcgtcccggacccctacgcgcagcctccacgcgctccgagctggagaagccgccagcccgccctcccagggcgtgtcgcccgctttctgtttctttgtgcggggcatgtgaaatgtgtggggccagaattgt

SEQ ID NO: 2639 - DNA, 410 bp, Homo sapiens
  source 1..410: mol_type = unassigned DNA
cccttggagggaagcccgccgggaagctgaagacagtggtcaccgccctcggtcattacttcccgggacccggaccctaaccctgcgccacatctccacccgcccccagccgtgtcctggctgcgcagctggaaaggttgagcagctcactgctgtccctctgttcggccttggacacatcgcctgaactcctgggcgcctctgctgttaagtgggggacagcactatttactggggaggaaaactccaggaatgtggaccctggggccacgcaggggttgggaagtgaagggcagggaacgcgggcggcgcccggggtctgcgggtaggcaggcggcctggccgcggaggcttccccgagtcctgcgccttcctagagagggaggggctcatatcggctggcacagcca

SEQ ID NO: 2640 - DNA, 392 bp, Homo sapiens
  source 1..392: mol_type = unassigned DNA
ggagcccgctgggcgcgcccggcccggcccggccccgccgcacgcccgcccccctggcctggccgaggaccccggggtttggacgtgccaacgccactctcgcgcgccgaagctgtgacggtttactaagcagagacttgcgaggcacacagagagggaatgaggcggaaccgttcgggggctcgttgacactgcagagcctcccgcagcatcgctgccttaaatcccgcctttccaggcgtgcgcgcacagcgagccagaggaggctccgtcccgacctggggtcccccgcggtcctcagcccgggggctcgggtccccgaagagatccttggcaatggcagaggtcccaaagcctagatgccaagccccgcgatggggcggatgcttcca

SEQ ID NO: 2641 - DNA, 203 bp, Homo sapiens
  source 1..203: mol_type = unassigned DNA
agagaagacgccaggctgaggtcccagcgacctcaggcaccagctccgaaggagggcggggagaccgcaaaggggaagtgcccggagggccaacggcccccgcgcaccctgcgcccctctgaagcgcgccgcctccccgcgccggggactgggacctgcctctggggaatccgcctagaagacggcggcggactggggtcggg

SEQ ID NO: 2642 - DNA, 398 bp, Homo sapiens
  source 1..398: mol_type = unassigned DNA
aaaactgcgggagcccatctactgcgctcaggtggccagctcttgagccttccctatccgtggctccttgccggcatgcaggcatgcacaagcataccgccgagcaggaggatctaacgaatccagcttgtggacatgccctaatttccatttccgcctcctccaggtctgttcaggtgaggatgatgggagggaaaagcggtgtacagccgtaacattggcaccctgcaagagccgccggggcactgacacagagggacaccgcattggagatgcggtgtctacggagatttattgcgcgcggtgaaacactctaagcaccgcgcggaacaactgggttcagctccctcatcccggaccttccccaggaccacacgtcaccctttatccccgaaccc

SEQ ID NO: 2643 - DNA, 286 bp, Homo sapiens
  source 1..286: mol_type = unassigned DNA
tgcagagcttgaaccccaccgtccagaaggaaaggtgagtgggggacccgggcgggaggtgaggcctgccggcagcggccctcaggcgtgctgggcagcacggctagcagaggcggcgcctggtcttggatgctgcagcggagacgccaaggagactgaatgcagggagcgaggcgtagcggccgcggagggtggggccgcccggaaatccaggcggcgccagccttgtagcatctgcaggccgggggcgcgcacacgaggggcacgtgggtgtggaggaaccggc

SEQ ID NO: 2644 - DNA, 267 bp, Homo sapiens
  source 1..267: mol_type = unassigned DNA
ggctgccaaggaggcggggtggccagcgcggggggtggaggatgggggcaggacgcgggagggaagggcagggggtggggggcgaggccccggggaccagcgcgcgagagtgcccagctgggaaatgcagctccgaattaacatcgtatgtttcataatcagtttacgagccgatgtggggaaagccacttccagatggggaagagcagcccggatttccttaaggacgttcttcagccagactagggaggggagaaggagatgggg

SEQ ID NO: 2645 - DNA, 260 bp, Homo sapiens
  source 1..260: mol_type = unassigned DNA
cagagccgtctgcatctgcccgcatcctttgggaggctgcgatgatcgcagccagggtggccgagcgcccggcccactgcacccggcggctgttttgcagcgcccctggcattcagggaatggtttgcaaatctcaatgcaccacagactagttttcaccgtggagcaggaaaggcgcctattagccaggggcaaccggctttgcagacctgggcgggggcgtagggggaggggcggtggtgcaaacctatcgtgatttc

SEQ ID NO: 2646 - DNA, 239 bp, Homo sapiens
  source 1..239: mol_type = unassigned DNA
gaaggcaagctccaaacccctgcctggaagacgggctgtcgcggctgcaccaccagcaggaggaggaggagaagaaactatttcgcgataccccattctgcgggtgctttgccgctgccgcttctgctgccgccgatccgagtccgcgggttcgaacaccgcagcggtggggacggtgggtccggcgggcgccgggaggaggacaccagcggagccctgcactctcgtgccccgctcac

SEQ ID NO: 2647 - DNA, 846 bp, Homo sapiens
  source 1..846: mol_type = unassigned DNA
gctggcgggctctggcccccgaggacgcagacatgtggcttgaacctccgctcccctagccgttgcctctgtgcatctttctgggcgcccccagcgaatgcgagcggcgaggcgagggcgagcgcgccgaggaagggcgggagaggcgcggagcttggccgcgccgcgctgcgccgagcgccgggctctccccgcgagctccccgggcccgcgcgcgcgccccccactgcccccgccccccgcgcggcgcgtgccccccaccccccgccgcgcgccctcgcacccgcccggctccacgcggcgcgcgcctgccctggcggcagcggcggcggcggcggcgcgtcctcccccgaacgccgtctccagggctgctggctgcgctctccattgttccgcggctgctgcccggggtgggcggcgaggcgggggggaggtgtcggcttggccgccggggagggcttaccgctcgggcggaccctcactgcgagagcgatgcgggcccaggcgcggcgcgcgggggctgcagggcgcctagcactgggggttgccggcgcgcgggggcctcctcctggctcccaggcactcgctgctgctgggcgcccctcgcatcctcggttactatggatatctcgctcctccgccgccccctccgcgcactccgggaggccgccggggcggtagcagcggcgcggctccgcgggtgcccaggtgaccggctcggcagcggcagagcagtggcagcagccgccactgccgctgttactgcggtcgccgccgctggagagaggaggacgaggagggcaaggggcagaagcaggtcctgctctgtctgccccagaggccacc

SEQ ID NO: 2648 - DNA, 526 bp, Homo sapiens
  source 1..526: mol_type = unassigned DNA
tgctgcttcctcccggcgctttgcttttctacaactggaagccgcgaaggcggctactgcgctgagccgctcgctctgctggtcaagtttgggcgacccgcgcggaggagggtcgggctgactgccgccgctgagctgtccccggacgggagcgcctgtccacggcactcaccccctccagcggtggaaatgtggagaagtaagtgggaggcggtgtcgggaactgactcctcttaaaacggtcggcgccgctgctctgaaatgggcggctaagtgcttgtgggactaagggcggcctcagagatgcccggaaaatcgctgccacggccagagtgcggcgcagacgcggcagagttggaggtgtccgcggtgcaggctgctgcccacgccgctcaggccaggtgctgagggctcagcccgcgcctcggccgaaccactctcagccccgttgagccacctcgtccgcccggctttcatcgcaccggccagaggaaagttcccgcggcccccacgcctcttcacagct

SEQ ID NO: 2649 - DNA, 201 bp, Homo sapiens
  source 1..201: mol_type = unassigned DNA
gccccgcccggggacctagggaggagggagagaggagggagggagtgggcagcctgggcgcacgccaccggtccccgtacgcccggcaccccccgtggcgcggcgagtcaatgggatttgcacactcgaggtgtaacagcattactgcattaattaccatttccatttcacgtccagattgtttacttatctgcgggaaac

SEQ ID NO: 2650 - DNA, 523 bp, Homo sapiens
  source 1..523: mol_type = unassigned DNA
tgctctgcacgcgtgtgtacggcccgtacgaggcggccgggcccgccagccccttgaccacagcggccgcgccagggctaccggggcccgcggctgcagccgcagctgctgcagccgctgcggctgccgccatctggcaggaggcatagggcatgggtgagggaggctgcggtagcggccacgagttgttgaggaagccagactgcaggtacttggggggcgccaggtagccgtagccgtcggccccggcgcccgccacgccgcacccgcctgcggcgcctccggccccgaagagccccttgccgggctggaagtgcgcgggcggcggccggaagggcctcttcatgcggcggcggcgccggtagttgcccttctcgaacatgtcttcgcaggccgggtccagcgtccagtagttgcccttgcgctcgccgccgccctcgcgcggcaccttgatgaagcactcgttgaggctgaggttgtggcggatgctattttgccagcccttcttattcttctcgtagaa

SEQ ID NO: 2651 - DNA, 276 bp, Homo sapiens
  source 1..276: mol_type = unassigned DNA
gccacctccctccctccgtgacgtcacgggccgtcccggggtgagcgcctgagccgctccgggtccgcgccagtgagcgcggctgctgccggcgagctagcggcgcagcggcgggaacccgaggccgagcgccgcggcggcagcgctagaagcgcacccatcgggcacggcgaggcggcccacggtgcggcaggcaccgggaggcgagagccggcgcggacagtaggcggcggctgcagctcgttggcggctgctgcgaggatgctgcctgggcgg

SEQ ID NO: 2652 - DNA, 357 bp, Homo sapiens
  source 1..357: mol_type = unassigned DNA
aggagggaggcagggcaggcttgagggtgaaagcggcaaggacctaggctcaagctggatttgcccaccctcccttgccgcagcttctttggcctctgtgcgccctggattcccgaagtcagttccctgcgcagcggaccagagaggtccacccgcggacgtcaactcaacccctgggcggggtccgggggctgagcagaaggcgaggtctggggagtacggacaactttgagggctgtctgtgccggggtgggagcgcagtgggtgagtttcgagctctggcccagggacggctagagcagggcgctggcgcgccgtggggacaagcaggtgtctgctcctgcctgggggaaggat

SEQ ID NO: 2653 - DNA, 278 bp, Homo sapiens
  source 1..278: mol_type = unassigned DNA
ccgggcgctgggcagcccccgccggccgccgtcggagcctttgtgcccacgccgggggcgtcgctgcaggtttaggagaagacccgtgcctccgagcagccgctcctaaaaattaaataaatcaataagagaatcaattaataggcagcgctgcgaccgccaggagcgcggagcgcgcgaggctcagcggcttcctcgccaagcccctgctaccggcgcgcggccgcccgcgctgcggcagcggcggcggcgcggctgactgcggcggcagcgcggca

SEQ ID NO: 2654 - DNA, 336 bp, Homo sapiens
  source 1..336: mol_type = unassigned DNA
gctccgcatgtggggcacaatgaaacaagagcagccccggccagaggtccagtaaagcggaaagacggtcccgcccgcacacccctccggaaaactgaagcgtctcctctgacccccaaggtcagaaagatttattacttccttcgagagggcgcagccacagacccactagagagggcgggcagggtgtcggaagccagagaacggcgctccgcgtcctcccaccgctccagggcgcagaggtgtcctcagtgcccggagaggttggcagtgtcggccccgagggaagcgtggagcggacggccgacaggggatttctgcccaaacttcatcacc

SEQ ID NO: 2655 - DNA, 311 bp, Homo sapiens
  source 1..311: mol_type = unassigned DNA
cgcgtgccctgctcccgcagtggccccggcgcccaggacgccgctggcccgcgtcccctctcggaatgaaggtgttccgtaggaaggcgctggtgttgtgcgcgggctatgcactgctgctggtgctcactatgctcaacctcctggactacaagtggcacaaggagccgctgcagcagtgcaaccccgatgggccgctgggtgccgcagcgggggcagccggaggcagctgggggcgcccagggccgcctccggccgggccgccccgtgctcatgcccgtttggacctccgcactccttaccgccctccc

SEQ ID NO: 2656 - DNA, 201 bp, Homo sapiens
  source 1..201: mol_type = unassigned DNA
cacaggtaacagagacaaggttaggaggcaaagcacatttatgtgcaaatgagacgcgctagggaacttgtaatcctctgcacccccgcccttgatgtctcgatccctacaatcacagaattctaggcagaggccgccgacttctccgccctcgccaagagggacccggagcaccgaagcttcccagccggtgccggcgtt

SEQ ID NO: 2657 - DNA, 201 bp, Homo sapiens
  source 1..201: mol_type = unassigned DNA
aaacgttcctttagaaaacaagccaccaaccgcacgagagaaggagaggaaggcagcaatttaactccctgcggcccgcggttctgaagattaggaggtccgtcccagcagggtgaggtctacagaatgcatcgcgccggctgcggctttccaggggccggccacccgagttctggaattccgagaggcgcgaagtgggag

SEQ ID NO: 2658 - DNA, 481 bp, Homo sapiens
  source 1..481: mol_type = unassigned DNA
cgcgactgcacttggggcagccccgccgcgtcccagccgcctcccggcaggaagcgtaggtgtgtgagccgacccggagcgagccgcgccctcgggccagcgtgggcagggcgccgcagcctgcgcagccccgaggaccccgcgtcgctctcccgagccagggttctcaggagcgggccgcgcaggagacgttagagggggttgttagcggctgttgggagaacgggtcacggaaacagtcccttccaaagccggggccatcgtggggtgggcgagtccgccctcccaggccgggggcgcggaccagaggggacgtgtgcagacggccgcggtcagccccacctcgcccgggcggagacgcacagctggagctggagggccgtcgcccgttgggccctcaggggcctgaacgcccaggggtcgcggcgagtccacccggagcgagtcaggtgagcaggtcgccatggcgatgcggccccgg

SEQ ID NO: 2659 - DNA, 280 bp, Homo sapiens
  source 1..280: mol_type = unassigned DNA
taggcctcctggggctacctcgcgaggcagccgagggcgcaacccgggcgcttggggccggaggcggaatcaggggccggggccaggaggcaggtgcaggcggctgccaactcgcccaacttgctgcgcgggtggccgctcagagccgcgggcttgcggggcgccccccgccgccgcgccgccgcctccccaggcccgggagggggcgctcagggtggagtcccattcatgggctgaggctctgggcgcgcggagccgccgccgcccctccggctggctc

SEQ ID NO: 2660 - DNA, 252 bp, Homo sapiens
  source 1..252: mol_type = unassigned DNA
cggagtctcagctacgaatcatccaatacccgcaggtcacagagcgacggaggctgaggctgtgaccgaatcaccgacgcctccctgaggggtgaaagcacggccgtggagaccctaaccgagctcacgctggcgcaaaaggcaaaagccgcgccagatcccggatgccgccccctcctctccggctgcgcgcctgattgggcagttctcaatccagcgctctgattggataagataccaagctccccacgc

SEQ ID NO: 2661 - DNA, 239 bp, Homo sapiens
  source 1..239: mol_type = unassigned DNA
ttacctgcgtgctgctctcgggccccgccccgctccgccccggagggatcctcaggccgggcccagacctaggagccacctggggatcccggggtggctgcgcgccgagggggcgccagcggggacgtgagctggcgccgagacagcctcggccccccagcgccagggccactgccaggagacccccggccagcacccacgtggggcgcccccgggagcccgaggggtccatcgcctgt

SEQ ID NO: 2662 - DNA, 405 bp, Homo sapiens
  source 1..405: mol_type = unassigned DNA
aagtctgcggagcgggccgcgcccctggcccgcccgggctccaagtcccgcgtcgccgccctggcggggacggtgcagcaggcggcgggatgcggcggggcggcagcctgagcgccccggatggcccgcggcggggcggcctgcaagagcgacgcgcggctgctgctggggcgggacgcgctgcggccggcgcccgccctgctggcccccgccgtgctgctgggcgccgcgctcggcctcggcctcggcctttggcttggctgccgcgcgggccgccagcgcacgcgacaccaggtgggtcggccgagcagacagcggcggggcggggagcgcggggcgcgtggcttctgggtcctgcgggcccggagccccggctctgcgactccttgagcctggttgggaact

SEQ ID NO: 2663 - DNA, 237 bp, Homo sapiens
  source 1..237: mol_type = unassigned DNA
cgcgcacggtggtgtaggagccccggtagcccagcgtgaggaagcccgagcgcttgtcctgcgcgccgccgccgccgccaccaccgtgcgctcccgggcccgagggcacggcggccgccgccccgcgcagcagcagcgcgtcgctgctaccctgcgagacgttgtcctccaggtcgctctggcagccctcgtcgttgagagagttctgcttggtgaccttgggcgacagcagcttga

SEQ ID NO: 2664 - DNA, 204 bp, Homo sapiens
  source 1..204: mol_type = unassigned DNA
cgaccggggcggccccgctcagggttcggggcagcggcggcgtcggcggcgcccgagctccatcggaggagagacgcgcgagagaggagctccgccggtgcggcggcggcaatggagaggcaagaaggagctgctgctcctttggggcgagggcggggaagtgtgagagagacttgcgagaggctctagggctgctgctcggct

SEQ ID NO: 2665 - DNA, 224 bp, Homo sapiens
  source 1..224: mol_type = unassigned DNA
aggactccccactggggctgagcccctcccgccctcaacagaacctctaaacacaagtagcctttccctgcctccaggagctcacgaaacgctgccacaccgagcgaatgcaacgcgtacacacgtccacactcgaacagcacaagcaagagaccggctgggtgtggaatagaggcgcacatcgcgcaacgcattcacagcatgcacacgcgcgcaccccgacc

SEQ ID NO: 2666 - DNA, 278 bp, Homo sapiens
  source 1..278: mol_type = unassigned DNA
gtctcccatccggcgttctccaggatttccaaagacgcccgtttagatccacaggtacttacctgagtccctctgcttctccacaactccgactcctccccgcctctctctttttttaaaaaaaaaatttaaacaattcccaaataatatttaataggaaagaagaaggaaaaggagcgcacaggaagggcggaggcggcacccgggggggactgtccccagaggaggccgctgtgagccggcgacgcgaggctgggggagtgggaggcaaacccgct

SEQ ID NO: 2667 - DNA, 232 bp, Homo sapiens
  source 1..232: mol_type = unassigned DNA
ggtggggtaaaaagcaagacgaaacccacccagacagctcttccgactcccagaggaccgacacctctttcgagggccccaacagtggccgctcagggtccgagggcaacggccgaggcgccacgcggggccgcggctcgccctggccacggaggaccggacctgttgcgcctctgtgagtttgccttatttctacctactcggtgtctttcggcacgccgacctgtttccc

SEQ ID NO: 2668 - DNA, 331 bp, Homo sapiens
  source 1..331: mol_type = unassigned DNA
aacgcgttccggatcttatccctgtacgtgcagttgcccttggggatgagggctatccagttcttgccgcgggtcggggcggcgaacttggtgttggggtcgcaggccaggcggtcgtgggccgagctggccatgaccacctccccgcgggcgtcctgcttgggcgagtgctctccgtagcgcccgcactccgtcttctccgtgtgcagctccgcgccgccgccgcccgccgccccggccccggggtccggcgcgggctcggcgtaggtgatgttcacgaaggcggtgtaccattcctccttctcggccacggtaaagtccaggcagagca

SEQ ID NO: 2669 - DNA, 231 bp, Homo sapiens
  source 1..231: mol_type = unassigned DNA
gcggccatggtggccccgggaacgggtccggggagggagggcgcgggaggacggcgagccgggggcaccggaggggaaggcggcggcgcagaccgtggctcgccctcggggcagaggagggggtgccaggcgggactggggagaggggaaggggggctcagtcctgaccgggacccatcgccctctccgcggggcgcggggccaggcgcgcagatgcgcccagggcgcagc

SEQ ID NO: 2670 - DNA, 201 bp, Homo sapiens
  source 1..201: mol_type = unassigned DNA
ctcgcagtggtttctcctgcagctcccctgggctccgcggccagtagtgcagcccgtggagccgcggctttgcccgtctcctctgggtggccccagtgcgcgggctgacactcattcagccggggaaggtgaggcgagtagaggctggtgcggaacttgccgcccccagcagcgccggcgggctaagcccagggccgggca

SEQ ID NO: 2671 - DNA, 201 bp, Homo sapiens
  source 1..201: mol_type = unassigned DNA
agcccaggagcccggggcgcccgcggcgggcatgaggcggcgccggcggctgcagcaagaggacggcatctccttcgagtaccaccgctaccccgagctgcgcgaggcgctcgtgtccgtgtggctgcagtgcaccgccatcagcaggatttacacggtggggcgcagcttcgagggccgggagctcctggtcatcgagct

SEQ ID NO: 2672 - DNA, 219 bp, Homo sapiens
  source 1..219: mol_type = unassigned DNA
cggttggcggtgcctcggcgcttcaccgggcgcggcccccccaggcccgggggcccggcgcccggcggcacccccccgtaatgggagtggtccaggccggcggcgccgctggcatactcggggctgtaggacagggccatgctgtagtcggggggcgacatctcggggtggccgatgagccagccatggaagtaggggttctcctcatggctgcagcgg

SEQ ID NO: 2673 - DNA, 284 bp, Homo sapiens
  source 1..284: mol_type = unassigned DNA
gcgggaggagggcggcggggcggctggcggcggcggggcccgggagcgccgcggcgcaggatcctccagagcgcgccgggctgagcggcggcggcggcggcggcgggcgcaggggcagggcatgactgacgcgccctctgcctgcgcttatgtgagagaaagcggccgagggagggagcgtgccgagcccgggctgccctcccctctcactctccctcggaagccgtctccctggagctccccgtttccctcgcctcctccccggcggccccacctcccccggc

SEQ ID NO: 2674 - DNA, 429 bp, Homo sapiens
  source 1..429: mol_type = unassigned DNA
tctctccccgggtcgcgacactgactcgtcaacgttaatgggggtccgcgactgctgcggggacgagggcgcagagcagcccccgccacgggccggtccacgcaggggccgagaaagtggcggagaggcggtggccgaggcccaggggcgagcgcgggctgagctggtccctgctgcgttcacgagcgacacccaccccttcgctgcggacgccccgcgggcgccaggctgggggccctgcgaccgacccctcccgcccccgaggtaccgccgggcccgcctggcaggcagcgcgtcccgcgagctggagggccgagtttcgcggggccgtggggcgtgtgggtgaaggcgacacctcggatgcgggacgcatgaatggtggcagagcaggggtcgggatccgttcatgggttgggagagagatgcttt

SEQ ID NO: 2675 - DNA, 283 bp, Homo sapiens
  source 1..283: mol_type = unassigned DNA
ctcgtcactattgtttaatcgagaatcagcaacgcctcccgccggtttccaccctacgccggaatggactttcagaacccactgcggccgcaagacagcccgcaagagctggtcaaaatgccctcaggtgcgtgggggcttcggggccttagttggagcccgacaccctgagactggcggcccgagggctgtagggccgccccgggcgtgcgcccaccggctttgcacctctgggcagccgagtgtcgcggagaacgccccatcttctccaccgcggtctttt

SEQ ID NO: 2676 - DNA, 241 bp, Homo sapiens
  source 1..241: mol_type = unassigned DNA
ccgtccacaccgccttccctctgcaggtgaggaatggggtctgcttcgtttggaatgtgcctttgccgggtcctgcctgacctccaccttccagccgggacgcgcgagcttttccgtttggctgagtcaaaaagggatcgcgcgcatcccgccgcccctcaccacgaagcgcagacacaggaggttgcagggtcagtgctgcggagaatcccagacggccccacagccgccgccacccgcg

SEQ ID NO: 2677 - DNA, 244 bp, Homo sapiens
  source 1..244: mol_type = unassigned DNA
ccgccgtccccaccccggggcgcgcaggtcgaggaggaccccgctgactacgaagagtttgaggacttctcgagtctgccagacacccgcagcatcgcctcggacgactctttctaccctttcgaggacgaggaggagcacggcgtcgagagcgcggagagcgtcccggagggcgtcccggaaagcgtcccggagacggcgaccctcctgcgcgccgcctgcgccaacaacgtggggctgctgc

SEQ ID NO: 2678 - DNA, 225 bp, Homo sapiens
  source 1..225: mol_type = unassigned DNA
tcagtccgggaagaggcgtgcgcggcgccgcccggcttcagggcaaggtcctgaccttgcccaactgcagcatcttccgcttttgttgtctgagcgcggccgcgggacaagggatgctggcgggcggcaggggcgagcgccgcgggcgagaggcggctcccgacgcgagtgcgcagcgcccggcccggcggcccctccgagctcggcgagcgcagcgccccctgc

SEQ ID NO: 2679 - DNA, 249 bp, Homo sapiens
  source 1..249: mol_type = unassigned DNA
gagcctggggccgccgcggcgcccggcgccgagcgctcccgagctgcgccccgcgcgcggcccgcgccacctgtgccgccgccgcctcagccgccgagggcgaggctcctcccgcggcgcgcggcagcctcagcctccacctaaacctcggcggccggcccgggcgcccggctagtgagggagcgtccgccccgccgccgaaaccggccccgggtgcggagcatgcccagtgccgccgcgagagcggcg

SEQ ID NO: 2680 - DNA, 255 bp, Homo sapiens
  source 1..255: mol_type = unassigned DNA
gtacagcagatggcacgagcacgtgcggcgctcagcttaggctctcggaggcagctgagttggaaatcccgacggaaagcacccacaagctcccactctgcgctggcccacccgcgtgcacgcccaccccccacgcgcgtccctggctcagaagcgcacagatgtttactgcttagagccggtaccgctggggagatcgagcgacttgcgcggcgcacagtgcggcgctggcagggctctgggctcccggtcggg

SEQ ID NO: 2681 - DNA, 243 bp, Homo sapiens
  source 1..243: mol_type = unassigned DNA
tcagcagcgccgccgcctcccagcgccgatgcttcagccggcggggcggctgaggggtgagggggaactccgcgggcgggggcgagggagcgtgtgtgcgcgagcgtgtgcgcgcgcgaggggagcgcgtgcgcggtgaggacgcgcgccggcggttggggcgggggcgggggccggggcgctcctgtgggaagggaggggtgaaaggtcgctggtccccggcaacacggctcaggcaaacgt

SEQ ID NO: 2682 - DNA, 201 bp, Homo sapiens
  source 1..201: mol_type = unassigned DNA
tggagagaaatgagctggagagttacaccgagtcaacgcgggacacggctcccggcccgggccgggccaggggtgggaggcggttccctaccgcaggcggcgggactcccatgcgccgagggacccaagtctccactccacccacacgcccacccggcgtcggggcgctgcggcctcgcctcacgagcccagagcaggccg

SEQ ID NO: 2683 - DNA, 208 bp, Homo sapiens
  source 1..208: mol_type = unassigned DNA
gccggacatcctcctccaggactacccgcaccccacagtcgcgtcaaaagcgccccatccccctgtctctcgccgcgcaggtttcccaccgacgcccgctcggaaggcgagagcccccacgtggcccggcgcggcgcggcccccggggaccgcgagcaacaaaagcccggcccgcagcccctgctcctcgccttccttttcaattctc

SEQ ID NO: 2684 - DNA, 257 bp, Homo sapiens
  source 1..257: mol_type = unassigned DNA
ttcagctctccgcaagtaccttcctcgccttcctaccccccccagcccccagccgccgccgctcccgcagccccggtcccgcgcctccccgcagccccggcgcccgcctacccgccaggcaggcggtggtgtcgatccacttgagcagctgccccgcgctcagctcgccgcgcgcagtggcgtgcgccggctggatggcttggctcatgaccacctcgccgggcgccggccgctccatggccagggcgagagcgcta

SEQ ID NO: 2685 - DNA, 350 bp, Homo sapiens
  source 1..350: mol_type = unassigned DNA
gaacggctcagcccaggccctgcgccagagcaccgcacccgggggcggacggccctgcagctccccagcctcttcccgcatcaactagctgacgcccgggcgcactggcttcccccgctcccgcccgcacgaaagccctgcccgacgtctgcagtcagcatcgcccgcactgcctagggagggtttgcgccgagacccagtggccgagtgagccacagagtcgctggtcctggggacgctgtcttctaccgctccccaccgtcctcctctttcctgtatctcaccccggtaccccgcacccttctccccgctcggccccgcgcactctgctcagactttacaagcacttt

SEQ ID NO: 2686 - DNA, 216 bp, Homo sapiens
  source 1..216: mol_type = unassigned DNA
accaaattaggggctgggagtttccagattgaaatgcgccctccaccaccaagagggagctcacgcggccgcggggggccgaggcagccagccggcgccgcggtcctggggagtccgtgcaggggtgtgctctggtgtgaaacctggcaggactctgcctgggcttgcatgcagggaggggttagagactctgaaatgtactagcgggcagggtgg

SEQ ID NO: 2687 - DNA, 269 bp, Homo sapiens
  source 1..269: mol_type = unassigned DNA
ggcattgctgcccgaacgaacgaacgaacgaacgaacgaagcggtttcgtttaggaaaaataccctcttgacgcgaagccacggctgaagtcccgggccacgcagaggggccagcaattccatgggtggtggggccctccatccctggacgcagcggggagcagcgggcggccctctctcctgcccacttctcctgggggtgggggagccctgtgtcacccgacgctgcgaggggctgccacgggcttctcaggttgtgcccttcgcgg

SEQ ID NO: 2688 - DNA, 258 bp, Homo sapiens
  source 1..258: mol_type = unassigned DNA
agatcgggcccctgcccgtcccctttctgcgccccgggatgaggcagagactgaacagccggcgagcaaatcaacggcatccagaaagccatgtcggactcggcgcccagcgcccaagcgctaacccgctgaaagtttctcagcgaaatctcagggacgatctggaccccgctgagaggaactgcttttgagtgagatggtcccagaggcctggaggagcggactggtaagcaccgggagggtagtgggagttttgct

SEQ ID NO: 2689 - DNA, 224 bp, Homo sapiens
  source 1..224: mol_type = unassigned DNA
tgtgctcccctcttcctcctcctcctcttcctccttcgccgcttcccctcctcctcccactcttcctttttgctcgccttttccctcctcctcgcggccgcggctcggatagaggttacccagcgccctcccgtagctctccggagagcatgtgaccaggccgttagcagcgccgcgagtgcccggcaatggcagggatggtgcctcaaatatccctggaagct

SEQ ID NO: 2690 - DNA, 256 bp, Homo sapiens
  source 1..256: mol_type = unassigned DNA
cgccatcccgcgccagtgcctgagctgcaactgcaaactgcgcgtcctggcacgagcagcggtgggggcgggtgggggaaggagcgagtgactctccaggcgtcttccgctacctgacaccagccaggcagcccccagggccagagcgtcagcgccgaagccaggctcatccgggaagccactccggtggccgcggggtgcccatgccagcaccagatctctcttcggaaggaggagcggggcgggctacacggcc

SEQ ID NO: 2691 - DNA, 310 bp, Homo sapiens
  source 1..310: mol_type = unassigned DNA
gggaaggggcgttaacagggccaccactccggggctccgccactccccagccgttccctcctccggagaccttgcctgccaagagctctgccccctgccccgttcagggttggggctcggtgggaacctccccgtgcccgaagggacgaccccgtcagagagtcccccgacccttgcacctaccgtccttggcaggacgtggagctgctcggaagccattccgggttggcccccttacccgtgtgccacgacccctcggcgggcccctgccgcccgagtgccctcaccgccagcctccggagcggcggag

SEQ ID NO: 2692 - DNA, 410 bp, Homo sapiens
  source 1..410: mol_type = unassigned DNA
aggataactgggacgggctggacccatacttgatacccgggaaactcctagagcgtgtggtgctcctgccagcggcagttactggtggagctgaggccaccgctactgtcgtcgttggcgctttgcttctggaacctcccagcaagatggcactcactgtctgttcccttccgattagcacccccagccgcgctccctcctccccgggatacgtattagtcacatactgtggggagaagatgggctatgtaaatgtaagtcaacgcgctttcccagccacctttgcataatgcaacaggaacagcgacccgcgcgcacgaaccgggtagtgtgcgcgtgtgtgtgctcgcgtgtgtgagcgcgtgtgccagcgtgcgtctccgcgcgggcgtgcgtctgggtggatcctt

SEQ ID NO: 2693 - DNA, 274 bp, Homo sapiens
  source 1..274: mol_type = unassigned DNA
ctggggccagtcccccctccccaccgccgccgcctccccacccactccgcgctcaccccacaaccactccgcctggtctttccccggccccacctccatgcgctcctactactctttcaaacactgcagcaagttgcagcaaggcgggcaaataccgacagcgcgcgtgggggcgggcggcgggcgccgcggggcccaccccctccccggtctccccgcgccctcgccgcctcccgcgctggctctcaccgcatgagcagcgttccctcggtct

SEQ ID NO: 2694 - DNA, 201 bp, Homo sapiens
  source 1..201: mol_type = unassigned DNA
tctctggctggcgggcgccccgtcggccgccggcttcctccttgaaacccgccggcgcacatgaggccgctgcccccgccgcaggcgctggcggccccctcgcggtgcccgtggtgatgccatgccccgccaccacgcgggaggagaggagggcggcgccgccgggctctgggtgaagagcggcgcagcggcggcggcggc

SEQ ID NO: 2695 - DNA, 265 bp, Homo sapiens
  source 1..265: mol_type = unassigned DNA
ctcccgtggcaggcggcagcgagctgggcccggggccgggctgagctttgggaccgcgctgcgcagcccccgagccgttcgctacctggctgcggtcgcgcggccacctgtcctccgccctcggggcgccgcccagcttcgcgccaggcgccttctccagcgcccgccgccctttcccggcgagaccactcgggcgcgccccgcccgccggtccccgatgcaaacagttgggctccgtaggcggctggctccgcgcctcccggcc

SEQ ID NO: 2696 - DNA, 201 bp, Homo sapiens
  source 1..201: mol_type = unassigned DNA
accaccaccatcccaagtgcctgctcgctggggacccgccgccgccgccgccgcctggcctgccctgctctggggccctgcgcggcttccctctgctctccgtccccccggaagaggcgtccgccttcaagcacgtggagcgcgccccgcccgcagccgccgcgctgccaggagcgcgttatgcgcagctgccccctgcgc

SEQ ID NO: 2697 - DNA, 362 bp, Homo sapiens
  source 1..362: mol_type = unassigned DNA
cctggcggggagcctgggcagcgccgaccaaagttcggagcggcagcttcggggcgcgggacgcggggcacacgggctcagctgctcgacgggagcccgacgcgcgctcctcggcgggtcggcgggtccggaagctccgctgcccgggccgggtccccaagcccgcagccgctttgactaaaataggcatcgcgacggcggcggcaggcggcggcagccagggctggggccgcaccgcgcacgcgcatgcgcccgccgccccgcgccccccggcgggcggagcccggcgccgcggccaggatttcccacctcgctcccgcgactccgctgcgggtctgcacacccgaggactcggtttgaaa

SEQ ID NO: 2698 - DNA, 298 bp, Homo sapiens
  source 1..298: mol_type = unassigned DNA
gtccccgccccccaccgccccctcccgctccgcagcccccgagtggcgtcagcacgcccgccgggcatgggctttaaatgcccactagcgggagctcaggcgcttctgccctggagcgcggtcgggagtaaaatcgcaggagtgggagggtagcgagccagctggattccgagccgcggagcgcgctggctttgctccgcctgatgactccagagcgcgggtccaagcgccgcccatgcagcacccctgagctccggggaaggagagttaatgaaaaaacacttaaccgtctccgctg

SEQ ID NO: 2699 - DNA, 295 bp, Homo sapiens
  source 1..295: mol_type = unassigned DNA
gagcggcgcggagagcggcaggggcgaaacttcgcgggccagatgcccgagggcgcggcggcgctgccaggctgccgctgctgcccctgcgggccccgagcgcgcctccgcaggcggcactgcccgcggcgcggcgtgtgcaccgagcgagtgaaggtatgtgtggcgggcgcggctggagctgccgccgccgccgccgccgcgccagcaggtcctaatgcctgtcacttcccaggacgctggcagcagcagcagcccggagcccccgagccctcggcaggtttgcgtgtccttc

SEQ ID NO: 2700 - DNA, 203 bp, Homo sapiens
  source 1..203: mol_type = unassigned DNA
cgaaggcacttgggactcccagacgcaggatgcctctgaccgctgagtaaatgacaagggaggcgcggccgcggtacccgctcacctagcgcaaccgcctcgcgcggggagacctcggctgggcccttaggctggactccggtagccgaacgcccgctacccggccaggaagccagggagcgagcgcctgcgcggccgcatcc

SEQ ID NO: 2701 - DNA, 215 bp, Homo sapiens
  source 1..215: mol_type = unassigned DNA
cgcggatcggccggcctgggctcctgcagagcagatcctgtctgcgtcctccaggaggagtgggtggcaggactggggtttcccacaggttttggggcggcggcgagattggcacggtccggggtcgcaggcgcgcagccacgcccctggaagtccgccccggcccccgcccccaacccgcctcttcggggctttatggcgtgaggtttggggct

SEQ ID NO: 2702 - DNA, 201 bp, Homo sapiens
  source 1..201: mol_type = unassigned DNA
ggaggctgcagccgctcgagtcggcccgggtgggggcggggtgggggcggcgcggagggcacggagattacggcggcgccacccgggacatccagggccccgaggccctgggcggtccccacgcgagatcgcaaaccatgacaataggcagtcacccgaggtcaaataaaaacggagtgggtcccccgcgcgccgccgccc

SEQ ID NO: 2703 - DNA, 340 bp, Homo sapiens
  source 1..340: mol_type = unassigned DNA
ggcggcgctgacggatgccggtcctcagggagttttaaggcggcgggcaccagcgggctgatcctgaagcgctgctcggagccggagcgctactgcctggcgcggctgatggctgacgcgctgcgcggctgcgtgcctgccttccacggcgtggtggagcgcgacggcgaaagctacctgcagctgcaggacctgctcgatggcttcgacggaccttgtgtgctcgactgcaaaatgggcgtcaggtatgcgtgccctgccaggtcggttggggggatcaagtaggggtccggggccgggacagctgcttgagggggacccggggcgagtgctcgaaggg

SEQ ID NO: 2704 - DNA, 201 bp, Homo sapiens
  source 1..201: mol_type = unassigned DNA
agggctcagggcgcagggcgggtcccgtacgcagggcgggcgcgcgggcatctttgtggccaggcgaccccggctcgctctcccggagcccagggactcccgaggctggcgcgggctgcccgcgacaaggtgccagcagcctcgggctcgcgaggagcagctcccacccgcggcttccgagtccagctctgtccctccgcc

SEQ ID NO: 2705 - DNA, 236 bp, Homo sapiens
  source 1..236: mol_type = unassigned DNA
cctgagcagtgcattttcccaaaggtaaagagagataagggaggaaacacagcacccaaggtgatcagtcgattggacactgttgatggcacattctcctcgttcccaaccaaccgcacaaaacccgcaacacctcgcgtccccgcggggtctcccgcgcccctggcccggccctcccggccgcccccagcaggcgccccgctctccgcgggaactctgggacctggccgagcgtt

SEQ ID NO: 2706 - DNA, 251 bp, Homo sapiens
  source 1..251: mol_type = unassigned DNA
gctcctcagctccccgcgcaccctcctgcgctcgggccccgtcgtcccgctcagtgctggctacgggtcgtgtcactagcctgtgcgtcctcgtcactcgcgggtcggggcacttggcgccctgtgtgggtggcgggagcggggacgcctcggtgcccggggaccgcagcgcgctggcgtttaactttgccgtcgcccgccttggagtcgggaggctccagccgtctaagtgtcccgggagattcaggcac

SEQ ID NO: 2707 - DNA, 201 bp, Homo sapiens
  source 1..201: mol_type = unassigned DNA
ccccgcccccgccccatcccccaccggcgcaggttcaggccatcgctgccaggaccccccgctgtcgccgccccccgccccctccactcagactctgagtcgcccactccagccggtgcaggccgcggggccgcctctgatggcctgggcaccccccactcccgccccgttcacgaccaccgcggctgcctgagctgctca

SEQ ID NO: 2708 - DNA, 206 bp, Homo sapiens
  source 1..206: mol_type = unassigned DNA
gtccccgagtgcgcagcgtgcgcccccagcccctgctgcgcccccaggcctggcgcgcgatccgagcgcagcgggcaaagttggaggaacttggcggcggcggagcgggcgcaggctcagcccgacaaagcccgggggcccgggtcggggtcgctgccgcagcccgcacgctgccccgtgcctccgagaggtcccttccccagcgc

SEQ ID NO: 2709 - DNA, 201 bp, Homo sapiens
  source 1..201: mol_type = unassigned DNA
ggccgccgctcacctcgcgtatttcgtcttctggaaatccagcagccggggggcgaacatcgcggcgcttccatgggaatctggccccgggctcagagcgcgggtagctggcagagcctggggggcgcggcggcggcagcagcaggttggagggcgcgcggcgggggccaaggggacctggtcggcgcccggagccggagc

SEQ ID NO: 2710 - DNA, 203 bp, Homo sapiens
  source 1..203: mol_type = unassigned DNA
gctgtaaccctgggcctgggattgcggggacgggacgggtgggaagcggccaaaggcgcagcggcttctggtcagagccgcagaggcctgagacgtgggccgcgccccggcccaggagaccccgcggccgcgccctaaccctcagtctcccgactgcgactgcgacccgggaaaacgcctacgtttttggaaaggaagtccca

SEQ ID NO: 2711 - DNA, 216 bp, Homo sapiens
  source 1..216: mol_type = unassigned DNA
ttggggggttgggagaacgaaaataccagctgcgcttccaacatccaaggaaggaagtggcagcggggacggggagaggatgggaaggggatgctgactgcgagttggggcgggacgcggtgatgggaggggaccgggccgggaatgcgggaggcgaggggagcgacgggacctgccgttccggcggccgggcagccaatcgattcgtctccccta

SEQ ID NO: 2712 - DNA, 335 bp, Homo sapiens
  source 1..335: mol_type = unassigned DNA
agtgccggagcgctcggtggccgccgcgccgcgcgcctggagggatgctaacgtggagccggcgccgagtccgcccggcgtgcgtgcgtgtgtgggagcgcgcgagtcccctgacgcggggaccagttatgaatcgggggtgtgtgtttgcctccagagacctggcaaggtgcggagccctccagaagtgcggtcaagcggcagcggagacggcgagccaggaacctccccccgcgtccccagcttcccagcgtggcggcggaacccccggagaaagtttgcaaacttccagcgggcgcggcgaggacgccgggtcacctagggggcgggtgggc

SEQ ID NO: 2713 - DNA, 230 bp, Homo sapiens
  source 1..230: mol_type = unassigned DNA
gagagaaagtgagaagggagagaaaagcggcggctgagcaaagcgggagccggcgcgggcggtggggcctgacccggacgccgcgcacccggctccgccccgcgcccagcgccccgctcactccctggccgcgcctgccttcgcgcccctctgttttctctcacttaccagcagctctgctgacaagcgagaaaactgacaagtgagaaaagtcgtctgtcagcgcccgg

SEQ ID NO: 2714 - DNA, 224 bp, Homo sapiens
  source 1..224: mol_type = unassigned DNA
cagtacagggggtgagatggggtggtggttggtgaacgttggttactttattttatattattttattttgagagttgccataattaccggcgccaccccccgtgcaccctgaggtctggttggcgagccgctgctgggagttttctgcaaataccccccaaagcctgaaggcgggcttcaaacgcaggcgccggggaccatgggagccttcaaatagctgcgct

SEQ ID NO: 2715 - DNA, 211 bp, Homo sapiens
  source 1..211: mol_type = unassigned DNA
ggtcaatttcaggcacagcccatccgagtcaggcgaggtccagaaaggcctgactcgcctggcagcctcaacggacttgtccccgcagccgttgactagccgttgacgagcggacctcccggtcgtcatggcgactgtgaaatgtagggtggagcgcatgcgttcgaagccattcgcgcgggcagtccctgcgtgtccccctgcgtgtccc

SEQ ID NO: 2716 - DNA, 205 bp, Homo sapiens
  source 1..205: mol_type = unassigned DNA
cgtgtaatccgatcccttctgactcacaagccctgagtgacagttctgatttggttcaaccgcgggagggaggggaaagagaaagaaagaaacccccagccgtacgcctctcctggcatccaatcgactttctggaaaaaggtcccatcccggcctggtgccccgtgctgggtggagaagccccccgccccgacctggcaccgcc

SEQ ID NO: 2717 - DNA, 398 bp, Homo sapiens
  source 1..398: mol_type = unassigned DNA
ctccgcccgccccgcgccccgcgccccggcgcctcgccgcccgccgcccgcccgccccggcgccgccgcccgcgccccggcgccccgggccggcgaggggcgcgcccgcggccgcggccgctgcatggcgctgagatggcgggggcgccgcgcggcggaggcggcggcggaggcggcgcgggcgagcccgggggcgccgagcgggcggccgggacaagccgccggcgcgggctccgggcgtgcgacgaggagttcgcttgcccagagctggaggcgctgttccgcggctacacgctgcggctggagcaggcggccacgctgaaggcgctggccgttctcagcctgctggcgggcgcgctggcgctggccgagctgctgggcgcgccggggcccgcgcc

SEQ ID NO: 2718 - DNA, 290 bp, Homo sapiens
  source 1..290: mol_type = unassigned DNA
acagcgggcgctcccagacactggggaaagtgctttacgatgtcccgagtccctccagtctcgccagcggggcgagcgtgagggtgccccgaccgaccagcggccccgggtgcagggtggcgggcccggcggcgcgcgtccccctccccctcctggcggcccgcacgtgtcgcccgcgccgcgcccccacgggttacgcgcgggtcccgcagcgccgcggccgagccgggctgcccggcccgcggacacagcgccggccgccgcatcccgtgcggggccgcggcgcgatg

SEQ ID NO: 2719 - DNA, 307 bp, Homo sapiens
  source 1..307: mol_type = unassigned DNA
cgtgaaactgtccaatcaagtgcgcagctacagaggaagaggcggcctcttcaatatggcggggcctttgtctcctagcttccgggctctgatcctagttcgcgtctccactgttccatctcctccgttcctggagttcctcggtgactctactatagcttctgttatcctgtgacctgcaggtactgggagatccatagggaggacggcggaacatctggaggctgggaaatggtgagtgcgtggagtgggtgtcccgagaatggggaagaggctgtttgaatccggccggaaccggctgcggtgg

SEQ ID NO: 2720 - DNA, 212 bp, Homo sapiens
  source 1..212: mol_type = unassigned DNA
agtgctgccaggcggaggctcgtcagaaggctccgcagctgctgaggcggggtgggactgcgccccaggggccgcgctgaagctggcgccgcgattactgcgcaccgatttcgcccactctctgtccgctcccgggagccttctctgtctcaggacggttccttatctcccaaaccatgctcgtcctccacttcggacccacagccaccccc

SEQ ID NO: 2721 - DNA, 375 bp, Homo sapiens
  source 1..375: mol_type = unassigned DNA
tggctcctgagcagcatcgcccagtgcagcctccgtcaggaaaagcagcagaatcgacagccccagggggcgagcggggtccatggtgcagggggtcgggcggcccgctgggcaaggcgtccgagaaagcgcctggcgggaggaggtgcgcggctttctgctccaggcggcccgggtgcccgctttatgcggggcgagcgtccggccgacccccgccggggcggagcctgaggggtggctgattcatgcacggggactgtcaccccgccgcccccgcgctgcaaactgtgtaagagggagaggaattccccgccaagttgaaaagttgaacctgcctcccaaactttctcctgtagtccagacggggacgccctg

SEQ ID NO: 2722 - DNA, 201 bp, Homo sapiens
  source 1..201: mol_type = unassigned DNA
ggggttgcccgcaatatgcagggaaatgagcacctcgccctgctccccatccccttccagctccccgtggtgggtgcacaggaaaaagaagggcgaaaagcgggggtaatagccagccgccgcgcgcgccctcagcgtcgcccccagcaacagcgctaggaggaaagtctgccgggcccagccactgcgctccatgccgcc

SEQ ID NO: 2723 - DNA, 356 bp, Homo sapiens
  source 1..356: mol_type = unassigned DNA
ttggagacgccgggacggaggagccacgcggagagaaggcgagaagaaggcggacgggagcggaacgggctcgggagcgggcctgggagcgggcccccgccgagaagttccgcgggagacggcggctcccaaagttactttgggccgcgggagcgcgggaccggggctgcgggcgccgagagcgcgtcgtctgccgcctccgtgcgccgccgccgcctctgcgcgacgcccctcggccaggcctgggaaagcgcccgccccgctccacaccttcttaaagccccgggcgccgcgtcccccccgccgccgccacacgtgtcccggccgctcccccgcccccgcgcgccgccccgccc

SEQ ID NO: 2724 - DNA, 265 bp, Homo sapiens
  source 1..265: mol_type = unassigned DNA
gccggtttctttgtctgagccggctgcgtcccgcgcccctcggggctcgcagtctgccagtccgggcggcccgcactcgttctgggaatccgcccgaggccgcgaaccgctaggggccctcgcgctcccttcccacccaggccccctgtccctcccgccgcggccgcccggcccctcgcggcagcgacagagcctcatctgtagaggattttaaaatgagattaagcgaaagtggaattggcagactcgagtggtgcctggaaat

SEQ ID NO: 2725 - DNA, 697 bp, Homo sapiens
  source 1..697: mol_type = unassigned DNA
gaccccagccgcacgctgtgcgaggcctgcaacatccgcttcagccgccacgagacctacaccgtgcacaagcggtactactgcgcctcgcgccacgacccgccgccgcgccgaccggccgcgcccccgggaccccctgggccggccgcgcccccggccccctctcccgccgcgcctgtgcgcacgcgcagacgccgcaagctctacgagctgcacgcggccggcgccccgccccccccgccgcccggccacgcccccgcgcccgagtcgccgcggcccggaagcggaagcggaagcggccccggcctcgcccctgcgcgctcgcccggccccgcggccgacggccccatcgacctgagcaagaagccgcggcgcccgctccccggagccccggcaccggcgctggccgactaccacgagtgcacggcctgccgcgtgagcttccacagcctcgaggcctacctggcgcacaagaagtactcgtgccccgctgcgccaccgcccggcgcgctcggcctgcccgccgccgcctgcccctactgccccccgaacggcccggtgcgcggggacctgctggagcatttccgcctggcgcacggcctgctgctcggcgcgcccctggccggcccgggggtcgaggcccggacgccggccgaccgcggcccctcgcccgctcccgcccccgccgcctccccgc

SEQ ID NO: 2726 - DNA, 226 bp, Homo sapiens
  source 1..226: mol_type = unassigned DNA
tgggaggagcgcagacacctttcggtgatagggagggcttctcacttggctgttacctggaagtccacagtggccccggcgggcaggcgggcgggcagagcgcgggtccgaacgcccttcgcgctcgcggcggcgcacgtgcggcggcggcggcggcgccggcggcgcgggcgggacccactgggtggccgcgcgcgccacccgcgcgttttctgcgcgcctctgc

SEQ ID NO: 2727 - DNA, 201 bp, Homo sapiens
  source 1..201: mol_type = unassigned DNA
ttttctccatccccccaacccccagcaggacacggaactccggcgtttctcgaaagccacaaaagaggggcacggaaatcccaagctcgccgtgctaactcggagaacgcaaactcgaggcagagcgtgcgccgtgcggggatgtgggtgtcgaggaccccgaagcgcccggcttcccccgcgacccccatcctccctaga

SEQ ID NO: 2728 - DNA, 201 bp, Homo sapiens
  source 1..201: mol_type = unassigned DNA
tacctcgtcatctcggcggggcaagtccggattccaccagggcaggtccgggaggtcacccagggcagacgatccgaggcagagcgctttaaaatcctgccgccgcacgcccagtcagagcgccgagcgcgcctgcccccttcccgtcacccttcagtctcccattcgccgactaaacttttgggggatcacatctccaag

SEQ ID NO: 2729 - DNA, 215 bp, Homo sapiens
  source 1..215: mol_type = unassigned DNA
ttgtccttcagtcagaacgtgaatgtactgctgacgcatactgttctgggagaagattagcgtgatgcagtgctcttatgtattagcgccgctccccctccgtcgcctgcctcgcggggttaacgccggcgccttccagcgccgcgccggccggcgccgcgcagccccgcgcctccggccgcccgtcttcctctttcctccttccttcctcctct

SEQ ID NO: 2730 - DNA, 252 bp, Homo sapiens
  source 1..252: mol_type = unassigned DNA
tgaacgtgtgcgtgtgcgcgcgtgtggctgcctcctccagccccagccccgaacgcaaatactccaccgaggcacagggaagccgggagcagccgaggaacgcggagggcgccgaatcagagcctgcggggcttgacagcttctcttgcggcgtccaaggtgggcgtaatgtccaacaaaaaggtcggaaaatggggatcgattccgaacacccctttcctccacccagccccggagcccgagcagcggcgg

SEQ ID NO: 2731 - DNA, 203 bp, Homo sapiens
  source 1..203: mol_type = unassigned DNA
cgctccggcggccgcggagggagcgcaggcggcgccgctgcaggggccgggcgggctggcggcggcggcggcggcggctgcaggagcgcgggcaggtccgcgcgccgctggcaggggcagcaaatggcagccccttcccgcagcatccatccgcggctgcaccgcaccggggcattgtgggaaactccgctcactcccccgcc

SEQ ID NO: 2732 - DNA, 201 bp, Homo sapiens
  source 1..201: mol_type = unassigned DNA
cggcggcacccggcgcagaggctccagcgcggggagccgggctcagccccggcctgccagcgccgcggtcctagcccacccgaggccggcctggggggcccgcagggcgcgcggagcgccgagtgcgcgtcgggctgggccccgcaccccggtgcaggagcgcgggcgcggcgcggcggagcgccccgcatggagccggcc

SEQ ID NO: 2733 - DNA, 201 bp, Homo sapiens
  source 1..201: mol_type = unassigned DNA
gctgaacaccgcccgggcccagtccccactccgcggtttggtgaagttggtttccgtgcctgcttgggaagcccctgcctggggataatcgtcaggtcctcgagtcgcttcccccctaccttccgctgcgtcggcaaccttatcctcccgtcctcattaacggatcggcactcaaatcaaagcccagccctctggggttca

SEQ ID NO: 2734 - DNA, 201 bp, Homo sapiens
  source 1..201: mol_type = unassigned DNA
ccccgctccccggcagagcttctgtccgcgccaacccacccaccaggctctgcccgcgccacgcgcgcccctggcaggcctggggcggggaaaggcgaagcgctgggcacgcgagggcctgtgcaccccagttcctacgacgctcctggcccttttcaggcccgccgctgccgcatttaaccccctccttccgggggttat

SEQ ID NO: 2735 - DNA, 213 bp, Homo sapiens
  source 1..213: mol_type = unassigned DNA
cagctcatttaatattatttatgcattttgtgcaaggaattgtgggatttcgccccacggtaaacaatatggaaatcttaaaaatagcgatcttcctgtgcgtgtccacctacgcgccccggggtgacctggcggggctgtcgccgggtgactcacacccctgaaccgcgaagcgacagggaaagcgcgggcgagcgcaggagacgcggtcgg

SEQ ID NO: 2736 - DNA, 385 bp, Homo sapiens
  source 1..385: mol_type = unassigned DNA
tcatcccctgcttgtctaagccggctggctctcgtgactgactcggaacaacagagcagatgtttgcgtgggaggcaagcctcacccaacatctgtcctgcggcgggaaggcctgggtgttcacagatagagctggagttccccggtgggtggcacagacaattagctggggctgcctcacatgtaatctaattacaggggaaacaggctcaaacaccgggtgataagcagcgcaactgtttcgggtgactctgtaatttttcctccattaattttctccataacgcacatgattgtcataagggttaattaaaaagagcgtgagtggcctcatgtcacatgtagctggaccagaaagtgttgagtacctgctcatgcgtgcaag

SEQ ID NO: 2737 - DNA, 278 bp, Homo sapiens
  source 1..278: mol_type = unassigned DNA
ggcactgcggctcagcccccgcccggggactcgcgggccgactgtggccccttctggggaagccggggcgcggggaggcgttccgggcatctcagccgcacggggtacgctcgccctcggcggggcccctcgctccgctgtgggagtggcagtgggtgtcggggtggagaaagtacgcgtggcgcggagtcctggggacgcggcgtcccacccgctctggggagccccggactctctccagcttccaggctcgcatgcccctcttttcttagtgccct

SEQ ID NO: 2738 - DNA, 248 bp, Homo sapiens
  source 1..248: mol_type = unassigned DNA
acgcgagccgccagcggtgggacccatcgacgacttcccggggcgacaggagcagccccgagagccagggcgagcgcccgttccaggtggccggaccgcccgccgcgtccgcgccgcgctccctgcaggcaacgggagacgcccccgcgcagcgcgagcgcctcagcgcggccgctcgctctccccctcgagggacaaacttttcccaaacccgatccgagcccttggaccaaactcgcctgcgccga

SEQ ID NO: 2739 - DNA, 216 bp, Homo sapiens
  source 1..216: mol_type = unassigned DNA
tataacacaagggagagaaagcaacgctttggttccagaaacttccatcgtcaaggccagttctggccagacgcacagccaaagagcccccctagtctagcggatgaaccgttcgcgagtggcaccccctaaaaccttggccccatctcccaagatgcctctttactgcgcaatccagaaagcacccggaccgccgccacccaccagcggcggcga

SEQ ID NO: 2740 - DNA, 201 bp, Homo sapiens
  source 1..201: mol_type = unassigned DNA
tgaggtgcctccctcaccaattctaggcaccggcccctggtggaactgtccccagactgcctgagtccccagggtcaagcccccttcccacctcccagcacggagctctacctagaactgcacctcgaaagcccaaagcttacctatggttcccagagacaggcgaaggcgaggttttttacgggacgccctggtaggtgc

SEQ ID NO: 2741 - DNA, 208 bp, Homo sapiens
  source 1..208: mol_type = unassigned DNA
cgagcagccagggccagcgagcgaccccagcagcagggacgcggccgtgcgagagctcgcggacaggcgagggggatcccaggggagcagctgctgcccacgggccacgggcgatgcacggagtggagaagtgaacgtggtctacaggatttctgtccggaaggtggagagcgctacaggggaatctcctcgattcctgtccgtctcg

SEQ ID NO: 2742 - DNA, 201 bp, Homo sapiens
  source 1..201: mol_type = unassigned DNA
tcaggagcccggatccttgcccagcttcttggcggagccaagttcgagcgcacagatttcccgagctccagcggccagggggcactgtgtgagcggctgacgtcacccctccgcccggccgaaaccaggcggcgggatcccacacagttgaggagagggagccgaggccgtgacttagggctggcgacgattaaaccaagt

SEQ ID NO: 2743 - DNA, 364 bp, Homo sapiens
  source 1..364: mol_type = unassigned DNA
gccgcgggtgaggcctgtggttaacctcgcgctgccgaggtcttacctcctcgagtccagtctgattccaggccgcttccaggccggtgcccagctgaggcgggaacgctgcagtttggttgagcgtgacttttaggctctgtgaggaaaagtcgagcgcgccacatcgaggcgctagccgtttattctaccacaaggtaaaagattcatgctgtcctagttaccctaaagctgggagatacactgcacttcctaccagaccccgaatgctctcagtgtctgtaattctttaagaagttcctagagcagacagcccttggatcgtgggcacttctccccggggacggggaccctgctgaccgcc

SEQ ID NO: 2744 - DNA, 213 bp, Homo sapiens
  source 1..213: mol_type = unassigned DNA
gcccagcctctccccagcatgtaaagtcttctgtctctcctcggagttggcggaggcggcaactttccattctcgccgccgggggccgggcagcagcgggcgcgcgggtcagcgctcagcacggcgggcagcgccgcgctgcgcaccgccgccgaccatgagcgaggacagccgcggagacagccgcgccgagagcgccaaggacctggagaa

SEQ ID NO: 2745 - DNA, 201 bp, Homo sapiens
  source 1..201: mol_type = unassigned DNA
tctcctcgtcacggcaacccaactggaggcagaagccggcggggcggccgagcggggcggggcgggagcgcggccgccgcgagccacggtggggagcgggcgcgggggaccctggcgggccccgggcagcgcggctgcacttacttgtgtcacaactgcggcgacggggggctgaggaaccggttcttccaaaagcaaacc

SEQ ID NO: 2746 - DNA, 201 bp, Homo sapiens
  source 1..201: mol_type = unassigned DNA
ctctgggcggctgcagaggccggccgtccggtttggctcacctctcccaggaaacttcacactggagaggtaagggcgattctaaaatgcatcgctgagtcgtcaagctgccaccctttcctatctccctttgccttcttaaactgtacttaaaaaaaaaaaaaagccaactgtacagagtggttgggcgcgatgggtggg

SEQ ID NO: 2747 - DNA, 296 bp, Homo sapiens
  source 1..296: mol_type = unassigned DNA
tccgggaccgcgcctcggccgcccgagccccccgcgcccgccgccccccacctcggtcgggggcttacctgggagcccgctgcccccggccagccgcccgcgtgtgcccagggccagcagcacgcacaagtgccagcgcacggccgccgcgcccatgctcaatgcgggccccgctgggcgtgcgggcgtgcggggcgcggggacccgaccgaccggccgctcccgcaggcgctgctcgctgctcgccgctccgccaccgctcgggctcccgagccgcccagccagcccggctgatg

SEQ ID NO: 2748 - DNA, 201 bp, Homo sapiens
  source 1..201: mol_type = unassigned DNA
ccctgcctggcggctcctgcgcccggggctgctgagcccggggttcgtcctgaggccgcggctgtggttcctggccctcccggcccgcgtcactgtcgcgcggcgcccgctgcatcttgccttccttgcggcttcgcatgcccttggtggaacccagctcggcggacgacgaggaggatgagatggaagcctgctggaaac

SEQ ID NO: 2749 - DNA, 297 bp, Homo sapiens
  source 1..297: mol_type = unassigned DNA
ggggagggaggcgcggcgcgggaggaggaggggcgcagccgcggagccagtggccccgcttggacgcgctgctctccagatacccccggagctccagccgcgcggatcgcgcgctcccgccgctctgcccctaaacttctgccgtagctccctttcaagccagcgaatttattccttaaaaccagaaactgaacctcggcacgggaaaggagtccgcggaggagcaaaaccacagcagagcaagaagagcttcagagagcagccttcccggagcaccaactccgtgtcgggagtgca

SEQ ID NO: 2750 - DNA, 268 bp, Homo sapiens
  source 1..268: mol_type = unassigned DNA
tcgcgctcgggaggggcggctgccgcccgcggggcgcccgcggtgcccgggcctgggcagcgaggaggtgacgccgcccccgcgggatgagcccgggaggcggaggggcggaggaggtgctggcggcggcactgagcggcggcggcgcagggcgcgcgggccttccgcgccgactccatcgacccaaggggcggcggcggtggcggcggctgagcgaccctgggccgggcgcgtgatgaggaggggccggcgccagaccccgctgcac

SEQ ID NO: 2751 - DNA, 201 bp, Homo sapiens
  source 1..201: mol_type = unassigned DNA
ctgagcagtcgaagggacaactagacagtcatagacagacagacggccagcccgagcctcgggcaggagagaggctgcgaggagcagcccatgcttgccccgctcagccctcgcgctcccgggctgcttttttaattccgacccgcgcacgctgcgagtccccggcgctgtcgtccagccggaggggcagtcccgctcctt

SEQ ID NO: 2752 - DNA, 201 bp, Homo sapiens
  source 1..201: mol_type = unassigned DNA
cgcgatcagcatctctccgccacgaacctgagagacaagaagcgaaaacagggtgtgtgggggatggagagagccccggggaggcagctgcgccttcgcacgtcccaatttaaagaagagagggaaggaggaagcgaacccactgcctagcacgagccgcggagcggcttaatccagagcgggcagctgcggacgagttgg

SEQ ID NO: 2753 - DNA, 201 bp, Homo sapiens
  source 1..201: mol_type = unassigned DNA
ccctgtgcgagcaaagccgggagagcgagccccaagcacctggcagcggtgcccccagcaggcgccgaggaatccggctatccatttctggtgaactctgcgcccactgaggcattcgaggtacggatgtgtccgcctagtactcggagacgaaggagagagagcggggatatgcgctccagctctgctaggctccagggc

SEQ ID NO: 2754 - DNA, 201 bp, Homo sapiens
  source 1..201: mol_type = unassigned DNA
tttctcctcctcgcgcatctcgtggtccgactcgagggcgtcgaacacggcggcgcccaccagcaggtaggtgaaggtgcagacgatgagggacagagtccgcacgttctgcctcttcatggccgccagcaaggagccggcgcggggggcatgtcccgcaggctcacagccgcgcgcgtcccactgcagcgcccggcggcc

SEQ ID NO: 2755 - DNA, 302 bp, Homo sapiens
  source 1..302: mol_type = unassigned DNA
cgcccacccgggcgcgcgggtgcgcagcggggtccccgccgggcgtcggccggtgcgcgaagtttgctcggctcaacccccaaggcgcgggagcggggcgcggccccaggacggcagggaccgcgatggagcggcttcgggggcggccgggggacggcgcggtggcggtcggccagcccgctcctccgggggcggcgggcgcggcggcggcggcgggaggggtcccgcgggcctcgcggagcagcggggcggacgcgggcgcatgagccgcgcgggggtcggggccctccggcgtccgggcg

SEQ ID NO: 2756 - DNA, 201 bp, Homo sapiens
  source 1..201: mol_type = unassigned DNA
tcggtggccgcgtccgtgaaatggggacgcgggctctgctctcggatcccttccagcccccgaccctccgcacttgtcccgagatccaacgtgcccggtccgcagcgtgctgggtctgcggcgtcagggtggcccgagtcccgagaccatctgcgcttgcggacacagccgcggggcctggcatgaagggccccagggagg

SEQ ID NO: 2757 - DNA, 220 bp, Homo sapiens
  source 1..220: mol_type = unassigned DNA
gcggggcgggcgactgccgggccccgggccagctctcgccccccgccccgcccccgatcgctcggctcccccgcccggcgctccctcgggctgcgctccgcggctctcggcggcggcggcggcgggcgcagagcgcggcatgggcgcccgggccgcggggcctggcggcggcgggcggacgggcgcgcggctgcgggcgcaggtgcggggcggcgggccg

SEQ ID NO: 2758 - DNA, 347 bp, Homo sapiens
  source 1..347: mol_type = unassigned DNA
caccgtcccgggtgcggcggctccaagcggagacctgagcgcggcgggccgagctccccaatttgttggcgctgccccctcccccccggcggtgcgcgggcggcgcctcaaaggggaggaccctgcggcgcgggtaagaggcggcgggagcgcgcggcccgggagtgtggctgcagtgcgccgggacaccagggctccgcgctccgcactcaagaggctcccgcgtcccaacccctcgcgcccgcgcgttcgcggatccaggccgaggaccgaaaggggccgcccgagcccccggggccggcgcccagagagcccagcaaggccggccgccctgccggtgtgccgcc

SEQ ID NO: 2759 - DNA, 201 bp, Homo sapiens
  source 1..201: mol_type = unassigned DNA
tggcaccaggcttccccatgggcaccggagcaggcggacaggggtggggtcccgcgagcgacacggaagggtcagtgtggcggagcggaccctgtggaggcggggtcactgtgctcctgagaagggtcctcgggggtggagtctatcaaggttgcgggggcgtggtcacggagcggagccaataaaagcggggcgtgcacg

SEQ ID NO: 2760 - DNA, 201 bp, Homo sapiens
  source 1..201: mol_type = unassigned DNA
cgtcctggcaccgggggcggcggcgcagaggccgggaggaagaaatccgggccctggcccaggtcgggcttccacccctgcgacccgcgagaggcccaggcgggaaaggcggcgagtggcgtcagcggttccgaaagcaaacctggcccggtgctactgcccgagggtcgccgggcgcgtttcctaattcccccgagtctg

SEQ ID NO: 2761 - DNA, 225 bp, Homo sapiens
  source 1..225: mol_type = unassigned DNA
agtgcgcacgctgcaggaaccacggctacgcctcgccgctcaagggccacaagcgcttctgcatgtggcgcgactgccagtgcaagaagtgcaacctgatcgccgagaggcagcgcgtgatggccgcgcaggtgggtgcgggcgtgcgggagcccgggttcagccttagtttttttttttttttttttttttagatggagtctcgctcggttgcccaggctgcag

SEQ ID NO: 2762 - DNA, 318 bp, Homo sapiens
  source 1..318: mol_type = unassigned DNA
gctgccaactcattcgggagcccggggcatgaacggctacggctccccctacctgtacatgggcggcccggtgtcgcagccgccacgggcgcccctgcagcgcacgcccaagtgcgcgcgctgccgcaaccatggcgtcctgtcctggctcaagggccacaagcgttactgccgcttcaaggactgcacctgcgagaagtgcatcctcatcatcgagcggcagcgggtcatggctgcgcaggtggcgctgcgccggcagcaggccaacgagagcttggagagcctcatccccgactcgctgcgcgctctgccagggcc

SEQ ID NO: 2763 - DNA, 265 bp, Homo sapiens
  source 1..265: mol_type = unassigned DNA
aggaaggggagcgcagtctgcagactgaagccagtggcgctgcgctgaatgcaactgcgcgcgcccgccgggtgagccagcgatctgagccaggcgggggcggcccgacctttcccgcccagcctgggtcagaggaagccgaaagcggcctcagcaaggtgaggcgcccgaggctgcagaagaccgagcagaactttgcagagttcgggatgtgctgggctaggtcgctgaggacttgactggcttcctccctccttccctccac

SEQ ID NO: 2764 - DNA, 259 bp, Homo sapiens
  source 1..259: mol_type = unassigned DNA
cggaggggaggccgcggagggccgggtggaggtccttaccgccagccccaaggtctgcagcatctctctctggtctttgtccccagggccgatgtgcctccgagcgaagtcgtcgtgtctgggcagaaggcgctccaggaggcgcgaggccccagccgcggcgctgtccccgccgccactgctgctgtcccggctccgcggcgcccagcacggccccgatcccccagccaggcggcggccgcccccgaccccgcggccc

SEQ ID NO: 2765 - DNA, 201 bp, Homo sapiens
  source 1..201: mol_type = unassigned DNA
gacggggcaccggtaccaattagcggctcgcctcggggtccccgcggctaaggcgagaacgcaggaccaggagcattgctgcccactctctaccgcaacccgcacatcccgggaccacgtaacggcggatggggcgtccgggagcggcccctgcaggggagagcaacaggctcccgcgccctggaggcctggtctgcgctc

SEQ ID NO: 2766 - DNA, 323 bp, Homo sapiens
  source 1..323: mol_type = unassigned DNA
cccccgcgacctcaccggggaaacaccgcggacagtcgggccagcagcgcccggagctcactccaggtctccaaacttgcagcacttcccagagcgcgcgcgctcggagcgggacctgcttgctccagtgcacgccgcggagcgaaccatcgggctggcgggggtggaggggtgcaggcgtgggggctgcgggccgctcgggccttgggcttctcctgccgccgccgccgcctcccgcccccggccaggagtcgcgcgtgacgcggttcgccgcaggagcctcgaaggcgcggcgccggcgagcccttccccggcaggcgcgt

SEQ ID NO: 2767 - DNA, 201 bp, Homo sapiens
  source 1..201: mol_type = unassigned DNA
agccgcctccgcacctcccgtcacagcccccgcagcaaccgccccagcagtcgcagcctcagcagccgtctcaccccggcaagatgcaggaggcggcggccgtggcggcggcggcggcggcggccgcggcagccgcggtgggcagcgtgggacgcctgtctcagttcccaccctacgggctgggctcggccgccgccgctg

SEQ ID NO: 2768 - DNA, 355 bp, Homo sapiens
  source 1..355: mol_type = unassigned DNA
gcgaacacaattgctccagccacaggcgaggcctggccaaggtgtgggcgcatctggggcaggtcttgagaggtccagcgcccggtggtgcggacagaggcggggcaccgcggcgctcgccgccgcctccccgcaggtgatcatcctcctgcaggtgtcctcgggtctcaggtggctgcgtgtctgcgccatggttgacattctgggcgagcggcacctggtgacctgtaagggcgcgacggtggaggccgaggcggcgctgcagaacaaggtggtggcactgtacttcgcggcggcccggtgcgcgccgagccgcgacttcacgccgctgctctgcgacttctatacggcgctg

SEQ ID NO: 2769 - DNA, 201 bp, Homo sapiens
  source 1..201: mol_type = unassigned DNA
cccgcgcggagcgattgtgaggggctctgctggaatttggcagcgcggaggcttggagagaagccccatgctggctcccattcagccggcccgttttcctcgagctttggaagtttcactcagccgtgcactcaatggcttcacaaagctgattacaagcttcagcgcattcctgaaggagccaaaagcgacgcaggtgca

SEQ ID NO: 2770 - DNA, 290 bp, Homo sapiens
  source 1..290: mol_type = unassigned DNA
gacaccttgtggagcaggtggcccaggctgccgggcccatcgtcgggcgccttgcgcagcgcctcgccggacaccaagtagggagccgccgccggggtcgcgcgcgccgccgaaaccttgcctccgccgccgctcaccgacaggctgtggagaaggtcatcgaccgatgtcaccgagtcattcctgaagcggttatacttggtgcgtggaagcatgcccctccgtgggctcgctgcatccgcccgggcgctgctggtgccggccccggcgcgggctgccgcgcatagcag

SEQ ID NO: 2771 - DNA, 201 bp, Homo sapiens
  source 1..201: mol_type = unassigned DNA
tagagactgtagcttccgccgggctggatgcgagtctcccaggttagagcccagaagcgcgctgggacctgggtctggcttttgggtctgtgtccttcctcgtttggccccaattgtccgcattcaagatcataataaaaaggcttaggaagtaaacttcttggacgcggaagggccggctcgcgggtttccgccgagtga

SEQ ID NO: 2772 - DNA, 201 bp, Homo sapiens
  source 1..201: mol_type = unassigned DNA
agaggccggcccgccgcgcgggagacactctttccaaagtggaagcgctgcgtgggcagcagcgcgggccgggccctcggatcccagtctctgttgctcccgagacccccgccccgcgccgcatcctccgagctcagcgccctcgggctgcgctgggcgcagtggctcccggtcagggcgcagtcggcctgggcgctagag

SEQ ID NO: 2773 - DNA, 288 bp, Homo sapiens
  source 1..288: mol_type = unassigned DNA
cgatgtagctcagaatccgcgatccagcccggtccaccacagccttcagcagcgacactcgcagcctccgacctctcagaccgagtgagcttaactaagccgttactcgcgtgccagcagttgggcgctccgacctctcagaccgcgtgagcccagcaaagcggttaggcgcgcgcctgcagctcggcgctagcccggactccgggagccgctctcgagctcgcgtggacggcagagggcggctgcagctcgggcgcaggcgccgctggcttgcgggttctcctgggc

SEQ ID NO: 2774 - DNA, 212 bp, Homo sapiens
  source 1..212: mol_type = unassigned DNA
tcactccccgctgcgggaaggggctgcttggctgcctctgggggtcttcagagctaccctggtcccgggggattggaggaggaggttacctatcctgcgtcgtctttaatccgtgcaccactatccatcaaatagagacagatcctgggcctctcaaagacggatgattgggggtggtgattggcctatccctaaatatctaccacgcaagg

SEQ ID NO: 2775 - DNA, 201 bp, Homo sapiens
  source 1..201: mol_type = unassigned DNA
agtagcagcaggagcagcgacgcccagacccccgggtgctgccggggcggccgcgccatccgtgcgcacagatcccgcagccaggccgctcgggccgcagcgggggcgccgcgggcgcgggccgggactgagcctccgccgaggccaccagcacgcgcccgcgcagccgcggagcctcccgcacccccgcctccctgcctc

SEQ ID NO: 2776 - DNA, 246 bp, Homo sapiens
  source 1..246: mol_type = unassigned DNA
gcggggatactcccgggggccccgggcgcggtctcggggaagaggcggaagctgaaattgcgcgacggggacatctgctgaaaggtcgcccagcccgaaacgagcgccagaccccagcaacaaaaggccaggcgaggccacatcgcgctggagacagagcggctgccccggagcgcaggcggcggctcgggcgggaagaggcgctgggcggccggactcgcagaggggcgtgcgcggagctgggcg

SEQ ID NO: 2777 - DNA, 201 bp, Homo sapiens
  source 1..201: mol_type = unassigned DNA
ggcgctgcaccgtccctgcggccccagaggctcgcgggtgtctgggcgcgggtggcgggcgggtcgggggcttgcgggcgtgtctgtgcgagagctgccccgcgagcggcgcagagacatccgggcgagctgagagcctcactttgctccatcggtggaatgggcacactcggaaggcgtagctgctccatccctgggagg

SEQ ID NO: 2778 - DNA, 201 bp, Homo sapiens
  source 1..201: mol_type = unassigned DNA
ggttgcgcgacgttccccgccgctgggggagattagcaaagttacccgcctctggaccccggggcctgggcccctagatcccgccccgcggcgggagatgcgtttgagccttttacagacggagcgcgtcccagcctgacgcagagggatgaatagacaagcgcaccgggcgggaatcccgactgcctgtgtatctggggt

SEQ ID NO: 2779 - DNA, 358 bp, Homo sapiens
  source 1..358: mol_type = unassigned DNA
gacacctagcggcttcagggtgaaccccgaccgcagccgtcgccgcctcgggcagagtttgcgcccttgctttgcgccccgggcgctgaagccgggcgggcgatgcccgcggcgtgaaagcgcccgcggcgggcgccgacctctgtcctagtctcctgctccccccgccccgcttgtcccgtgcccttgtgaccctggctttggcgccgtcgcccaggcgccccgcaatgtagctgcccctgcgcctcggcgggaggcgtcctgccccgcgagcgcccggggcccggagcccggcctgggggctcagccgagctcgggcggggccggggccgcggtggcgatgcaccgggcccgttag

SEQ ID NO: 2780 - DNA, 201 bp, Homo sapiens
  source 1..201: mol_type = unassigned DNA
cggccgggctccctggagagggagtgcaaggaggagcagtgctccttcgaggaggcccgggagatcttcaaggacgcggagaggacggtgagcccagcctcggggcgccccgcgccgcggacactgcaggcggcggtgaaccaggccgcgtggggccgcctgcgtctctttggctgcggctgtgggcggcgaacacgcagc

SEQ ID NO: 2781 - DNA, 201 bp, Homo sapiens
  source 1..201: mol_type = unassigned DNA
gcccgggacgcgagagggggcgcgacggcggctgcggtcggcccggcgcccacctggtcgctcctgcgagcagcgccccgcgtcccgcccgcgcggagcccgcacctctcggccgcgccgccgccgccggcgaggagccgcacccgggcgcagcgccgcccgcccgcgatgacggccgctcgggccggggacggggaggcg

SEQ ID NO: 2782 - DNA, 201 bp, Homo sapiens
  source 1..201: mol_type = unassigned DNA
agagagaatccgaggctgtttctgccgctgaaatctgagcgggagagcatcccgaagccgcctgcgtggagcgagcagcccccgcgtcatgggccagaggcgcccgggagaatctgcgggtcacggatcacacccgcaggggcctggcggagcaaggtgccgttcgccgcctgcgggcaggagccggctctgggcctcggc

SEQ ID NO: 2783 - DNA, 277 bp, Homo sapiens
  source 1..277: mol_type = unassigned DNA
ccgcagagacccagccctgtctgccgactggcccttcgacgtcgccgccgtgcctgagccccgctgcctgctcggacaagcagaactccggcaggcgcagcgggcgccgaggcttgggctttagccgtggcgctcgcctcggcgcagtggggagccgcgggcgtcggagaagcggccgcgctgttccgggtcactgcaccggctgaaaaaaccaaaagcaaaaccaacacccagaaacgaagcctgcgtgcccccgggggctccgttttgctcccct

SEQ ID NO: 2784 - DNA, 201 bp, Homo sapiens
  source 1..201: mol_type = unassigned DNA
agtcagtggaaccggagggggacttcggaggaatttgtctctgatgtcccggctccctggcctcctattagaactcgtagaggatccgctctggagtccccgtgcgccctggcagaggtcggggacgccagagtgcacgcagtctcctgcgcgccgagcccaggctccgggcgcagggaggatcgggctgagagcagggtg

SEQ ID NO: 2785 - DNA, 247 bp, Homo sapiens
  source 1..247: mol_type = unassigned DNA
gcaagggccgggagcctggccttccatgaagctgtctcaggccgggaccagccccagccccgacggccgctgcggccccgcctcggcagccccgtgagcccgcggaggagtttcgcacccgaccgtgcacagcgaccgagttggcgcggcccgtatgaagcgaagcgccggcttcagcagcgcagtctgagcaggggatccgcgtggcaactagggctgcgcgcgagctcggggcgactgtggcggc

SEQ ID NO: 2786 - DNA, 201 bp, Homo sapiens
  source 1..201: mol_type = unassigned DNA
cccccgcgcgcagcccgcgcagcgctcagagccggacggcgcttcccggtggcggcggaggagcccggagggacgcagccgggcaaggcagggcgcagggcgggcggcgcgaggcgcagggcgcggcgggcagaggccacctggccaccttccctggcgcccggggaaggcgcggcgatggccggggcgcgcggggcggcg

SEQ ID NO: 2787 - DNA, 201 bp, Homo sapiens
  source 1..201: mol_type = unassigned DNA
cgccaggcccgcccccgcccggccgcccgcccgcccggtgggtcgcggtggccgcgggctgcgctgcgcgggccgggcctggcgggccgggggctgcgcgcgtccgcgagggcgcccgacgcgggctgaggggcgctggcgtgtgcccgcaggcggccctgcgcgggggacggcgcgctcctggacaccgccggcttcaag

SEQ ID NO: 2788 - DNA, 201 bp, Homo sapiens
  source 1..201: mol_type = unassigned DNA
cccccgagctccgcgatccctccgcctaccggggaaggagacctcagcgtcgctgtcctgcccctcctgaacgctgtccttgtccgacttggagccgccgcgggagcgcttcatgttgcggaaatactgcccccagcgctgccggccggcgtccttcttcagcctcttctccttggcccggcggttctggaaccaaacctg

SEQ ID NO: 2789 - DNA, 356 bp, Homo sapiens
  source 1..356: mol_type = unassigned DNA
aacacggagcacgaacataagcaggtaccgcacatctgcgagctattcgggtctccgggggaaggcaaaaagccccaacaagccttaagtaagaccaggacgcttctatagttttgctttgacagctaaggaaaaaatctgccaaaaaccagaggcgctgctgagtgttggcgtgggaatgctagtttagtcagagccttgctctgggccatttaaataaaaacagacatgttggtggcaaatgccagttgaacacgcaggagagcggtgcttctcgggcccggagaagggtttgcagctgcactctctcttcccttttctcttggcctccccagccttcttatcatcacgatcag

SEQ ID NO: 2790 - DNA, 201 bp, Homo sapiens
  source 1..201: mol_type = unassigned DNA
tcaacgcctgcctctacttcaagtcctgccacagctgctacacctactactgctcgcgcctgtgccgccgcgaggactgggacgcccacaaggcgcgctgcgtgtacggccgcgtgggcagcgtgtgccgccacgtactgcagttttgccgcgacagcggcccggtgcaccgcgctttctcgcgcatcgcgcgtgtcggct

SEQ ID NO: 2791 - DNA, 281 bp, Homo sapiens
  source 1..281: mol_type = unassigned DNA
agcctcgtgcgccggcccctgccccgccagccccgctatggtcccccatccacccccgcgggagcgcccctgtccccccatcctgcacttcccccagagtcgcgcgccagtttcccgccccgtggaagcgcccctctcccgacttcggctgatccccgctcgccgccctccccgcgggtgcgcgcccggcccctccctcgcccggggcgggtctgcgtgggcggtgctccgggtcggcgggcggagctccggttccccagccctgcgccccggtggagccc

SEQ ID NO: 2792 - DNA, 222 bp, Homo sapiens
  source 1..222: mol_type = unassigned DNA
gcccaggtcacacaccagatcccactggggatgtgagaagggtgcagcgggcgtgaggccccgccctcgccgctctctgcccgcccccagacccgcggcccgcctggccgcctcacctggccgatggcgttggtggtgagcacaggaaggccattatagtcccaatccttgaggcaatggttgaagtccggcggggcgaagccgctgcacgaggggtcggta

SEQ ID NO: 2793 - DNA, 237 bp, Homo sapiens
  source 1..237: mol_type = unassigned DNA
cgggcctggatcaggacggcgaggcgggccggcgcgcgcgcgaggtggccttcatccacatccagcgcgagctgcggctgcgcggcgtcttcctgcgccacgagttcccgcgcgtctacgagcagctttgcgagttcgtcgaggccaacaggcgcttcacgcccaccaccatctaccccacggaccggcgcaccggccgccccttcatgtgcatgatcatggccgcctccgagccgc

SEQ ID NO: 2794 - DNA, 201 bp, Homo sapiens
  source 1..201: mol_type = unassigned DNA
cctggttcctcaatctagcagtgcttttgaatgaacgtgtgacagcttaatgaagcagccgagtaccttgatttgaatgttggagccggggttcacagggggctgtattagtcagtacaggctgggttatgccactgtgacaaagagccccagatctcaaaccccgtccttgtgggtcagctgaggtctctgttccaggcc

SEQ ID NO: 2795 - DNA, 364 bp, Homo sapiens
  source 1..364: mol_type = unassigned DNA
gcttcaccagcctcccggccgagcggaaggcgccggcgcccagctgggtcaagttgttgtagctgaggtcgaggaacacgagcttggccgagccgctgaacgtgccctcctccagcgagcgcagcgagttgttcctgaagtccaggtagaccaggtcgccgtagaagatgaagaagtcctcggggatccgctggatgcggttgccggccaccagcagcttgcgcacgtccagggggaaagggtctggcacgctgggcagcccgcggtcgcggcagtccacggtgtgcgggtcggtgcaggcgcagcccgcggggcacgcgtgcccgggcgcgagcagcagcagaaggctgcagagcccgagcgc

SEQ ID NO: 2796 - DNA, 201 bp, Homo sapiens
  source 1..201: mol_type = unassigned DNA
gaaattaacccgctagaaaaatctcttgggagaggcgggagcggcaggggtggccgagtggccgtcgccaaaacgcggccccaccctggcagctgatttccgagatctggcagtaagacgccgcgcgcaccgggcgggctgcactcgacgtctaagttcagctaccaagcccaggagcggtttccctaaggcgtgtcccgg

SEQ ID NO: 2797 - DNA, 201 bp, Homo sapiens
  source 1..201: mol_type = unassigned DNA
gcgctccctcctggggtgggcagcgcaggtctggcctgcgggtggggggtggagagtgagaggcacgcggggcaccagctcagctcccctctggggatttcgtactcgcagtttaaggaaccggtggagcacgaactccactcctgagctggcgcaagcgtctcccttccatggagatccaccccggctcccctctgaggc

SEQ ID NO: 2798 - DNA, 201 bp, Homo sapiens
  source 1..201: mol_type = unassigned DNA
aggaaccggcgctgccggtgcctgggggtcggggcgcgggcgaagccgggccgcggaggacacaacaggtagagccgggggtgcccggccgcgcgccccccgcgcatcatgcagctctttgtcacctctctcgcccccaggccaaaatcctgagcatgatggaagacaataagcagctcgcgctccgcatcgatggggcgg

SEQ ID NO: 2799 - DNA, 222 bp, Homo sapiens
  source 1..222: mol_type = unassigned DNA
tgcgcgcgtgcgtgtgtggcgtgtgtctgggtgttttatgactgtcctccgtgaggccgtgtgtgagcccttgcgtgggccgtgagtgcggcagggagcgcggtgtccgggggccgcctgtcggtgtgtctgtgcgtgcttgtgcgctagcctttgcctctgcgagtgcgtatttttaggaccgagtctgtctatatgagcctgtgtctgtgtgtgtgcgct

SEQ ID NO: 2800 - DNA, 201 bp, Homo sapiens
  source 1..201: mol_type = unassigned DNA
gacaataagatctgttattgacgccaccgggttggtgatacttaggtacagcagccctagcaaacgaatacacccccatgagaactaagctccctgagagcggtaagctgccttgtcttgctcacagctgacaagaacacgcctgtacggtcacttagcacctagtactgccatttaaccgtttcactagtatgtatgaac

SEQ ID NO: 2801 - DNA, 265 bp, Homo sapiens
  source 1..265: mol_type = unassigned DNA
aggcgcacacgaggagcccggcccagtattcccaaaccagactccggaggcgccgccagggagcggtcatcgttgggcgccgccgagcgtgcccggggcgcggccgtggcgggctccctggggcggcagctctaggcgcgggcgcgcagcagccccgaaggcgccgcctggcccagccgcccggctcccgagcgccgctgcaagtggggggcgccccgcggcgccgcgcacatcttactggggggccgccccgccggcgcccgcc

SEQ ID NO: 2802 - DNA, 242 bp, Homo sapiens
  source 1..242: mol_type = unassigned DNA
ccgggctgtcttcgccgctcaccggagagggtcgtccgggtgtttggttttgttcgaaagtttctgggcttttttttttttttgtaaaatccaaagcaaccgaacaaaaagagtccaggccgcgcgggcgggctgcgcgcccgcgccctgcagcgcgccggcgggggcccggcccgcggggtcactgcactgagccgggcagtgtgtggtggtggtggtggtgcagcgccgccggcgggggc

SEQ ID NO: 2803 - DNA, 201 bp, Homo sapiens
  source 1..201: mol_type = unassigned DNA
ctccagggcgcagggccacgagctcccgctcccaccctcggcccctggcacccggcgccggctccgccgccctctctcacacgcacccttggcagggccccgcggggcgccccaaagcttgggggcagctcccaggtgtctctgggaagggaaagaaaggccacaaagcaaaagaaggagcaaagagaaggcgagggagga

SEQ ID NO: 2804 - DNA, 261 bp, Homo sapiens
  source 1..261: mol_type = unassigned DNA
tcgcccaccgatgagccgccgccgcccgcgcccgggtgcaggtgcgccgccgccgcgtgcaggccgcccgcgtgtgcatgtccgtgtgcgtgtccgtgggcgcccagatgcggcggcggcgacggctccagctgcgcctcgtggccatcctcgtgcagcgcgtggtgcaggcccggccccgcgccgccaccgcccgccgccagcatcccggccaggccgccgccgccgccccccgggtaggccgcctgcgcgtacagcccg

SEQ ID NO: 2805 - DNA, 201 bp, Homo sapiens
  source 1..201: mol_type = unassigned DNA
cggtgtcctgggccgagccgcttggagatcctagatcagcatgtgggtgggaaagggcgccccgtcctgggcccccccgcccctgcgcgcagagcagagacgcgcagacccgctcccactccgcttggctcccttggagcagccccggcggcggcagcgatgggctgggaggggccggcacgctggcctgcgcgggtcccc

SEQ ID NO: 2806 - DNA, 337 bp, Homo sapiens
  source 1..337: mol_type = unassigned DNA
gaattggacaacaatgtggcgcctgccattggccaggggaggcagacggcgctctgattggccgggcccgcgcccggggagccccgcattctgcagtgtccgaaagattcgaaactccaaaagctccactgcgtgcctctgggaggggagggggcgcgccaggaaaggagtggaaaaaagtgggcgaggaggagcgttgaaaatttcctgacaagtagtttccgtgcgcccgagagcgtgtgaattgctcctaattaccgtgtccggtgcgcctctctgcgtagacttgtgtaacctctcggcttctggggcgccggctcggctgcaccgctcttac

SEQ ID NO: 2807 - DNA, 201 bp, Homo sapiens
  source 1..201: mol_type = unassigned DNA
tgaagttgtttccccgggacaggaagggttaaatggctgcgcgtcaactcggcctcgactggggtgtcagggagcaagagccgcttgtctcgggggattccgcttggggggttcccaggggtcgccctggcgctccggccacaacttgggcggctctgtgcggcggccctcgcctgcgcctttgcgcgccacccaaaactt

SEQ ID NO: 2808 - DNA, 201 bp, Homo sapiens
  source 1..201: mol_type = unassigned DNA
cagtaggcagtgcgggcacagtgttgcagaccaccacctcgccaggtccgggcagcgcccactagacggacaggcgcccgcggccgcccctaccccggcgcgcccacctcgagcctctcacgccgcggcgggcgggcgcaacatattctcctacctccagccgccgaggaccacactctccgctcagccctctcgactcat

SEQ ID NO: 2809 - DNA, 201 bp, Homo sapiens
  source 1..201: mol_type = unassigned DNA
ccctgaaccgctacctgctcatcacccgggcgcccgccacctaccaggcgctgtaccagaggcgccacacggcgggcatgctggcgctgtcctgggcgctcgccctgggcctcgtgctgctgctcccgccctgggcaccgcggcccggcgccgcgccaccgcgagtccactacccggcgctgctggccgccgcggcgctgc

SEQ ID NO: 2810 - DNA, 201 bp, Homo sapiens
  source 1..201: mol_type = unassigned DNA
gctccgtgcgctcagtcctgccgggcgtcggcgacgcggcggccgctgccgttgccgccacagccgtgcccgcagtgtcccaggcgcaactgggcacccgcgccgcgggccagcactggtaacctagccggggcccgagggaagcggagatccccggcttccgacgtccttgggcaccgtcgcctccttccctcctagggc

SEQ ID NO: 2811 - DNA, 386 bp, Homo sapiens
  source 1..386: mol_type = unassigned DNA
tgcttgttgaaaaacaacattgtgatcacttccagcggcgaagggtgtgcttgggaacggtttggggaggggacagaagagagaggggtgggatggacggcggcagaagtgggaggtacacgaggagttactggaaacggcgcttctgtggaggagccgggggggatggggagtagagggagggggccctgttgcctcagcgccccgaggtcgtggagcggcagcagctgcagccggagcagcaccagcaacagcaacagcgagcgggacggagttaggaccgctcggagcgcacaggtctcgaggtagtataaggtttgctatccttccacttgctggcagttgcagaagaagatctgctttttaagtgaaacgtacatgccacc

SEQ ID NO: 2812 - DNA, 201 bp, Homo sapiens
  source 1..201: mol_type = unassigned DNA
aggccacataggggccgggtgcaggccccacgcggaaaggcgcgcagtgctcggggtccatgccggctcagggcgcacaggcctccggggctccggggctcgcgctgcccgcgccgcctgtgagcgcccgccaagggggagggacctgggcgcgggggcgcggagcccccgggagcggcgcgcgccgcggggggcgggggg

SEQ ID NO: 2813 - DNA, 201 bp, Homo sapiens
  source 1..201: mol_type = unassigned DNA
tgccagggcgcagggagggcggcactcggccccagtcttcgcaatcccgcgcgctctctccgccgtgggacctgggtccccgcgccgctcccctgagccccgagcgcgcggcgggcgggagccaggttgggactggtggtgaggcagggagtgaggagcgagcggagtcgcgtgcgccggcgcgcagctccgggtcgcccc

SEQ ID NO: 2814 - DNA, 309 bp, Homo sapiens
  source 1..309: mol_type = unassigned DNA
cctgggccgcggcggttcccacctcgccaccgccgccgccgccgcacggctgcccgtcgcgaacaagcaccggcaccaccacgcgacgcagcaggccgggcgcggcgtgcagctcggcggatgctgccaggtcaggcgactccgccgcccctggagcgcgagcgcgcttcagcttgtagcgatgattctggaaccagatcttgacctgcgtgggcgtgaggcgaagcaggctcgccagctgctcgcgctcgggcgcagacaggtaccgctgctgccggaagcgccgctccaactccagcgtctgcgcct

SEQ ID NO: 2815 - DNA, 203 bp, Homo sapiens
  source 1..203: mol_type = unassigned DNA
caccctgccctcggtcggtgacccgctgtggtccccaggccaagtgttcttcgtgcccgggcggctgacgctgtctgaagcccacgcggcgtgccggcgacgcggcgccgtggtggccaaggttgggcacctctacgccgcctggaagttttcggggctagaccagtgcgacggcggctggctggctgacggcagtgtgcgct

SEQ ID NO: 2816 - DNA, 388 bp, Homo sapiens
  source 1..388: mol_type = unassigned DNA
accgggaagcagcccggtgttccaagccttttgagattctccggacctgcgcgccgcccgctcggcagggggctcggcaggcgcgggcggcgggtgggggcgggaggctctgcccgctcggtggctgccgcggcctcctccgcgctgctctccacgcctggcttattatgcacgaggcaggcaatttgccttcctccccggggacccatctcggagacaagaaggtagtttgttctctgtaatggcttctgctggagtgcggcggggcccaggcgcgagcgggggcacgggcggggagttggcagcgaaggatgcgcccggcgccccccggcggccgcccggagcccgaggtcggcgcgggaggagcgctgactccgcgggccgagcc

SEQ ID NO: 2817 - DNA, 241 bp, Homo sapiens
  source 1..241: mol_type = unassigned DNA
gagggcggcgcgcagcggcgctccgcgaggtccccacgccgggcgatatggggtgcctgctgtttctgctgctctgggcgctcctccaggcttggggaagcgctgaaggtgggtggaacgagggcgcttgagtgcactcgcgggagggcggagagagggagctgggtagggacggggagggcaacgcctgatggggactggtgagacccgggacgcactggcgcgatctaggtagaaaact

SEQ ID NO: 2818 - DNA, 232 bp, Homo sapiens
  source 1..232: mol_type = unassigned DNA
gggctctttatctgcattttctcataaaactgccgtccgtgtgtgtttctgcgcctggcctcttgcatttctaaggggcctttgaagacagggccgaatgcgcgcgggggcttcaggcactttgcgctccacggcgggtcccgcagcccggcccgagccggccctggaagcttcgccctggactagactggcaccgacgccgcccccagcctgagcgctgagagggaaaacg

SEQ ID NO: 2819 - DNA, 214 bp, Homo sapiens
  source 1..214: mol_type = unassigned DNA
gaatcccttccagtgccgcaattaggaaagttttaaaaagtaaggaccctagacagacaagagatccatcctttcctttagcataagaaacaccccgcgccgcgccagccgaacgctgctcgcacaaggctatccgcccttcttggccgggacgcactcggtgccttccagctccccaccagaactggtccagggggcgcggaaacagagaggc

SEQ ID NO: 2820 - DNA, 250 bp, Homo sapiens
  source 1..250: mol_type = unassigned DNA
agcagggaccagctggtcgccggcccctcgggcaagatggggaaccgggagatggaggagctgatcccgctggtgaaccgtctgcaggacgcgttttcggcgctgggacagagctgcctgctggagctgccgcagatcgccgtggtgggcggccagagcgccggcaagagctcggtgctcgagaacttcgtgggcaggtaagcgcgcagggcgcggagtaaggatgcggcagtggggcgaccccgctgcg

SEQ ID NO: 2821 - DNA, 201 bp, Homo sapiens
  source 1..201: mol_type = unassigned DNA
ccaggaccctgcagacccggccgcggccgggccgagtgcctcccgccggggccttacgcccacggtccacgcttgcaacaccagggctgtacggcgggtccgcagctgggtctgcgcctgggactcggggctccctgcgctcctcgtgccgcaccccttgccttaaccccaagcggacgggtcctggggcttcaccggcca

SEQ ID NO: 2822 - DNA, 467 bp, Homo sapiens
  source 1..467: mol_type = unassigned DNA
tcgtttcttctcacgctcccccccccgccccctcccgcgtccagccccgctctccccaccttgtaaaacaaagccggggaaaatgcctgcccgtgcagctcggagcgcgcagcccgtctctgaataagaagtgagtacaatggcgtgtttgtaaaaaaaagcttcaagtccgtctttttcaaaaaacattttgaatgctgcatgcctcatgcttcccagcgcctcgcgggagagacccggctatagagcaggaggtgagaccccccctccggtacccccacccctctggccgcacgctctcctgccccagccttttctgggaggactgcaaatgccccctctcagcaagcggccgtttcccatcttcgcttcgcgtccaaagtgttgggtcataatctggatttggaggcaaacccttgccagatcctctccacgccgcttctcccccctctcccgccggtgcccgg

SEQ ID NO: 2823 - DNA, 201 bp, Homo sapiens
  source 1..201: mol_type = unassigned DNA
ctcgaggggctcacagcttggcactaatttgcaggtgttcgctgctgatttggtttcttcttcgatttgcggacggttccctccagcgactctcgacacacgttttcctgtcttcgccggagggccgggtctggggtcgccggagcctgcgggaatccagcgcttattcgctgaccctcgagtcgcttcgctagctgtgcg

SEQ ID NO: 2824 - DNA, 232 bp, Homo sapiens
  source 1..232: mol_type = unassigned DNA
ctggggtgctcccaggaagtgaaggaaaaggtccccgacgacattgtcactggaaaagtgctggccacggcctccgccttaccctctccacccacgggttcggagcccccaggagcagtcagaccgatcaccgctcctgcagcctcatttgtttccggagagacacccacaagccagcccacggagagtctggactcgcccgccccagcacccacgcctcccccgcgcccgg

SEQ ID NO: 2825 - DNA, 222 bp, Homo sapiens
  source 1..222: mol_type = unassigned DNA
ggctagggacagcaaaggagacacgggtgggtgagacgccggaccctacgagggcctgctgcccttctggcgcgggcgtggaggcactggccagagggcacgcccactagcccgagactttcgggatgaggccatttcctgagtccacatctggacatccacctctccgaatgcggtgacctcattcataccacagcggtcatcagcgggcctgagatcgtg

SEQ ID NO: 2826 - DNA, 239 bp, Homo sapiens
  source 1..239: mol_type = unassigned DNA
ggcttccaggcggagcgcgggcgcgaggtgcgggctccggggcggagcgcacgcccgggaggcgggaagtgggcagcagcgcccccgcctggcccctgtgcgccccgacccgacgcctccccgcccgaccaggtgcctcgagagcgcacagctgggagggctctcccggtcgcggcgagactcacgcctgcggtgtgctagggcggcggcgacggtgacgggcgtggggcgcggcgctg

SEQ ID NO: 2827 - DNA, 209 bp, Homo sapiens
  source 1..209: mol_type = unassigned DNA
cgccccgggggtccctgcaccctagccggggaatgctgccaccctgaggggggctgtctggctgcggggcgccggggctgggggtactgctcccccaggacgcggctccgcagtgcagagcgccgccgcctgcgtggggggatctggcagcttcaggggctgccctgagctccctggcgagcaggagtgagctgctgcggcgagtgagc

SEQ ID NO: 2828 - DNA, 380 bp, Homo sapiens
  source 1..380: mol_type = unassigned DNA
gaggccgggcctcggcgacccccgagggaggcccgggaaccacccccgacccaggcgccagacccggagtcgcacggggctcccagtccagccccgcgagcggctgctgaccgcccctcccgcgctcgccagggcccctgccccgcgtcagccaccgcgcgccttccccctgcccatgccgcagcccccgtggcttttgttctggactcgggatgccaggttgagacacgtcctgcaaacctctggcagaaatgggcgcaagggggtggatttcgttttcgcctcccgggctttttctttctccccgctcacatgccttctcattactcctcttcctctctcccattgcactttgatgaaatggttttgtctgtctaaac

SEQ ID NO: 2829 - DNA, 394 bp, Homo sapiens
  source 1..394: mol_type = unassigned DNA
cgggtcggcagggaccaagagcctgaaagggaacctgccctcccctccccgcagcccggtcattaaggcaagaaactgcaggcagagaagcccccgaatccgacctaggacgtcggcgcctgccaggatcccctcgcctgccccccgcgccccgcgcgcgctcatgccaccaccacggggagggtgcatgcggcaggtgcctggccgaggcccccgggagcgagtcgcccttacgtgctccagcttgtctttcctccgaagccagacgctggcgctgtagtcctgctgcttgacgctgctgtagaagttcgcgcccactcgggtcaggcttggggagggctccttggggcggcttttgagcctcatctgctcgaagccctcatggggggaggcc

SEQ ID NO: 2830 - DNA, 201 bp, Homo sapiens
  source 1..201: mol_type = unassigned DNA
cttcgtccgggtccctcaaacatgtcgcagcgtggctgctcactgtcccctctgggcaagaggaggccccagacatttccacgggatctgaactcccgagcgccctgcacggagcagccatcccgccagcaccccaaagtgaagctgctcacaacggacaagcccggagaccccatgagaggccggggtggagaagccggg

SEQ ID NO: 2831 - DNA, 557 bp, Homo sapiens
  source 1..557: mol_type = unassigned DNA
gtcgccatcgttcagcctcgctgcccaggtgggaggggtcacctgccgcggggtctccaagccagtgccgcttgctcccggcccccacccactgacagcacggcgtccgagtgaccctgtctagcctcgttctgcgctcctgcaaaccacgttgctgcgctaactacaaacctggccaacatgtctttgtaaccctatcatttaaaaacgcttccaggcacctggccgctgccagatcaggttcgcgggcccggaggaggtcctcccacctgcccccgccagccccggggaccgtgcgcggcctccgtgtggcccccgcccacgaggtccctcgggcaggaaccgccgcgcgacctctgttcagcggccgcgtcctggccacgggcgacccctgtcgggaaccctgttcccggctaagctgcgttcccgcattccggtggctctcacccgagctcgcgtttgctggctttccctctggctcctctgcctgaccccgattttgtctccgaactccactcccagatcctccccgccctggaacgccgacctttcccccg

SEQ ID NO: 2832 - DNA, 212 bp, Homo sapiens
  source 1..212: mol_type = unassigned DNA
agctgggttttttcccacctcaaaacctttattttcagtttttaaaagccaccttagcccgccatattgaaactggcacggtttctaaagactccttccccgcagttgtggcgcttccaagaaaacacgagtacggatcaggctctggatgagtgtccggccaccgagaatcagccacttcccaccctccaggatcccccagctccctccag

SEQ ID NO: 2833 - DNA, 201 bp, Homo sapiens
  source 1..201: mol_type = unassigned DNA
tttccaatggctcagtcgaccgtgtgcacaaacttgcgctttatccgccggggatcgctgggagcggagataaattcaatccccagggcaatcttggccccgcccgccccaccccatcctgtgcttaaatagagcctttcttgaagctgcgaacatttccaggccccttgggcagggctggaggggccgaggagagctatt

SEQ ID NO: 2834 - DNA, 201 bp, Homo sapiens
  source 1..201: mol_type = unassigned DNA
tcctggacaacaatgcgcgcccccgcccccccagaaagccagggacgcccccagtcgccgccagagctggctcggcttcccagcccctctccgtggcacccgcaggcgagacaaagttcgctcccggtgaggctgcgcgcgtccaaagcgtgcgggatgcccagcacggaggtccccaagcgggggacccctggctccccc

SEQ ID NO: 2835 - DNA, 294 bp, Homo sapiens
  source 1..294: mol_type = unassigned DNA
ggcagatgacgattcgccgagctcgccgcctgtcctcccggaggcgctcggagctgctgcgggctccggtcgccgctgccactgctgctgccgccgccgccgcgcggggtcacctgaaggttggggcgcggaagctcaactccgtgctgattgggctccaagttttctgcgccctcgcctcgtcccgagtgcccgcgaatcccccggacgcccacgcagaccacccagccacaccacaactctgcctgcggagagaggagaggagaaaaaggggccgcttcaaaaactttcaaa

SEQ ID NO: 2836 - DNA, 244 bp, Homo sapiens
  source 1..244: mol_type = unassigned DNA
tagtcttgagccggttgtcggccaggtgctgggcacacccgcgccgccgtcgccgctcgcccttggccgcgccagccgcagggtcctcggcgcccgggggcggcagcaggttggagcgcaccgtgcgcgtcctgccctctcggcgcctccgccgtcccggaggcccgggctcctcggtccccgccggctcccgctccatggccgcgtgtcgccgcgcccggctcctccgccgctcacgcccgcc

SEQ ID NO: 2837 - DNA, 303 bp, Homo sapiens
  source 1..303: mol_type = unassigned DNA
ggtctggggccatgggaacaggatcaaggccccctgagcgccgggcctggcttctgtggcttcgcaaacttttcagcctgtgtgccacggcgacgcgcagcggctgagtcggagcccacgcggcgcgcgcctcccgcgaggaacttttcggcttgtaggctgcttgtcactctcgctttccgacgcgcctccccctggctcgcgctcccggagttccctcccctcctggcgaggacctttcccggcgcccgcggctccgatccccgccgcgctgcgcccgctctcccggccccggctgccccg

SEQ ID NO: 2838 - DNA, 286 bp, Homo sapiens
  source 1..286: mol_type = unassigned DNA
aacagatccccgagctgaaaaaacaaaaacaaactggggagccagagcccctgaaagctccggtaggaaattcaatgggcctcctgttcctttaaactctcgctttcgcccccgctgacactttgcaaagccgcggcggcagcggcggggaccacgctgcggtgcaccaccttccgccaccctcccgcgctgggctggggtcgagggggcttcgcagagtcggtaaccgaaccggctctggtttgctttctccactccctagccactaccagaaccagcctccgcg

SEQ ID NO: 2839 - DNA, 261 bp, Homo sapiens
  source 1..261: mol_type = unassigned DNA
tggctgtggaattagatctgttttgaacccagtggagcgcatcgctggggctcggaagtcaccgtccgcgggcaccgggttggcgctgcccgagtggaaccgacagtttgcgagcctcggctgcaagtggcctctcctccccgcggttgttgttcagtgtcgggtgagggctgcgagtgtggcaagttgcaaagagagcctcagaggtccgaagagcgctgcgctcctactcgcgttcgcttcttcctcttctcggttccc

SEQ ID NO: 2840 - DNA, 201 bp, Homo sapiens
  source 1..201: mol_type = unassigned DNA
gaacgcgcagagagttccttggagtgccctgattttgtccccgagagggcccccaacctccgcatcctcttagtggctgtcctggcaggtgcgcgtcctgcggggagttgcgccccgggggctatcgccgagcgggagctgcctcctggaaccctgcccaccgcgaactgggtgcctactccccatttctgcctttcagtg

SEQ ID NO: 2841 - DNA, 201 bp, Homo sapiens
  source 1..201: mol_type = unassigned DNA
tcgcgtctcagcaccgagtgctccaagccctgcgcgcagcgccgggcttggaaggcggcgaatggctgcctagccgccgcccctactagtgacactcggccgccagcccccgcccaggatgtgcacatctgctggcagcactggcccgggtggcagtcaccgggccacccactccacaggtacaaccgcacccaatccaac

SEQ ID NO: 2842 - DNA, 201 bp, Homo sapiens
  source 1..201: mol_type = unassigned DNA
gcgccccgggaagtgcatggtcctaaggtccaaggcgccaggacccaggtccccagagccctcaatcagtgccattctcttccgcagcgcgggtgtcagccgcgagctcgtagcccctcgacacccgcctctctctggggtctccggggaccctttcagaggctgtaaaggtgtcagaagcccaaggcaggaggcagcttg

SEQ ID NO: 2843 - DNA, 201 bp, Homo sapiens
  source 1..201: mol_type = unassigned DNA
ccggcgccgtcgctgtcgctcgggccccgcgactcgggccgggctgtgggcgcgcggcaggcgggctgcggcggcggcgggacggggcggccgcgggttgcgtggggtttgtgcgcgcgtgtgcgcgggcgccggctgtgcgcgccgcgggcggacagggttcggccggcggcggtaaagttgggacccgcgggccgggcg

SEQ ID NO: 2844 - DNA, 201 bp, Homo sapiens
  source 1..201: mol_type = unassigned DNA
tgtcccggctgacctcgctctgcagccagcttgaggtcaggcggtcgctctctgcaggtcacaaaccctcggcgcaaaagtagggctttgaacgcgacaccgcaccagagcgcccagctaagcgagctgcctccacccccactgtgtcgggcggcgcaaactgcgggcgcaggcagaggagccgcggctctgcgccgggcg

SEQ ID NO: 2845 - DNA, 201 bp, Homo sapiens
  source 1..201: mol_type = unassigned DNA
ctgcggaggggccggtgggtcagagccaggccaggcagttgctgagccttcccctcccctcctggcgggagtgtgtgtgcaaggggccagggggcggagtcggagaaagggttgggggtgtccgtgtccagcgctcctccggacgcggctccacaatccagctgcgagaacagatggacgcagcggcggctcacctcgggg

SEQ ID NO: 2846 - DNA, 201 bp, Homo sapiens
  source 1..201: mol_type = unassigned DNA
cgcggctccccgtgggctggccgggccaatgagcgcgcggctgtaggggcggcgggcggggagggggcgccgagccctgcggatggaggcgcgggcagcgcggcgcgctcattccgcgcgggcgttgctggcggggggcggcgcagccactggacccggaccggggccgcgacccggggtggcgggtggcgtgggcggcgc

SEQ ID NO: 2847 - DNA, 201 bp, Homo sapiens
  source 1..201: mol_type = unassigned DNA
ttcgccgatccccagaggcaccggttgcgcttcctggtggcttggaacggcgcggagggcaagtttgctgtgacttgtcacgaccgcaccgcgcagcagccgcagcggcgcgagggggcccggctggggctggagcacaagcccgaggccgccgtgtccccgcccagctgggccggccggctctcggccgcggggttccgc

SEQ ID NO: 2848 - DNA, 344 bp, Homo sapiens
  source 1..344: mol_type = unassigned DNA
gccggccagagggcctacgcaagcctcgaaacccggggggacgcctcttccacccccatccctgcgctcgcccggggctgggcgcgccggggcgcacgcacgccggtttgctggcgacctggcgcatctgcccgcgcgccctggtctcagctgtcgcaggttcctcctgcacccacttccagtcttcaaagccagtgcagtcagcaccgtccacctggagccccaatcctctcctgcgattcccgcacacccactgcaccccatccaccacctccgggccgcgcaggtccgggcctgcgaagacacgcggcttacctccggccactccgttcatctggtcaaag

SEQ ID NO: 2849 - DNA, 201 bp, Homo sapiens
  source 1..201: mol_type = unassigned DNA
atccctccccgcggcgccccctcgcgcagcctccagactgttcagccggtgtccgcgggcgctcgctctctgcgagccccaggttcgcgcgagttgcctgcgggaggggtcggggacacggacagacgctgccctaccagggattcggaggacctggtgggcaagagcatgacccagcgactcccgcctcgggcaagcgcc

SEQ ID NO: 2850 - DNA, 218 bp, Homo sapiens
  source 1..218: mol_type = unassigned DNA
attattctctcccttgcccaaaggatttttcccttctttctgaccccacgaactcatctccccaacaggttcctaaagtatgggcggatgtgctccctctcgcccaccgccaggagccgagccccggcaggtgagcggtgcaaaacacgcacccagctgcccccagcttcctccgtccccgctgagttggctgtccccaccccgcaccacggcacccg

SEQ ID NO: 2851 - DNA, 234 bp, Homo sapiens
  source 1..234: mol_type = unassigned DNA
gcgcgccccgtgcgcccccgccccccgcgcgcccccggcccatccccgtccctggagagctgtcgcttgcgcccgggcgcgcggctggctgcctcctcggcggcggcggcggcggccccattagcggagcctccgcctatgattggcttcgcccgggaagctggagacgggcgatgaataattgatgtgtgcggtgcggtagccggacggcggcggcggtggcgggcagcagcg

SEQ ID NO: 2852 - DNA, 201 bp, Homo sapiens
  source 1..201: mol_type = unassigned DNA
cgggggcacccgggcaggggtgccagatacagtattgtatctggcaacctcccggggcgctcagtgtggttttcccacccgggagtctggaagggtctcccgcagcccgcaggagacgcagcgctccccgctcagggggagcaggaggacagctggccgctttcgggagccccaggcgcgaagcggcctctctccgcctca

SEQ ID NO: 2853 - DNA, 201 bp, Homo sapiens
  source 1..201: mol_type = unassigned DNA
agccatagtagtcgtactcctcgcagcgcgccggcgcccagtgcagcgcccccagcagcagcgccagcgcggccgtccgcacgcccccccccgccgccgccgcccgcatggctgcgccctctccaggtgcgcgccgcgcagccccccgacgctcggtgcccggcggcccaggtgttccggcgtgcgcccccggccctgact

SEQ ID NO: 2854 - DNA, 235 bp, Homo sapiens
  source 1..235: mol_type = unassigned DNA
ttccgcggcctgggggacgggagaatggggggtccacggccgccttgggtcctcaccgcgcaccgcgcccgcagcggagccccggagccatggccctgagcgagctggcgctggtccgctggctgcaggagagccgccgctcgcggaagctcatcctgttcatcgtgttcctggcgctgctgctggacaacatgctgctcactgtcgtgggtacgtgcggacagggcacccctgc

SEQ ID NO: 2855 - DNA, 201 bp, Homo sapiens
  source 1..201: mol_type = unassigned DNA
atccgtccaccttctacccctggctcatccaccgctaccgatatctgggtcatcgcttccaaggtacgtgccacgtcgcggaactgcagcgcgccgctcccgccgcatccttcactgcccccggcctgctccgggtgggcgcttggcaaggcctgggcggaggttcctccggctcgcgggccagcgcgccctgttgggaaa

SEQ ID NO: 2856 - DNA, 241 bp, Homo sapiens
  source 1..241: mol_type = unassigned DNA
gccaataacgggcgggctcttatagcccgaagccaaagcgccaaaatccgagggaaggcgaggagggggcggtggcggaggcggctgcggggccggggctcggctgagccttcgcctgcctaatcccatttgccattgtacgcgcccaatcgccgtatactccccgcatttaacttggatgacattttgatttcatcattagcatccggcgccggattgacgcagcctcgagccggggact

SEQ ID NO: 2857 - DNA, 201 bp, Homo sapiens
  source 1..201: mol_type = unassigned DNA
ggggcatttgcaccggggctgggcgggcgcacccagagccaggcgggcaggaacccctgcgcagccatccggtgcctgcatgtccctggcgcggaagggacgcctcaccagcctcggcgccccctccccctagatttcctccccgcccctccccactgcctgcctgctgcaccaccttccacccagatcacccagatcgtc

SEQ ID NO: 2858 - DNA, 201 bp, Homo sapiens
  source 1..201: mol_type = unassigned DNA
ggccggcgcgcgtgggccccggcgaggcggcgctgcaggagctttgcgggcagctggagcgctacctgggcgcggcggcccacggctgtggcggcgccaccgtgcgcgacgctctcttcgcggctaagggccgcgcggccgactgcgagagcccgcgcgagtttcgggagcgggccctgcgcgcctgatgggtcgaggcgg

SEQ ID NO: 2859 - DNA, 217 bp, Homo sapiens
  source 1..217: mol_type = unassigned DNA
ccggcggcgagcgctgcaccatcccacgcgggcgccgagccggggccgggcgtcgcgaccggagggatttcctgcctcggcgagtcagctccggagccctcgcgcagcgcccgcgccgccgctgagctcttctagcctttcatttttaaaaaagtttccccccgtgtgtgtgcgtgcgtgcgcgcgcgcgcgccgttctggcacaagccagccttga

SEQ ID NO: 2860 - DNA, 201 bp, Homo sapiens
  source 1..201: mol_type = unassigned DNA
cagggtcccgaccctccgtggggtacgcgcgacttcggcgcagatgtcagtccgctgccttccgggttgagggagcgaggactccagacgaccccagggccgctgtccaggcccagccccgcgttctccacctcgccacctcgctctgcggctccagcctggagatctacggacttcattgcgatctcttgcgcagtgtag

SEQ ID NO: 2861 - DNA, 201 bp, Homo sapiens
  source 1..201: mol_type = unassigned DNA
caaatgggccaaacaggttcgtaaggcccccgcgggtcccctggcccggaagttgagccgcgggtgcctggtctgaagttccgcgccccacagtggcccgcgggcctcggcggctcctgccctacgccctccaaggcaccaggcaggtggccccagggcctttgcccacgacaccccctgggtggggcaggaccacccctc

SEQ ID NO: 2862 - DNA, 201 bp, Homo sapiens
  source 1..201: mol_type = unassigned DNA
tgcagtccgcccggcggcgttttcgggcgagggtctggtgctggggagcgagcgcggagcgaggtgtctctttaaatacgctctgcagtgtgacggcggccgcccggctggaagagccatccccaccctgcggcaggagcccgcccgccgccatcgcccgccccggtccccatggttacgcgcctgcctccggccccgggt

SEQ ID NO: 2863 - DNA, 317 bp, Homo sapiens
  source 1..317: mol_type = unassigned DNA
cgcgctctgtcaccaggcgctgcagctgctggccgagctctgtgcccgtggggccctggagcacgacagctgccaggatttcatttaccacctgcgggaccgtgccagaccccggctccgcgacccaggtgagtgccgccaccgccgcctggagggacctaagggccctgggctgggacttggggccgcaccggggcctgaggcagaacagcgacgcggactgggagagggcggggggcggccaccgagccaggagagtgatcaagaaccagcgcactgtggcctgatgctgtaaccaggcggggacccgggcggtg

SEQ ID NO: 2864 - DNA, 221 bp, Homo sapiens
  source 1..221: mol_type = unassigned DNA
tctgcactgtggagtacgccatgactgctcacggtggtcgcaggtgcagacgccagccggaaccggaaccggaaccggagcacgggctgccgctcccgaccgaaccgcgggcggcgcggacggcgtcgcgcgagggacaaggtgcgcgaggcgcacgcatcttcacctccactgtcgggagttgacctgctcctcccgcgtggttacccgtcgctgtaaat

SEQ ID NO: 2865 - DNA, 201 bp, Homo sapiens
  source 1..201: mol_type = unassigned DNA
ccgagagccctgcggcgcccgccctcctgctggcggacgtgccttctgagtcgcctccgcgcaggcaagaggctgccgcccccagcgagggagagagcagcggcgaccccacccagtcaccggacgccgccccgcagtgccctgcgggtgcgaaccccaacccgatataccaggtgctctgaggggatggtggccgcccac

SEQ ID NO: 2866 - DNA, 201 bp, Homo sapiens
  source 1..201: mol_type = unassigned DNA
gcaggggagagcgagcatgttcctgccccgggcgccgtgcggtcgcagcagcagcgcggccctctccagtgcgagccgtgcctggaatgtctcgggtaagcgaagggccagcaagcgaggcgaaacggacactataaagcagagagtggtgtgagcttccccgccctctgaaaagatggcaagtctccgtttcgggaaggc

SEQ ID NO: 2867 - DNA, 201 bp, Homo sapiens
  source 1..201: mol_type = unassigned DNA
gagccccacgccgccgccgccgcgccagcggtggggggcgggctgggggcggggcggccggggctgccttcccgggcgcatatgcgagcgcagcacccggcgctgccgagccacctcccccgccgcccgctagcaagtttggcggctccaagccaggcgcgcctcaggatccaggctcatttgcttccacctagcttcggt

SEQ ID NO: 2868 - DNA, 201 bp, Homo sapiens
  source 1..201: mol_type = unassigned DNA
gggcatagccacggcaattcccagtctgctaatgccaaggcgggcgcgtaaggccgcctaaatctagacctccctcctcactcatttcaaaaaataacaacgtgccagccacctccgcagataccgccggctggtgcttgcccaggagacgccagggccagagcgccactcccagcatcgaaatggcagagagaaagcgca

SEQ ID NO: 2869 - DNA, 230 bp, Homo sapiens
  source 1..230: mol_type = unassigned DNA
ccggtgtctcctcccggccgctctacccagcaactttccgtgctttgttccccgactggaaatgctttacggaagcgtcttggacagggtctccgccaggcgacaagagctcggtgctgagatgtgttacgttctcatctccccatcaattatggatggaaacaaataaggaagagtcaattttgctgagccccttctccggcaacgagaggcgttctgcagccgggagg

SEQ ID NO: 2870 - DNA, 201 bp, Homo sapiens
  source 1..201: mol_type = unassigned DNA
gcttccccgagctggccgcccttgcagacccccacgctcagctgctacagcgccgcctcgacttcctcgccaagcacattttgcactgtaaggccaagtacggccgccggtctgggacttagtgtcaccgggaggaaaagagagagatctggggctggggtatggatgatggggggaagggcggtcgcctctgccactgtc

SEQ ID NO: 2871 - DNA, 201 bp, Homo sapiens
  source 1..201: mol_type = unassigned DNA
ccgcagacgccggaggcgccatggccgccaagcccggcgagctgatgggcatctgctccagttaccaggcggtgatgccgcacttcgtgtgcctggccgacgagttcccgcagcccgtgcggcccgccaagctgcccaagggccggggccggctgcggcggccgcgccagtctcgcttcaagacgcagccggtgaccttcg

SEQ ID NO: 2872 - DNA, 201 bp, Homo sapiens
  source 1..201: mol_type = unassigned DNA
gcagctccaggaagtcgcagtcgccgccgtcgtccaggtagagcagcagcgcgcgcgtggcgttggtgcgcaggctgaagctgagctcgccgctgctcgccgcgcccgcccagcgcgcgtagcgagcccactgcccggggccgccgccgaactccaggccgtccgcgcgcgccgccagcgccagcagcagcagcaacagca

SEQ ID NO: 2873 - DNA, 201 bp, Homo sapiens
  source 1..201: mol_type = unassigned DNA
aagctcctatcccttggacccgggcctggcgcccccgcccccggcgcgtcctcacccggcggacgcggccgcgcacaaggcccagcacggcccgcgtccccgcagcccggccgcggttgaacatctccagcgcgaagcgggtgggcgccagcagctccggggacggcggcccccaggcctgaaagctggcggctcggggct

SEQ ID NO: 2874 - DNA, 201 bp, Homo sapiens
  source 1..201: mol_type = unassigned DNA
ggttccccagcctgggccaggccggggcgcgtgtctcgggccccctgtggctgcaccgcgcgccctgtgcccacgggcgaaggcgctggaattcggcgctcggagcccgagtttctgaaggcgggaggcggcgcccgacctcaggggttgcgctgggctgccggagccaagagtgtctgcgtccccagccccgcgtcagaa

SEQ ID NO: 2875 - DNA, 201 bp, Homo sapiens
  source 1..201: mol_type = unassigned DNA
tcagagtgtgactgagcgggttggcccggcggccgttgccccccgcccccgccccttcgcgcctggccgcgccactcactgtcgcgggtgtccgcgtgcgcgccgccgatgcggccgtcggggagcgcctggaggtggaagccgatgcccacgttgcagtagagccgccgcagccgcttgatgcccagcaggtagtcgccg

SEQ ID NO: 2876 - DNA, 201 bp, Homo sapiens
  source 1..201: mol_type = unassigned DNA
cattcagaaaatggaaagctgagtggtcgatgaaccggaactgggagcagctttctatgaatcagagaaaatgcaagttaaaaggagacaccatttcccacgcattagactggtaaatatcaggaaataccaagtcttgctgaggaggaggggcccagggagttctcacaccatgtgggtgggattgtaacttggtacaac

SEQ ID NO: 2877 - DNA, 201 bp, Homo sapiens
  source 1..201: mol_type = unassigned DNA
tctccgggacggacgctccaggcgcggcgccgagtggaggcgagggggctgcggagggggaaggggccacgcgggccacggggtttaacccctgactccccgcgacgccaagaatgcaggagggcagagttgagggagacctcaggtggaactttcaggtggggaaggctgagctgtcggggctgcgggtaccgggaaggc

SEQ ID NO: 2878 - DNA, 201 bp, Homo sapiens
  source 1..201: mol_type = unassigned DNA
ccgccgccgcctgcccgggacggctccgtgaagaaggacggaggcagattgcgtgcccgcagcgggaccttcctggcccctgggatcgccgtggcccccgcggggcctgccacgtcccctcccgcgcccccagtgcccgcacctcctagcccggccgccggcgcagccacctcaccccccgccggctcggcacccccgggg

SEQ ID NO: 2879 - DNA, 268 bp, Homo sapiens
  source 1..268: mol_type = unassigned DNA
gcggccagacttcggctttgcaagctggcggccgcggcggcctgcgacgcctcccgccggggggcagccttgccgtgggccggggccgcgactgtcggggcgctaggggcggccagcggccgtttggctggcgtgtcggcggcgctcggggagggcgggccggggggcgcggcgcccatgaggccgctgcagcgcttgatctgcttctgcaggtacttgcggtggttcaccttccgcttcgacttgcccggcttgtccagcgccagct

SEQ ID NO: 2880 - DNA, 614 bp, Homo sapiens
  source 1..614: mol_type = unassigned DNA
agagtcatcctgcccgttgttctggatcttgaaacttgggagacccacaccaaaggagggaaccggttcctttaccctttaagcgcgtcgtgtcctccaccgcctcttctcttggcccgactggctctggtttccttcacgttcccagcctccaaattggcgtccgccccatggctcgtgtaggacgctaaaagcacggtaaatcccagggcgatctccagcagacgccctcgacgcatgatgccgagccgccaccggctcccgccgcctcttgccgcgcccggggctcggtctgcggccgccgctgcgccctgaagcgcaccgcgccgccggggtcccgctatcccgccgcccgtcccccgggccgggctcctcccgccttctccaggcgctgctcccacttcaggcggcccctgccagctgcaacacagagacaaatccccgaggcggggagactttcagggcatcgggatgctgaagcctcgcggtccccattcccaagcccaacccgtgcgccgcctgcgcgtggcgcagttaatttgggtaagggaagaccgtttggtccacagctggctggaaagcccaggcccccggcggcagcagccccggccgat

SEQ ID NO: 2881 - DNA, 201 bp, Homo sapiens
  source 1..201: mol_type = unassigned DNA
gggcaccagctccgagctcaggccccactcccgggcggttcgggacgaatcccctctacaggccagtgtgtgtgcagggcaagtgtagggggctgaggggcgctggcggggaggcagtagaggtggcctggaccatcttggcgcggcgcgcggtgagcgcgaggattccgccagtgggagtcgctgagctaaagtgcatct

SEQ ID NO: 2882 - DNA, 201 bp, Homo sapiens
  source 1..201: mol_type = unassigned DNA
ctcgcggcgacggtgacgcgctctggctctgacaagcctggctccccccaccctaccgggtggcgccgttgctgaccccacgcccagccgttcccactcccgcctgaaactcctccgacagggcttcgcttcgggggctcagtccccagcgcgtacacactcgcgtggtgtcggcttagcctcttgtaaaggaagcagggc

SEQ ID NO: 2883 - DNA, 201 bp, Homo sapiens
  source 1..201: mol_type = unassigned DNA
ttgcagccagccggcggtccaggtaagagacaaggtgtgagtaaaggcttctgatggccgggtggcctgacggccaggtgcgagtggggaggacagctcacgcggcctgagcagccacccctggccatagctccagcccccgcccctgcccccggcccctgccctggcttgcttgcgcgctacctcgctactccgcagtgc

SEQ ID NO: 2884 - DNA, 201 bp, Homo sapiens
  source 1..201: mol_type = unassigned DNA
cgctcggccgccgcctccagccaactcgggtccctcccacggcgaccaatcagtgcgaagctggctgggcgggaagccgcgagaggcttttattgcggcgcgggtggcggccaggagctgccaggacagtctcccggtgcttcagcctaacggtctcgctcactcaccgccaagagaaaccccgccctgcggccggtcccc

SEQ ID NO: 2885 - DNA, 201 bp, Homo sapiens
  source 1..201: mol_type = unassigned DNA
cgggtactgcgaactgccgggcgatgctgtcgctgccgccgtgatacggagagcaacagttccccagcaacacccctccccgacacaggcacacaccccccgacaggcacgcacacccaccccacagtgcccggctcggctgcggtgagtgaggggccgggaagaggcgcaccgcccagcgagcgccgcgcgccggggctt

SEQ ID NO: 2886 - DNA, 261 bp, Homo sapiens
  source 1..261: mol_type = unassigned DNA
ggaccggcggtgacaccggagctcgccgtgcgctcccggccgctctcggtgggtgccggtctctgcacctgatgcgttcgggatgcctttcccaccctggcgcgcccgccgctagctcgcacagcgcctcgcacactcccgcacgcgcttgaaatgcgcacggtcccgccggcccgcggaaccacccggacgcacggagcgctccgcaccgactcgctcgccgcctccccgagacgctcgcaccgtgcttgggccgggcgc

SEQ ID NO: 2887 - DNA, 201 bp, Homo sapiens
  source 1..201: mol_type = unassigned DNA
cggccagggcaacagccagggcaaagggagagagaagccgccccggggcgagaaggagaaaagttagagggctgaacaggtgacgctgagcttgttggagcgtgtgtgctccaccacgcaagggcgcggagttcggccgcctcatctcccgccatctgcgcgcccgggggcacgtcctctgcgatagcctggaacccagac

SEQ ID NO: 2888 - DNA, 201 bp, Homo sapiens
  source 1..201: mol_type = unassigned DNA
gggcatcggtgccgacgccgcgagggcagcgcccgcggcgggaatactaatgcaccctaaagggcacggccgccgccgcagcaggtaattagctggaccgcggcggagcgcgcggaggtggctgctggctgcaaggactgcgcccagcctccgcctcgcccctcgaggctcccgcgtgggccggcgggcagtgcgtgggcc

SEQ ID NO: 2889 - DNA, 201 bp, Homo sapiens
  source 1..201: mol_type = unassigned DNA
cctcctgtcccggcctcgtgctcccgctggggactgtttgcggtgagtctgtcgcacgcacgtcagggccgaggcagtgatgcggggcagcgtgggaggacgggctgcggagcccgcgtcatcctgcctgtggggagcgctgtgcctgctctcctgccagcgcgcccagctgtcccggccgccgccacgcgggactgcctg

SEQ ID NO: 2890 - DNA, 201 bp, Homo sapiens
  source 1..201: mol_type = unassigned DNA
ggaaaatagggcatccggagtgcaggagattcctcagggccgcccccttctccgggggtgccctgaggaaccgcggcggggactcgccgctggcagcctgcgggtcctggtgccagcgcgcatgggcgggctgtgcggacgtggctggtcctccaaaggtttcagatcccgtccgggccgctcagtcccttaaagctgtgt

SEQ ID NO: 2891 - DNA, 219 bp, Homo sapiens
  source 1..219: mol_type = unassigned DNA
ccccgggccaggaagctgtcaggcaggggagggccagcgccagctgtggacgttccgggacagcccctcaccccagtccctgtccctgccctcggcgcggcgcaaacgcaaaagcctccgtggccgcagctccagccccggtggccgcccgacccccgtcgggaccccggctgcacccactggagaagcggcggctccgactcccgaggaggcggcggc

SEQ ID NO: 2892 - DNA, 268 bp, Homo sapiens
  source 1..268: mol_type = unassigned DNA
cctaccactgcctcttcctcccgctctctacctccctgcagcgccaagccggctccccaacctggtctgctgaacgcaaaccgctgagagtttgctgcaccgccccctggggcccctggctgccgagtcccgctaaggcaaagacgccagcaagcgaggaagcgcagcggaagaaaaacaagcgggcgcgcgaggggagccccaggagggctgccgagtggctggcaggcggctcccgcccctcccgggtggcctcgccggcggctga

SEQ ID NO: 2893 - DNA, 201 bp, Homo sapiens
  source 1..201: mol_type = unassigned DNA
tccttcggccccaggattggggagtgtgccgcggggccgagggtggggaacagccagagggagacgcgaaccaggccgctggcggagggctcagggggagcgcagaggcgacggcccccatgccggcggccaacatgatggagaaccggccgctgcccgccctgcaggtgcccgagccgcagggtgcgcccgagggcagcc

SEQ ID NO: 2894 - DNA, 517 bp, Homo sapiens
  source 1..517: mol_type = unassigned DNA
cagagcgcgggcctccgggtctcaccccgggaaaagtctgggtctgctctgcgctgttgcgtgctgcgctcctgggacctgctgactgtcctagagggaacgtcccgcggtagtgtcagttccctggggaccaggaagggcgactcttgcctgggagtcagtgcttgggccgtcgggtccgggtaagcgctgggggtttggctcgagaagatgcggataggtggcctagggcgccgcggatctccgccctctgcgggcaccgggagcccagggtcgaggcgcgccgccccgaggggccccttctcctaacaatgcgcccggaatggagtccgcgccctgacagcgcgggtcagcccgaaaccgcccagaatccgcttcgatgagtgggtgagccgctctgggagtctgccgcgtctcggcagcggagggcctgagtggaaaaattcttattggatgcactttttaatggttggtttgcctcggttttcgtccgagtcttccccggcagtaggcgctg

SEQ ID NO: 2895 - DNA, 226 bp, Homo sapiens
  source 1..226: mol_type = unassigned DNA
cgcgctctcccagccgcggccccctcccccgccgcttcctcttgctctcccagccccttcccccacgtgtggatgacgtcaaaattccgcgaaaaagccgcgtggtggctccccgagcggaggcgcgattccgccgcccagcggccccctcccgggggcgcctggagggggagaagggcggaggcggccggttccttctcctcccgggaggcaggaccccccgacg

SEQ ID NO: 2896 - DNA, 201 bp, Homo sapiens
  source 1..201: mol_type = unassigned DNA
tttccgggaggcgagccgcgggctgctgggcgcggaggctggagccgcgagaggttcggctgctgaagcggccactgcctcccagagccaggctccgcgccgcgcgtccccgccgccgccggcactgtgcacccacctactcctcggagattggggtaggggaaaaaagttttgaggcgctctcatctctgcctccggggt

SEQ ID NO: 2897 - DNA, 212 bp, Homo sapiens
  source 1..212: mol_type = unassigned DNA
tcccgggcgtctggcatcctcccctaccggggccccggcggcgcgcggcgtctgcccggaggggggctcgggcatggtgctgcggcagctggacccgccgcgagctccccgcgctccgccgccgcctgcgccgcggagttggcccagctgcaaataaacagcagtccccccgcctcccccggccatcgccacctcctccgccccactgcgca

SEQ ID NO: 2898 - DNA, 388 bp, Homo sapiens
  source 1..388: mol_type = unassigned DNA
ccctcccggttacctgtgctgcttccgccctggctgcccctgtcccgagggaagatgcccgagcacttctcccactccacctggccggcgaagcacagctcggtgacgatgtgcagagccttctggcacagactgttcactccgtcctccttgtggaaactcatcgtttggcttttctttcgttttctctttttttcccagttagccgtcttttcctcttcccgtacctctaacccctctggcgccctaagccatagtccgcccgcggtgactttggctggagattgcgccgctgagagccggcaactcttaggagccccacgttggccccatggcgggagcggagggcgtaggggaaggagaggcgcgcgaggaggctgcggctgcc

SEQ ID NO: 2899 - DNA, 201 bp, Homo sapiens
  source 1..201: mol_type = unassigned DNA
ctcctggatgccaaacccggtctagggagcccaggagccgttgcagcctcagctcttctccctccctctctcgatgacccgggcaatgccaacctcctttcgggattgaaagctctaaatccaaggtgctaagttgatgggcggtctttgctctcacccctcgatttcgggcgcgtgtcttgaaagacaggagagaaaaaa

SEQ ID NO: 2900 - DNA, 201 bp, Homo sapiens
  source 1..201: mol_type = unassigned DNA
ccgtggcactctcgctagagcccaagcagtcccccaggcgtggggtctggtggacgctggcctggagcgcccggagggcggggtgggggtgggggggacgcgctgtcgtctggggtgtctccgcgtactcctgttgggcgaaccctggctctccggtgttggttgtcacttgagcaactgatgggcttccaggggaagtaa

SEQ ID NO: 2901 - DNA, 212 bp, Homo sapiens
  source 1..212: mol_type = unassigned DNA
cccgccgcttcccccccaccccgccccccaccgccgcccttagccctcccccgggatgagagagagtcgcgctgcggagcaaccccagtggatgggtccgcgggggctgagcgggcggaggacgcgggaactccgtgacaccgaccagctgacgctgcccgcgtgaaaccagagccgggcatcagggcctcatctccactgtctctgcacct

SEQ ID NO: 2902 - DNA, 250 bp, Homo sapiens
  source 1..250: mol_type = unassigned DNA
caggagggtgggtgccagcctttcttcccatctctcgagcctcctccccggcgcccacgtgggcggagcagcgcgagggtgtgcgtggcaggggccgcggcggcgtgtgccgtgcgtggggtggggtgcgggctgggcggcctcgccttcgggccccgcgccgccggggcgcggcccccagctccatcttctttgccacctgggcggagatctgggggactgtgacctaccctgcggaagacacggaggg

SEQ ID NO: 2903 - DNA, 488 bp, Homo sapiens
  source 1..488: mol_type = unassigned DNA
acacgccccccgccagcctgggcgccgggctccgaacccccggtctgcaaacttgcgcatctcccctcgccgcgcccgccagacaacttggcgaacagctcgcccgcccgcaccccgcttccttcggcccttccttcaaatcccaaacgcaccgccgtgctccaaagaaggtgtccacgtcgcccccagaccccggagcgccccctctccacccccgggacttcccaggtcgctcactcctcccgccccccgcccagatctgagagggaccgaaaacacacccccgactcgggcagccagggccgaaactgtcaagaggagaaaaggtaaagcggaaggagggtggccataaacagatttttttgccccttcttaaaaggacactgccgctttaaaagtttctttcccgggcccccactccccgcatctccgtattttgggggagcgtatttaattgaggcaacgcagctttcctccagtgtttgcag

SEQ ID NO: 2904 - DNA, 201 bp, Homo sapiens
  source 1..201: mol_type = unassigned DNA
ggctgaggagaagggagggagagcagagggaggggggaacccggccgggggaggaggagagaggcgaggaggcggctctggcagcgcgcggcggcggcggcggtagcggcagcagcagcggcggtgcggagagcttggactgggagcccaaagctcggctgggcagcgggagaggaggagccgcaggagctgcagctctgc

SEQ ID NO: 2905 - DNA, 364 bp, Homo sapiens
  source 1..364: mol_type = unassigned DNA
tctcataatcaaggagtatggtggagctgggtcaatttcaggcacagcccagccgagtcaggcgaggtccagagagacctgactcgcctggcagcctcaacggacttgtccccgcagccgttgcggacctcccggtcgtcatggcgactgtgaaatgtggggtggggcgcatgcgttggaagccattcgcgcgggcagtccctgagtgtcccctcacgtgctccccagcgcgagcagcacccccgcctctgcgcttcccagagcgtgcagcttccggtgagggcagccccacgcacagccccccacaccctccccagcgcctgcagcctccggtgcgcgcaggccccaagcccacatgcgcagt

SEQ ID NO: 2906 - DNA, 220 bp, Homo sapiens
  source 1..220: mol_type = unassigned DNA
gcccccaccccgagcgcgcagctccacgcagcctctccacactctccccagcgcctgcagcacccccagtgcgcacagctctgccagtcgcttccccgggcgccgcccctgcaccacttcggcccataaccttgcggcgactgtctgaagaacttcccgtggtttcattcttttcttcgggtttagtcttagctgtgacattttaaccaaaagattacac

SEQ ID NO: 2907 - DNA, 201 bp, Homo sapiens
  source 1..201: mol_type = unassigned DNA
ccgccctccccgcctcgagcgatctcctgcctcagccttgcaggctccgcactgcagatgcctgctggcttccctgcgctcggcggctcccgcggtgccccgtaagtccccgtgaccctccagcaccagccggctgtgcgctccctgctcccacgggccggtcagccgcagacactcacccagctccgcgagctcagccgc

SEQ ID NO: 2908 - DNA, 201 bp, Homo sapiens
  source 1..201: mol_type = unassigned DNA
ggggcaccgcgttggcacctgcagggagcgattggtctggaagggtagagggcagacgggggcctgggtggggcagcggccaccccaggcgcggagaacccgctgcttccaccctctccccgcggacccccaccctgcggcctgtgtgctcggctttctccgcgtggcggggaagtgcgggtggctgcccgggccctcaga

SEQ ID NO: 2909 - DNA, 201 bp, Homo sapiens
  source 1..201: mol_type = unassigned DNA
gtgtcggcctccgaacgcaccccgaggcggggtgagggctggcagtcgcccctgcacccgccgctgcgagccgcgcccctcaaacccaggtatgggacctcggaaaatcgacccgctgccctgagtgctcaccacgtgaggaactggagtggccgagttcgccaaggcgccggggacacctgagcagatgagaactggagc

SEQ ID NO: 2910 - DNA, 358 bp, Homo sapiens
  source 1..358: mol_type = unassigned DNA
gcgcagcgcctgagcctgcgcttcgccaagtgcaccaagtacgagatccagagcgccatggagatcgtgctgtcctggggcctggccgcgcactgtacggcggctgcgctggccgcactgtccctctacaacatgagcagcgccggcggcgaccgcctgggccgcggcaagtcggcccgctgcggcctcaccttctccgtgggccgcgtgtatcgctggatggtggacagccgcgtggcgctgcgcatccacgagcacgccgccatctacctgacagcctgcatggagagcctcttccgggacatctactcgcgggtcgtggcctccggggtgccccggagctgcagtggccctgggt

SEQ ID NO: 2911 - DNA, 201 bp, Homo sapiens
  source 1..201: mol_type = unassigned DNA
ggagcccccgggcgcgccctgggcgcattggggaggtccccgggcgggcaggcggacgccctggggcggcgggcggcggctgccggggctcgccggggctcggccgcccgctgcccatcgataggtattaggaattgatctcgccgctgctctttgttcggttcagtcatcgattagctgccgcgaccatggagaagcgct

SEQ ID NO: 2912 - DNA, 328 bp, Homo sapiens
  source 1..328: mol_type = unassigned DNA
cgcagggagggagggggcatcgcctgtttctctgctcgaaaggtggaggtaaagagggatcccggaccccagagaggcttacaaccttccataagcaaggcggggggcggaattcagagaggtaaagtgacccgcccccaaatcgcaataccaggaggacagcagggctagatggaatctttcggttcacagtccccgacctcgggcaagtgccccactcgggcgcacggtctgctcccagaccagaaccaggcgcgctcgtagccaaggaagcttggcgggagactcctccgaggctcccggctcccaggccagcggggctaaggag

SEQ ID NO: 2913 - DNA, 201 bp, Homo sapiens
  source 1..201: mol_type = unassigned DNA
cgttcggtgaagccggtgcattcaccacatcctctgctgctcctagcagggaagccggcggtgaggcgggggagcaggcatggtggctccggggtttatgcggggtttactgcttacccagaatagcggctactgctgcctactagggcgcacctaccgctggagcctccgcggcgactgcccacctccaacacacacctc

SEQ ID NO: 2914 - DNA, 319 bp, Homo sapiens
  source 1..319: mol_type = unassigned DNA
tggagccggcggccgcgtccgcgccgctgctgcctggctcgctggcggcggggtcgggggctgccggagctgactccatgttttttcccaatgtagagatcgctggagatggcgagctccgagactccctctatcttctgttttcagagcaactctatggtaccaaaaaaaaaaaaaaaaaaaaaaaaaaaaaaaaaaaaaaaaaaagaaggagaaggcgaccggcgaaagcaggagggaaaaagcaggcggcggcgggcgggcaagcaaaagcgcgagggagcgcgcggagtgtctgggtggacgtgtgtgtgcgccc

SEQ ID NO: 2915 - DNA, 201 bp, Homo sapiens
  source 1..201: mol_type = unassigned DNA
accgcgggaggagagcgcaaggaggctcctcgcaaagttggaggccaggccggagcgatgttccgggagcggagccctcccagcctcgggcccccagccgcggacagctggcagtgccaaagactccgccattacctgcggctcgcagttgcgattcggccgcagagtcgggcaccgaggaaggcgtaaagttgagcttgg

SEQ ID NO: 2916 - DNA, 370 bp, Homo sapiens
  source 1..370: mol_type = unassigned DNA
agggcggcccggggtgggggcgcctcacctttgccctccatggcgtgcacgaagtccccctggtacagctggctgcgaagcttctcctccaggctgaagccgcggacgctgacgatctcctccacgtccgacaagtcctcgttctcgtcgtatcgctggcggtcaatcgggcgctgcgaggacccaaaccagagagcccgggacattattgtgggggctggaggtcgcctctcaacctgggcccagcactaacaggtgcagcagccgagcgccccctgcaccccaccattgcaacccaagcaactttgcgcaattgccaaagatgctgaaaagcaggacaaggagaggggcccgcaccccgagggtccag

SEQ ID NO: 2917 - DNA, 201 bp, Homo sapiens
  source 1..201: mol_type = unassigned DNA
gctatgttggaacttggaggggaggggggatgctggagaggcacacggtgatggacatggaaggacccgggaggtgtggagtggtgggcccggcccgtcgcgggaaggacacagagggacataggctgccctggagaggcgctttcggacatctggaggggcgcatagtgctgggacttggcggcgcctggggcggagggg

SEQ ID NO: 2918 - DNA, 201 bp, Homo sapiens
  source 1..201: mol_type = unassigned DNA
gtcccccgcccccacgccgcagcccgggccagcggggcccgccgcggtggcgttcgcggatgctgccgcattggccgctgcggcacggacggcgcagcctcgggcgcggcccggcacaggcgccggcggtccccgccagctagcagcccggcgaggcgctggcccacccatggtcctcgggcggcggcccctgcgcccagc

SEQ ID NO: 2919 - DNA, 201 bp, Homo sapiens
  source 1..201: mol_type = unassigned DNA
atccgctcgtccgtgggtgagctgggaggggcgcggcgagggagggtgggcccggggcgggggcggcgcggggcgcgcctgcggttatgcgacactgccccgcccgcgccccgctcccctccctgggctccctgggctctctgggctgcaggatccgccgacgcggcgcgctggccgcacgggggctgggcgtcgctgcac

SEQ ID NO: 2920 - DNA, 263 bp, Homo sapiens
  source 1..263: mol_type = unassigned DNA
tgggctactcgtgtcgcatgtcggcgcagttgcccgctgtggcaaggggggggcggccgggctccggagcgggccgggagggcgcggggcgcgcactccgcggcaggtgagcggcgcggctgcaggtgagcagcagcctcggctcgcgcgcccagctttccccgccgcgcccgcccggcccacacgctccccgcgcgcgcgccgcccccgccccgcgcgcgcccggccgcccgcccgcccgcgggatccccgcgaggccgcgc

SEQ ID NO: 2921 - DNA, 201 bp, Homo sapiens
  source 1..201: mol_type = unassigned DNA
gttttgttttctttgtttttaacgaattggtaagtaaaatattagttgttcaccctgaaatctgccctaaccacttccgtaccccctgaagctcgctgggcgcgccctgggctgtccttccctgagcagccgggcctagagtcaaggcgcgatgattgccgcgcaagctagggtccacgcggccggggctcctctcccgcc

SEQ ID NO: 2922 - DNA, 201 bp, Homo sapiens
  source 1..201: mol_type = unassigned DNA
cttcctaccccggcacctccttctggtgacgtcaaggggtcccccacccctcatccgcctccccacctaccctcttcttcctcccaggctcgcttccctgcggctacggagaggggcgggggccgacgagggcgggtggcccggggccgagcgcgcgtggggaggtgctggcgacgcgggcccgggagcgcggccccggca

SEQ ID NO: 2923 - DNA, 201 bp, Homo sapiens
  source 1..201: mol_type = unassigned DNA
ttactcagctctgggggccgcccgaaactggggaagggacaaggctgaagctccgccgcctggccctaggggcggaaagtccgatccaagggaagctggccgcgcctccgcgacggtgttcttggcacggaggactgaggcgcagtccggctgtctccccttgcctgctcttcccgcgctgtcccgccgctcctgacccct

SEQ ID NO: 2924 - DNA, 201 bp, Homo sapiens
  source 1..201: mol_type = unassigned DNA
cgcggggtcgggcggggaccggccgggggcgccgcgcgcccggtcgggttgactgtcgggggcgatttccgcggggcaaggcgggggcgcgggagcagcgcgcagctgcggggccattccacctgagcgccctgaggtcagggccggggcctgaggacacggcgctgggctccgggggacgcgggttcacgccggcgcccg

SEQ ID NO: 2925 - DNA, 215 bp, Homo sapiens
  source 1..215: mol_type = unassigned DNA
ccacactcaccgtcccgggcgcgccgtccgcgcgcggctccgctccgggccggcatcccccggctcggctgcctccggtccccgctccggcctcggttcccgctccgcagggctcggctccgcgatggtggccgcggcggcgagcgcggcagggagggcgtgtgtatgcgcgtgagagcgcgcagcgtgtgcatgtgcgtgtgcgcgggagggtc

SEQ ID NO: 2926 - DNA, 201 bp, Homo sapiens
  source 1..201: mol_type = unassigned DNA
cgcgagtgctccccaatggcagcgcgggcgtccccaaccgcgaggggctgcgctactaccggcgcctgctggagcggctgcgggagctgggcgtgcagcccgtggtcaccctgtaccactgggacctgccccagcgcctgcaggacgcctacggcggctgggccaaccgcgccctggccgaccacttcagggattacgcgg

SEQ ID NO: 2927 - DNA, 201 bp, Homo sapiens
  source 1..201: mol_type = unassigned DNA
gtgccagcagccccggggccgcccgcacgcaacgcccccgggtcgggccaggctggccagggcagggcggccgcctttcgaggaactgcgggcggggcggcggggccaagctgagcgcccgccctgccctcggcgccccgcggctgcgggcggagcgggctctgcggagtcccccggccgccctccccgcagctcccgtcc

SEQ ID NO: 2928 - DNA, 201 bp, Homo sapiens
  source 1..201: mol_type = unassigned DNA
ccaggttgtctgcagcgtcgccctgttcttctatttcagagcgcaggtgagtggccaccttcccaggggatcgcggctgagagcgcccatctccttcccccgcacttggaaactgagtctggcggcagggctgggccacccagagcttgcatattccggaagggaaagtgactccagaagggagagaggaagtgttgagtt

SEQ ID NO: 2929 - DNA, 217 bp, Homo sapiens
  source 1..217: mol_type = unassigned DNA
tgtagctggtgctgctcctgggacgatgtagacgccccatatccaggcgcgggtgccaggtcgccgggcaccagctcactcccagggcctgtgagctgcgcgcattccctcggccgcgcattccctgggaggctgcagtcagagcgctcttgaagggagggcggcagaagacactccctctcggttcatgcaaatcgctgggggaacttcagccaat

SEQ ID NO: 2930 - DNA, 317 bp, Homo sapiens
  source 1..317: mol_type = unassigned DNA
aagcgagcgaccctctgagcccgggtggtccggcgggcaagggcggcgcgggagacccgcagggcgcgggcgcggatccggggaaccagggccaccgctgcgggcggatgggggtcaccgaggcggctcgtctccaggcgcacacttcgcacatctctttgctaagtgaaggggccaaaatgcacagatgggggagtctacccaggaacagaggcgcgagacgtatagccacccctgggttgggagcacgagccagcagatccccggagcgcgttaaacggacaacatgcccggtgctgcaaatagaggcttttgct

SEQ ID NO: 2931 - DNA, 201 bp, Homo sapiens
  source 1..201: mol_type = unassigned DNA
tacccctgtgggggggagggtgcagcgaaggctgccagggaccccgcgatcgcgccttaacacgtattggagcgagtgtgcgagtgatcatgagtgtgagcgggtgcgagcgctcggcggggctgaccgtcacgttggcggggccggcggggccaggcagtcttctccgcgtccccctcctcccgctccgtgcctcccctc

SEQ ID NO: 2932 - DNA, 201 bp, Homo sapiens
  source 1..201: mol_type = unassigned DNA
acggtgccaagggattcagcctggcggacatcccctaccaggagatcgcaggtaagcgcgggcgcgctgcaggggcaggctgcagccctcggctgccgcacgtcccactggccgcccggcgtccccttccttccccctgttgctgagttggtgctcactttctgccaccgctatgggactccgcgtctccgtgttgggcgg

SEQ ID NO: 2933 - DNA, 201 bp, Homo sapiens
  source 1..201: mol_type = unassigned DNA
gcgccgcagcctcccgggcaccggcggcggtgaccaacctgtaaccccagcgctcagagctgtcatggtgcccgcgggcggcggcggcggcgacagtgggcgaccggcaggatcagtgccaggcgcggcgcccagggcgggcggggacgcgggcccctcacctacggcggctcagctcaggcagcgcgctcggcccggctg

SEQ ID NO: 2934 - DNA, 201 bp, Homo sapiens
  source 1..201: mol_type = unassigned DNA
gcggtgtgcacgggagtccgccgggcacacgcggggtacacttaagtgcactgccaggaggccgggagcccagcgtgcgagcgtgaggtcagactgtgcacggtaccgaggactagttccattcctgagtatgaaagggtgaaaccgttcacctcaagtttcaccccggagttattaaataatgaatgcatcagtcacact

SEQ ID NO: 2935 - DNA, 201 bp, Homo sapiens
  source 1..201: mol_type = unassigned DNA
gggctggccgcggacccggacggtcgggagcgggcgcggcggtcgcagagacggcctctccccgcgcggctccagcgcagaccccagacctggagccgtgcgggcggagacgcgcggggctcctctccgcttcgccgccgctgggtttccagcgccctcggacccgcgggaggacaggaaccatccggagtgaagctgcgc

SEQ ID NO: 2936 - DNA, 221 bp, Homo sapiens
  source 1..221: mol_type = unassigned DNA
ccgagacacaaagaccgaggctgagaccgccaggggttgagggtgaggccgcgtcccggggccgctggagcgcgggcgtcatgcgagactgtcccggctgcgcgccgccccagaggagtccgagcgcccccttcagccgcggcgcgctggccctggccgggactgcagccaggtgggcgccgcgcgtgtgagcgccgcgcgtgtgagcgcagacctggact

SEQ ID NO: 2937 - DNA, 311 bp, Homo sapiens
  source 1..311: mol_type = unassigned DNA
gaccactgccgaacagccgctggagacccgcagagaagggcgggccctgcgcccggggcgcctcggaggtaagttcggagagcccgggccgggcggagggcgggagcgcacgagtgtgtgtgtgtgtgtgtgtgttcgcggtgtgcccgcggctcggtgcacacgcgcgcgggttgtaaagtcaggagctgcgggagcgcctccctgcctcggcttggccccggagcattgcgggccgcggaggtgtgggggcccttgtcgctgcgctcagggcagcggcggaaaaggtgtgtgcggatgcggggcggggc

SEQ ID NO: 2938 - DNA, 308 bp, Homo sapiens
  source 1..308: mol_type = unassigned DNA
ctgagccgtagaaggctttttccgcgttctcctctagtagggattcctggacggggagaccgacgggtctgtgggcgcctccccgggacacacttcggcccgctctgcctgggctgggcccacttacgttctgggtggggctcaggaactgcgtgcgggcgtagcgggtgagcatgctgatgatgaccacctggccccactcctccacgtcgatcagcaggttacagagtttccggtagtttttgtgaatcaggtcgatgcgctccgggcagacctcctcaaaggccatcaccacactgcccgccacc

SEQ ID NO: 2939 - DNA, 201 bp, Homo sapiens
  source 1..201: mol_type = unassigned DNA
aatgtgacacagacaccagctcctcgtgctcttggctcccagggtttctttcaccgcgcctcagcacctgcagcttctccactcttacagcgcccgccgtcgtcaaggcaacagagggatgcccggtgacagactcggcgccggcttccggcgccgtaagagaagcgtccgcgcgggcgttctggacccgcagagttctcg

SEQ ID NO: 2940 - DNA, 201 bp, Homo sapiens
  source 1..201: mol_type = unassigned DNA
ttattccacttgagcgtggccaaactgttgctatttagtggggagcaaaaaaaaacaatttgcaccatcgaaacgagccagcaactggttgggaggcgggcggtagctgggccccgcgtgccctcggcggccggggtcctctccggggagaggcacacacacgcatagccggatcgcgcctcgccagggccggagtcacct

SEQ ID NO: 2941 - DNA, 201 bp, Homo sapiens
  source 1..201: mol_type = unassigned DNA
ggtgggagccgcgaggagcgcctagtggcgcggtctgccgggcatggtggccggctcggcgatcgctgactcgccgggtccgggggctctggaagcgaggcgcgctctccgactccgagactttgcagggttgcaacagacggtggggaggcaaaaaaaaaaaaggaaaaggaaaaaatggtgctaaagtcaccaagtccc

SEQ ID NO: 2942 - DNA, 630 bp, Homo sapiens
  source 1..630: mol_type = unassigned DNA
ccggttagtccatccccgcgctccgcaaacttttctaaccgggtaacaaagtgagcagcggtggccgccgcgattcctttaacttcgcattccggaggctcgagggggctctgggaccgagcggcctcgcagcggcgacagaaatacatattttacgaaaaagaaaaaaaaaaaaacgagtcgcgcgaacccgtcaagtcagatgtgcgcggcttgaagcggaggaggctctgacgtcagccccacctcgcgcagcccggcctggccgcagactcgccggtcactcgccggcggctcaggccgggaggggccaggacagtcccggccgcgcggtggacggaggggccattcctccgggcgttagcaaataaattccatccgagtcaatatcgcccagcgaacggtgtttctctttagtcacccgagaacgagaggcacttttaattagaaattaattaatgagcagctgctccttcccgccccactgtaatcattcgtctcaattacaaatgagacctatgaaaggacacgctgaagatgtaatcaacagttaaaattagcccggcgctgcgcaggcggccggcccggcctcgcgctggcgcgctctgctccgagtggcaggaaggggct

SEQ ID NO: 2943 - DNA, 201 bp, Homo sapiens
  source 1..201: mol_type = unassigned DNA
aaatgggaccagagcgcggagggagcctggccaggaggcctcctaggactcagccgcgacgctgaaaagcatgaagggtcggaattaggcactcatttagcgagcgttactaatccgaagttacagcgctaattccctgatccggccgctcccacacgcagcgccgggattagaggcgcggccgccgcccgccccgccctc

SEQ ID NO: 2944 - DNA, 239 bp, Homo sapiens
  source 1..239: mol_type = unassigned DNA
gaagaaatcgggtaaatagctgctcccaggcccgtgccacgagccctggcgggatctctccctccttctgtactctccaccctccgaccccctttgtgtgcgccgcgccccgctgtagctccgctggagagatggggacggtttggcagaaggtggcggcgacaggggcccgggacggtttggggagaggagggtgggggcgcggctgctgtggggtgtccccgggcggggttcacggg

SEQ ID NO: 2945 - DNA, 201 bp, Homo sapiens
  source 1..201: mol_type = unassigned DNA
tgtccagcctcccggaggagtactatgccttgacaccttcgtttcaccgccccaaagctggcctggggctccgtagggagtggcctgcatggggagggcccgcgtgctgtgtttctgggaggggtaagagagtgggggcgcagggggcgggccaggtccctgggcgcggcgcgggctcgggggacccgcgcggctgacgtc

SEQ ID NO: 2946 - DNA, 221 bp, Homo sapiens
  source 1..221: mol_type = unassigned DNA
ggcagttggcgcgcccgccctggccgcagcccggcttggggacccgctgcgtgccctggcaccagtgcgtggtgaggaaagcggtggtggcgaacagcagcgccagcaggttcagggccacggccaggagcgctcggccgcggcggctagtcttcatgccgcccgcgccgccgggacgggactgcaccgccggggagctccgcgcgcgaagttggcagctg

SEQ ID NO: 2947 - DNA, 201 bp, Homo sapiens
  source 1..201: mol_type = unassigned DNA
cagccccacgccggtccgcctcccgcccacggctcggcctccctcccgcctggctcggcgctcctccgccccgagttctccatcccctggatcccgggctcgcgggggcgcggagaagaggatccaggaaaggtttgggaacctgatgggtttgtggctggggggaggggcagttctcccgccaccccatcccctccccgc

SEQ ID NO: 2948 - DNA, 246 bp, Homo sapiens
  source 1..246: mol_type = unassigned DNA
tgggttttcttaggactcaccttatgtagtttccacatggcccccagagccttgacttcgtggctggagtgtttgccctcctccaagcactggtagcacacgggcatcttgcattgcacgcagtacatgctgtggttctccagctcgtggtctgtgcaggtggagaccttgcgtgggctcagcctccggctcacacgaccctgggccgggggcaccaggcggtgcttggctaggggcccccggggc

SEQ ID NO: 2949 - DNA, 223 bp, Homo sapiens
  source 1..223: mol_type = unassigned DNA
tgacactgggggcaggtgatacaggagttgcggggcaccggggccagggccggtgacaagtgggtggccggtggcggcatagccgggggaaacacgcggacgccgttgggggacttctggcacggggtagtgggggcgctggcgaaccccccgtaggagccatagccgctgtccgcctcgctgtataggctcatcttgtccaggtccagatagtcatagtcgg

SEQ ID NO: 2950 - DNA, 201 bp, Homo sapiens
  source 1..201: mol_type = unassigned DNA
gggcttctcgccagcgtttgcgtttggctcccagctctgagctccgcgcccacctaccgcgggcgagtgctgcgcagcacggaggacgccccttctcttccgctgctggcagccttcgcaggcgtctcacccgggcctaggcttctgcacggcagtggggcttttctccttctccgtgaatccgctgacgccgtgccctgg

SEQ ID NO: 2951 - DNA, 244 bp, Homo sapiens
  source 1..244: mol_type = unassigned DNA
tgcgcttacccgctgcacaacgcgtcccgccccggcctccagcccactctccgcgccgcgccagcctcgaacctggatctccgcgggcgcctgggcggggcgggactccaggcccacccagcaagctaattggctgaggccctcggctggggaccaatcaccggctctgagaaagttcggcagtggccaccacatctggttctcgttaacttttctaaggcagcggccgctggagcagcggggc

SEQ ID NO: 2952 - DNA, 201 bp, Homo sapiens
  source 1..201: mol_type = unassigned DNA
tcctcacccttggctgcctggcggggcttgaaagggcaggtggccctggcggcgcgccccgcgagggatgtggcagaagggcgtgcgcctggcgccgaggcggagggaccctcgatgccgtgtggcagcggggcctgccatcgcagcccttcgcgggcactgcccccaggcccagagccagccttcagcgagccgggcaaa

SEQ ID NO: 2953 - DNA, 457 bp, Homo sapiens
  source 1..457: mol_type = unassigned DNA
cccttccaaatatacgttcccttgcccgcggcccgccactcccgcccgggcctcgggctgtgcagcttcctcctaggcctgcccgggcccatgcctcccccgaagcggcgggagtcggtgcagcctcaacttctactgcgtgtcccaggtcgccaaccagctttgctcgcgtgccgttggcccggaggctgccgcgccagtctctgcgtgcgcctgagcgcgctggagcatttgcgaggccagggctgccgacggcgagaggatactttgaggaacacggtgcttcagtcccgcccccgctctccgcccgagctggaggttggggcgcgctgagccgcagcgcctggacaagtgcgcgggccggagccgcccaggcctgcacccgggggctcgcggccgacgcatgcgcacgcgcggtggcgggtctgcaggcccgaaggcccggcccctccctcaa

SEQ ID NO: 2954 - DNA, 244 bp, Homo sapiens
  source 1..244: mol_type = unassigned DNA
gagcggtgactggaatctacgcccgggagaggcccggagtcccggccgcgggcggcgggggattcctgcaggaaggggcaggaaggcaagcagcccggcgcgccctggcggctccgagggacctgggctcgggcttgcggtcgcgtcgcctgggctttccctgggctgggagcgcgccgggtctccgccttgcacgctgtcaccgcgggagacgtctcggcctcgccgcgcgcagaggggacgc

SEQ ID NO: 2955 - DNA, 206 bp, Homo sapiens
  source 1..206: mol_type = unassigned DNA
gccccgacgctgcgggcgacagggcttggctccagcagccgccgccgtcgccgccgccgccacccggaggacccagcaaaagtttggatctgggggagggcgcggcgctgagcgggattaccaccagggctggaaggagacctcgagaacctttgcaggtaacgcgcgcccccaaccctcttcttccatgccccgccgctgcgctc

SEQ ID NO: 2956 - DNA, 203 bp, Homo sapiens
  source 1..203: mol_type = unassigned DNA
ggaagcagtggggggcgctcgaagagcagggcagctacggccaccgtggccgccggaccggccatgtgctaaagtttctggggctcggcgccccgctgggcgcgcagcgcggggagcagacgcgccgtgggtggggcagcgcggtgctgctggcgcccggcccccgcggggtgcagctctgcgcgttctcatgctgtctctct

SEQ ID NO: 2957 - DNA, 266 bp, Homo sapiens
  source 1..266: mol_type = unassigned DNA
ccaggtcactccgatcttggtcctcaggctcgggataacgtgtcagccccaagagagcgctgcccacagccccgggtgggttgggttcaactgcacggggcggggcgccaacagctcaggacttgggttgcaggctggttcttgcaccaaccagcggggcggcctcgggcctcagtttccccatcccgcccacgaagggaggcgattgcgagcgcttggggtttctgacggaccccgccccgggggtggggcggggagtggtcacg

SEQ ID NO: 2958 - DNA, 242 bp, Homo sapiens
  source 1..242: mol_type = unassigned DNA
gcctagtagagatctggagccagaagcccagagacagccgagtgcgccgtgcggtctccggacgctcgctgctcagcccgatccccgccaactgtgcaggcggctgacccgcagcggcagcggcagcagcgaggactcgagcgctggctgcagcgacaccatggatctctcctttatggccgcgcaggtaacggggcgtcccccccacgcgccccgggccgccaagtttggggaggttcggg

SEQ ID NO: 2959 - DNA, 201 bp, Homo sapiens
  source 1..201: mol_type = unassigned DNA
agctcagacccgcgcgaacgtggatgggcacacagtctcgcccttccccactctgttttcccgaggcgccagtaatctgtctcttgccggtgacctcgggcgccccctttgccgccgcctgaggaaggctctgagacccgctttgtgaccgtgacccgccaagcgtcgacgcgccgcggtcgtttgtcctgttttgctttg

SEQ ID NO: 2960 - DNA, 201 bp, Homo sapiens
  source 1..201: mol_type = unassigned DNA
tcctgctccggctcctgcggggatggatgcttcacgcagtaagcgagtaagcgagccctggagaccggggccctgggtgtgcggtcggctcagtgccacgcggtgagataggcatggttatcaacccacgccaaggcggttgtgtacctggcatagaaaacactgctgttgaatgttgtttccatagtcattcgccagcgt

SEQ ID NO: 2961 - DNA, 312 bp, Homo sapiens
  source 1..312: mol_type = unassigned DNA
ccccctaacatccggcctgcacgcctggcgggggcgcaacagtgtctcacggctcgggagctcgtttttggcttctgagcaaggtatttttttcatctgccgtgtgtttagctgaattcagtatatttttctcgcacttctcgcttttttttttttctttctgaatctgctcttctgctttgcgggcccctaatctctcccgaatctcgggcgcccggcccggcccaggcgagcgctcgcggttggggacgcgggtggggacgcggcggtctgggcgctgcaggatgcgcctggccgcggaggagacgacca

SEQ ID NO: 2962 - DNA, 203 bp, Homo sapiens
  source 1..203: mol_type = unassigned DNA
cgctggctttggctgcttgtggggtcctcttaggctccggggggcctgcggcggcctgggaggcagacccccgcgggcaggtgtggccgtgtcccgaccgcgcgaggaccgaagttggcggaagcccctgtgcggtgccttccagcccggaggaggctggcctgaagcccccaggcgttgccgaagcctccccctgccagcgc

SEQ ID NO: 2963 - DNA, 201 bp, Homo sapiens
  source 1..201: mol_type = unassigned DNA
cgcatgcgcgcgcgcaactagatcctcgccgccgcccccagcgcccctccccggggcagggactcacctaacaggttggggtccttggagtgcgcggggccgcgtggggaagcggggaccctaccccccccacgcgccgcccagcactgggcaagggcggggcactctctgggctcccgcccctcgccgcccgccccggga

SEQ ID NO: 2964 - DNA, 283 bp, Homo sapiens
  source 1..283: mol_type = unassigned DNA
agcggcggcggcgggccccaggagtcgcagaccctggccagtggcactgcgggccaccctgagcccccgaggcctcagggggacagcgcccgggcgcccccgctgcgcgccgcctccgcggagccgagcggcggtggctgcggaagcgactggggctgcgcggacaccagcgccccagagcccgcgaggagcctggggcccccgggctggagtaagagccgagcaccggcgcagcctgcgggactggcactcaccgggcctctcaatccccagaccttgccac

SEQ ID NO: 2965 - DNA, 201 bp, Homo sapiens
  source 1..201: mol_type = unassigned DNA
gttcccggggcgccctgccctgcgccaccgcgcgctcgctcgcccgcccgcccaactcacctgctgaagaccaggcagcccaggtggttgatcttgtggtcggagcggtggcggctgtagtcctcccacaggtccctgaaggccgtgatggccaggatgaagagcaccggcgccagtgccaggccgggctggaaggcgttc

SEQ ID NO: 2966 - DNA, 247 bp, Homo sapiens
  source 1..247: mol_type = unassigned DNA
ttgagcgcgtgacatggtttgccgtccctgaccaagacgggcacggccacccggcgcggcgagggcaggggcgtcacctccatacctttctcggcccgggcgcgcttcatcttgtagcggtggttctggaaccagatcttgacctgcgtgggcgtgaggcggatgaggctggccaggtgttcgcgctcgggcgccgacaggtaccgctgctgccgaaagcgccgctccagctcgtaggtctgcgcct

SEQ ID NO: 2967 - DNA, 427 bp, Homo sapiens
  source 1..427: mol_type = unassigned DNA
ggggcgccttcccaggggattgggggtggggaggagggcgcacgggtcggggagggggctaccggacctggatcccgggacaccccgggggtctggggggcgggccgcgcgcttacctgcgtcctcgtcgtcgaaggagttcatgcacgggaagtagatggcgagcgcctcgaaggaggcggacagactgaggcggctctgcgagcgctccatgcccgcgccggcgccgggcgcctcggccgcggcggcggcggcggcggcgggcggcttgggcagcttggccgccccattcttgacgcggagtacggcgcgcggcgtggtggcggcggcccggggccgggccgaggctccgctgcggggctggcgggcgcggcggggccggcgggcgggccaggagctggcggcgcgcggagcccgaggcgcgctg

SEQ ID NO: 2968 - DNA, 246 bp, Homo sapiens
  source 1..246: mol_type = unassigned DNA
cggcccacagccgggatgcgcccccgccggggtcaccgcggcggcgaacgtcccggacttcgcatcccggtgaccccttgggatgaaccgaagccggacccgcaccttggccgtaacaagcgcgctccacgccgccacgcaccagcggtgactcccgagtcctctgtcgccctggcctccccgcaggcgggtttcgaggcccccgcagggagttcagggccacggccacgtgcagccgcccccgag

SEQ ID NO: 2969 - DNA, 384 bp, Homo sapiens
  source 1..384: mol_type = unassigned DNA
tgcgcgtcggtctggcttgcctgcgggtcccagagcctcggcgcccgctgcctcctccgcctcttccttctctcccacctcctctccctcccagccgcgacgcgcagggggcgggctctacctccccctcgcccccgcttcggttttaagccgcggaggcgcccggtgggacctcgctgctgtccaatcaggggggaccgggtgagctcctcttcctggagccgggctccaccagcgccgcaggctcacaggccgggggtgggggctctggaccgaggggcggcgcggggcggcgcggggcggcgcgcgcggtcctggagcgctagtacttgcttctcgactccccggccgccgcctccggccgccccggggattccgccacca

SEQ ID NO: 2970 - DNA, 415 bp, Homo sapiens
  source 1..415: mol_type = unassigned DNA
tgggcagccccaggccgtcgaactcggcgcccagcgggggcagctcgcggaaggcgcgagccgagccagacgccgcggggaaaggctcgggcggtggctgcgggggcgctaatcccgggagcaggaggccgggctccagccgccgggccttgcgcgcctgcttcttgcggcgcggccggtacttgtagttggggtggtcgcgcaagtgctgcacgcgcagccgttcggcttcctccacgaagggccgcttctccgccgcgttcagctccttccacgctttgcctgcgggccgtgggcgccagtgagtggaacgccgtcgggcgggtgggcgccgagccctccgtgcgcccgggacgccccgcgagggtttggcgcagcccccgcaccccgcggcccgggacccctgccccccccg

SEQ ID NO: 2971 - DNA, 543 bp, Homo sapiens
  source 1..543: mol_type = unassigned DNA
tgcgccccacgttctggagcgtgaagccgggcgccaaaaagctgctgtcgggccgcagctccagatccagctgctggtcaaaggcgtgcaggcggaggcgcgtggtcccgtgtcccggggcgcgctccagctccggcaccactagctcctcgtcctcctcggaggggcgcccgagtgcgtccgacacggccagtagcgccgcggcgagcagcagcagcgtgggtactggcccaaagctccgagaccccggagcccgctccgcgttccccatgtcgctgcccagcttgcgccttccgaacccctcgggcacagctcgctgcattggagccccaggagacaccgctcgtagcagcgcacggagcgagggacctttagttcgggtcgggagagcaaagcctcgttggcctgctctggattgttaaaattaacaatttctattattcgttggaagggcgcgcagagccggctacagccgaagctcccggagtcactaaaaggaggcgctgcagttctgccggcgcgcgggaagtttttcttccagcg

SEQ ID NO: 2972 - DNA, 227 bp, Homo sapiens
  source 1..227: mol_type = unassigned DNA
ccaggagcgatggctgcaatgcctttttctttgctttgctttccggtgccgggagccttgcctcccgccgccacccctggtcagctctgcgcaagaacgtcgttctgtttggcagccaggccgagacgcagcctgaatgtgagcaggaactcggagaagggaagggagagaatcagaaagaaggcccgggagggacccgggaagcagtgggaggtctgcgccctgga

SEQ ID NO: 2973 - DNA, 323 bp, Homo sapiens
  source 1..323: mol_type = unassigned DNA
ccgtcggaagagccctgcagagtgagcccctagggccaccccgctgccttcctccccgtccccgcagccgctgtagccagcgtgggagccgggcaggtcgcgtggggcgctggacttaccgagaggttagcgccgccgtcgggggagggcgtgtcccgcacgtgtgtgtccgcgcgtgtccgcgcccgcgtgtgccagcgcgcgtgccttggccgtgcgcgccgagccgggtcgcactaactccctcggcgccgacgggctcagcccatggtgtgggcgccgggttcagggaggctccggctcccgccaatcgcggagcaggg

SEQ ID NO: 2974 - DNA, 279 bp, Homo sapiens
  source 1..279: mol_type = unassigned DNA
ggcacgagcgccagcagcccgcaaaacaggtagagcacgcctcccgtgagggccacacgcgccttggccgggcccggggccacgcaggtggtgcactgcgcgcccgccagggtcacgaagagcgcaacgaacgccagcagcacggcgctcacggtgagcgcccgcgccgcctgcacctcggtgctcagagccagcaccgagtcgtacactttgcactgcatgtgcccggtgctctgcaccacgcacgacatccacagccccttccaggtggtctgcgcc

SEQ ID NO: 2975 - DNA, 261 bp, Homo sapiens
  source 1..261: mol_type = unassigned DNA
ctcggcgcgcgctcctcggcgcacacgctccccatccccgcgccgcgcgggccgcggacttgcaggctgcgcgtcctttgcggagtctgccccggccccacggacaggccccgcagtgagcaggtaagggtcgccccgccgcggctgcccctccacgcctcggccgtcttctccccctccagaaccttcgcccagccgggacctcggatcccctcctctggcttggcggtctccgccagccgcgacctccaccgacggaga

SEQ ID NO: 2976 - DNA, 364 bp, Homo sapiens
  source 1..364: mol_type = unassigned DNA
gctcgggccctgggcggcgagggcgcagcgagggctgtcgcctcctcgggcagccccggggggcgcggcgttgggtcgcgggtccgggggctgccgtgttcgaccgtatgcgccgatttgtcgctgggcgtccgtttcctcttgctggggctgggcgcggcctcggagcctggcggcggtggtgagggcgcacggccagctgcagcggcgctgtgcttgccgtggatccaggacaccttaggcttggtggcggggtcaggtggcggcggtttcctgcgctcgggcgatggcgacagcgacaggcccccaatctcgccccgggcccgggccggccgggcctcgcgtcgggccacgcgcgcgtaca

SEQ ID NO: 2977 - DNA, 242 bp, Homo sapiens
  source 1..242: mol_type = unassigned DNA
ggcgtcccttgagtctagagaagtgggttaagacaagggaagaaaatcccttacagaagaggagatccccgttttcagtgctggggactctcggcacccgcgtccctgtgcttctggtggttccggcgcttcctcggagcgcgcggcatgtctgctcctacacgtccagcacctctgtccccagagcaaacccacctcccagggcacacgcagaggggcagtcaggcaccgcctccaccctg

SEQ ID NO: 2978 - DNA, 285 bp, Homo sapiens
  source 1..285: mol_type = unassigned DNA
acggccgcccggggccgcaccctcgctcggtggcggcgcccgaagacgccagccgcgccacgcactgcctgcgtcccgcgccccagccgccgcgcaccaacgccgccgccttcgccgggagccaagcccgccgggccggcccggtcccaggtgggcagctcggcttgcagctggttggaggtggcggccgctgcagccctggcagcgggcacacccctaagcatacgcacccaacgcctcctccctgagccacgaggatggagcagccaccccggcccgggactg

SEQ ID NO: 2979 - DNA, 222 bp, Homo sapiens
  source 1..222: mol_type = unassigned DNA
ggcactgatcctccagcttcttgcttgctccctcgctccctttctctacctcggacattcccaggacaattagggctgaagttttcgggagaagcagccccgagcccgtgggataagggggcggcccggctccgcccaggacccctcccggacctcccccccggctgccccggttggctgcagggcgcgtcactccgcggggaggcggcggcagcggtggcg

SEQ ID NO: 2980 - DNA, 201 bp, Homo sapiens
  source 1..201: mol_type = unassigned DNA
gcggcggcggcggcggcggcgggggctggggcgcgggggccggaccatgagccgctgagccgggcaaaccccaggccaccgagccagcggaccctcggagcgcagccctgcgccgcggagcaggctccaaccaggcggcgaggcggccacacgcaccgagccagcgacccccgggcgacgcgcggggccagggagcgctac

SEQ ID NO: 2981 - DNA, 298 bp, Homo sapiens
  source 1..298: mol_type = unassigned DNA
gggaccacctcccacggtgtcaccgcacccaccccgcgcccttcctccgcctcctggagttcaccgggaccaggtggcggcgggtgcctttttgggggtgcgcggccatgcaattggtggatttttttaaaccgttttggaggggggagcgcggcgttgggggcgggagagcgctcctggctgtgagctgctcctgccgcttcgctccgcgctctcctgccgctccgctccgggtctcccgcgctcctctccccggctcggccgagcgcgctgccccgacgccgccacccagagccgg

SEQ ID NO: 2982 - DNA, 272 bp, Homo sapiens
  source 1..272: mol_type = unassigned DNA
tgacagggaccgggctcagatctgccaaatgctgcggaggcagaacctgacagtgcgggagggcaggcgcctgggaggtaggagctggtggagatgacagcgtggaactcgtgagccccacgcaacgcctccctgccgcccagggtgggctcctagaagcacagaaatggtcgggctgcgggacaccacagcgaggaaccagcggagtacaggggccccaggagcgccgggacatgccaggccgggtagacagcctcgggtcggagtgagtg

SEQ ID NO: 2983 - DNA, 201 bp, Homo sapiens
  source 1..201: mol_type = unassigned DNA
gagcatgagggagagtgccatccctcagctgaaggccactgtgccttgtatttctggtttgggcaagtgaggagcctgccagcccctggcaggaagtgcacgtgaccggcggctggccaggggcacagagacgcactccacacagaaacccaggctggcggggtgggcggccggggagccagccctgcagatgttactaag

SEQ ID NO: 2984 - DNA, 251 bp, Homo sapiens
  source 1..251: mol_type = unassigned DNA
gcaggctgaaggcggagctggagatattcggggagcaggtccggagcgcccccgaggtcggggccggcgagggagaggtagggagcccgaggaagggaggcggggcgggcagggaccgagtcaggagagagcgggcgggggtcctgggagcggcccccgagagtggggtctgtggggagcagggcggccccggggacagaggaagccgcggtggaggcctagggcagacgcgggcggacgcgaggagcgta

SEQ ID NO: 2985 - DNA, 249 bp, Homo sapiens
  source 1..249: mol_type = unassigned DNA
acccgctctcggagctccgctcggcggcacctgccttggccacgcgccccagtcccgccaggcccctcggcgggcccgaacccgcagccgggaaggcacacgcgagcaggagggcgcactccatggtcaggtgcggacgcggcggctgcgggtggccagacgcggcaggcggagcgcacgggcggcgcgcattctttccgcggccccggagctcggcgccccaggtgcggctccaggtgagagccgccg

SEQ ID NO: 2986 - DNA, 249 bp, Homo sapiens
  source 1..249: mol_type = unassigned DNA
gtccccggcagacgcagggggacgtccgggcggcgcggggcgcgggtcccggagtggctgcgggaaggacgcgcggcattgtctgtgcggggacccgggacgggtcggggcatcacaggcgcgggaatccacgtgtggactctgcgttcgcgggcgcggtgacccccgcggggatttgttggtgccccgagactcactgagttgcgggggccttggagacctccaggtctgaaaagttagctctagaga

SEQ ID NO: 2987 - DNA, 201 bp, Homo sapiens
  source 1..201: mol_type = unassigned DNA
ctgcccgcggcgccgggcgcgccggccgtcgggtggtggtggtggccggcggcgtggtggtggtggtggtggtagtgcgggcccgcgccgctctgcgcggcggccgcggcgatcacggcggacaccacggcggcggcggggcccatctcctcgccgctgccgcccaaggaggcgccggcaccggccccggccgccgcggcc

SEQ ID NO: 2988 - DNA, 201 bp, Homo sapiens
  source 1..201: mol_type = unassigned DNA
acggcacttacggtcggggggtccgggggatccggcgggcggcggacggcgcacactcgcgactcggtccgggagtcgctgctccttccagcttggtccccgcctccacgactcaggggcggctgcgcgctgtcttctggcgccgcaccgggctcaggcgcgcggcggggctggggcgcgcggggcggccgcctgggccat

SEQ ID NO: 2989 - DNA, 251 bp, Homo sapiens
  source 1..251: mol_type = unassigned DNA
cggcgccgggcagcgcgtagagccagccgcgtgtgcagggccgggtgccgttgcgtgcgggcgcggggcgcgggcccggggcgggtgcagggcgcgggatcggggtagcgcaggagcaggcaggggctcgcggctcgcgtgggccccaggcgcgggatggcggcgtccagcagcgcgggtccgcgcagggcgcgcagcgctgggggcaacagcgtggggtccggtcggcagtggggcgcgggctgcgcggt

SEQ ID NO: 2990 - DNA, 201 bp, Homo sapiens
  source 1..201: mol_type = unassigned DNA
cacggtggatcctgtgggtcgctgagttttctgactcccggtttgtcttattttgctttgtcagtgggctctgcgctcgcgttaacaattcgaatgggcacgtttctgcgtttcagaacgctgttcgcttcctcacacttagattgaggtggaactcacgtcacataaaccgggtcgcaaggctcagctcagcggggcccc

SEQ ID NO: 2991 - DNA, 201 bp, Homo sapiens
  source 1..201: mol_type = unassigned DNA
tggcgcggggcgcaggtgcacgcaggttggccgcgggcgcgcggggtccggcgggagtcccggggtggtccccgcgtggggccgggggcgtccgcgcgggcggggcgaggtcggggagggcagctgcccgccctcctcggcactgggagctttcggctggtactgcgggaggagctcccgggtgacccgcgggttctgaaa

SEQ ID NO: 2992 - DNA, 201 bp, Homo sapiens
  source 1..201: mol_type = unassigned DNA
tgaggaactggacatcaggcgctggccgctccccaccctcagccgctgggtgcccagagcccatccctagcgatcagagcagaactgcagagaagacgtccgcgtccgggccccgtctggggagctagggcgcgcggggagcgcccgggccgcgcggtcactgaccgctggctgcacgggggcgccgtgcggactcggcct

SEQ ID NO: 2993 - DNA, 337 bp, Homo sapiens
  source 1..337: mol_type = unassigned DNA
ctcagggctcccgggatcggtgcccgttagtgggcacaggacgccgggtgtccgaagggctgcctggagatgcaactgaccttggcgggcatcagaatgacgagtggcagcagcaggagcggggtgacgaacaagatcacgaaggacttgaacttggagacatagctcagcgccgaggccatcgcgcgggagggagactggcgggcgagacgagtgaggggcagctagaggcgccgcgggcttaagaaggggccacagtccccggggattggggagggggcggtgacaactccgccccgcacgggggcgcctccccgcggccctggggcggggccac

SEQ ID NO: 2994 - DNA, 201 bp, Homo sapiens
  source 1..201: mol_type = unassigned DNA
ggcccgtgcagagccgtccacccctctccgtagcgccgggttgctccaaactgctcttggaccccacctgtgagccgcgtggctgggctgggctgggctgcgcgggacctgtcagcggcccccgccactctgctcgcaggcgctcaccggctgcctcctgggccgccgctggccgccgccacacgtgggacgccgagggca

SEQ ID NO: 2995 - DNA, 201 bp, Homo sapiens
  source 1..201: mol_type = unassigned DNA
acatggcgtatgatagggaattggcagggttacagcttcggaccacccggggtagggcagggaaactacggcagattgcgcagcgcatcctgtccgggtgcggtgagggttgcgctccgcttggttctcgtcacaacccacagaaagttctcgcggagcactggtgcccttgaattcatcaggcgacctcgccgcaaagaa

SEQ ID NO: 2996 - DNA, 201 bp, Homo sapiens
  source 1..201: mol_type = unassigned DNA
ccgatcctgctccgggcaaccgatgggaaacttcccgagagcgcggcctccctggggactcggcgcccctgacgcctccaggcgcttcctcgggccgctgcggcccctcctcgccgcccgccagcgcttaaggtcgcgctctccccacccccgccttcctcccttcctcggcggcttccggatctggacagagctgcagga

SEQ ID NO: 2997 - DNA, 1216 bp, Homo sapiens
  source 1..1216: mol_type = unassigned DNA
gaagcgaagaggggtcccttgatttgcaacatagaggaaagcgccgcttccgcccagcctggcacccacgcgcccacacgcacccggcgccggccgggtcgctcacctgagtcctaaaagctgttgaatccacatggtcacgtttcggggagcggggcctcagacctggctcgcccaggccatctgcgcggcgcccgcgcccgctcgcttccgtcccgcggcgccggtctccggctctcggtccgccgcctcccgccgcccgccggccgcggggcgcacagcgagtcagagcgcggccgcgcggggctccatgccggccggcgcgccgccgccgttggggcgcatggctcaggctgggcggcccgcgggggcgcacatcctccggccggggcgcggggctcgcggccccctccgccggcggcacagcgaaggcggcagcgaggcggggcgtgttccggcgctgtcgcggcgcagcaaagggctggggagccgcggcttcgccctccggggcggcgaggagggaggccggcggcgctgccgctcacggtgcgtgtctcccggcgcgcggctcttgcctccagccggagctccgcgccgatggggcggcgctgcttagggtttggggtgacgcgacgcggacggacgcgagtcccctccgcgctgccgggtcggggggctctgccagaggctccgccgccgatcggcgccactcaagttgcccgggggctccgtctgagcgctcgctctgcagacggccgcggcccggagactggcaggaggcgggcacgagaggcgcgcggggcgagggcgccgtggagcgcggggcgtggggacgcgcggcggcggcgccgcgcggaggaggcgcgcggggatcccggggccccgccgcccgcgcccaccgcgcccgccgcagagccgcccgcgctgctcagccgcctccctcctcgcgtctgcctctccgcgcgctcgcccccgcctcccggagccggtcccaactccgcccgcccggcccggctcacgtcacccgccttccccgcccctcgaacgggagctcgagcccctggcctggccccggctcctgctcgccgccccaccttgcgggggccggggtcgccgcgggtggtggggggcgctgtgcccagcaggggcgacagcgcaggcggggcctcctgcagcccccttccccatccccggtcgcgtcccggtccccaccttg

SEQ ID NO: 2998 - DNA, 365 bp, Homo sapiens
  source 1..365: mol_type = unassigned DNA
ggccggtggcgttcaccccgcaccgcgctgccccgcccggggcactatggcctggggctggactatgccctccccacctcagccggcgccccccacccacgcgcgctgagggtgcggtgagctgagtgcggggccaagcatgttctggcgtcgacttcgcccaggggcccaggacctggcgcccaaggggctccctggcgacggagacttccgacgcagcagcgacccgcggctgcccaagctgaccccgcccgcgctccgagcggctctgggcgcgcggggctccggggactggaggatcccggggggcggcgccgcgtggtggccggaaggggacgccaagcccggggtgggcgtcggacgcc

SEQ ID NO: 2999 - DNA, 201 bp, Homo sapiens
  source 1..201: mol_type = unassigned DNA
gcggaaagcaaggcgcgttcacagccgccctccctcctggaagcccgcgcccacccctgcgcggcggccgctccggaggcgtcgggctgggcgtgaggacgccgcactcaccactgggcccgcgagcgccgccagctcagccgcctccccccgcaggtccgggggcagcgcaccccgcaggccccacaagccgtcacgcca

SEQ ID NO: 3000 - DNA, 201 bp, Homo sapiens
  source 1..201: mol_type = unassigned DNA
gcgctggctgggcagctcctgggagatgaagcgacgcaggcgctccaggtactggctgtagagctcgatgtcgttgtgcccggcgccctccacccacagcggctccaccgccttggggcagcgctcgtagagcgccagcccgtgcgagaagtcgatcacctcgtcctccgtgccgtggatgatgagcacgggcgacgtgat

SEQ ID NO: 3001 - DNA, 201 bp, Homo sapiens
  source 1..201: mol_type = unassigned DNA
tcgccctggccgaagcgcagtccgagcgccgcgacgcgctccacgcgcaggaagccgtcggggtcgcggccgcacacctcgaacacctcgcgcaggcggcgcacggagcgcagcagagccgcgggggcgcccgaccagcccgcgccgcccgccatccgggccggcccgcagctcagcccggacccctcgcccgccgcgccc

SEQ ID NO: 3002 - DNA, 201 bp, Homo sapiens
  source 1..201: mol_type = unassigned DNA
cgccccgcgccatgcacacccattgtggtgatgagagctcgcgccccgtgcccgtcacggtcactgtgcgtccaataaaaacaaacactgccgaggagccgccgcgatgcggggcggacgcgcggcccggaaaggggagggggccctaggaagagctacacccgcgagccgggcctgggccaggggcgaggggagagcgcc

SEQ ID NO: 3003 - DNA, 201 bp, Homo sapiens
  source 1..201: mol_type = unassigned DNA
gtggccccctggtccccctaggcagctaacaccacaatcttccctgggagggggtccgcagaagggcgcgcgctgcttctcccgcttcccaagctgtagcggggcgggtcgggagccagggttagggtctggagacttgggaggggaccggtgccagaagcgaagagctagggttagaaagttaggtcaattaaggggggg

SEQ ID NO: 3004 - DNA, 201 bp, Homo sapiens
  source 1..201: mol_type = unassigned DNA
ggagaagggggtccgtgcaaatcccaggctgacgaccgcgcacgcgcccctcgggtcaccagccctgtcgctcttggtggggcacaccgaggagaccgccgtggggaaccggggaccggattgcctgacagccgagcgctgaagactactcttcctgagcctagggaggtctggctgccctgagccccctacccctgggct

SEQ ID NO: 3005 - DNA, 213 bp, Homo sapiens
  source 1..213: mol_type = unassigned DNA
ccctgcggctggctaggaggagctcctcgccgcccccattccagccgcgccgggcgctgggcccgacccccagcacctttggcactgatgtgcctggtgcgcgctgagacgcgaacgctctgcaagatgagcccttattcattcgttccttctttccttcatttgttcatcttacaaactgagtgcctggccactttggttcaggcaagaggc

SEQ ID NO: 3006 - DNA, 201 bp, Homo sapiens
  source 1..201: mol_type = unassigned DNA
gcccagcggcttgcaccgagagccaggagaggctcagaccggatcccgacccttcgaggcgcgggagcccacggagcgcggtgggcgcggcgctcgggtcgcgcagctaggtggggagcggcgcgcagccccagactcgcaggcaggcagcggcggactgcacttgcctcgccccgcagcgccccctgcctgccgcctccc

SEQ ID NO: 3007 - DNA, 201 bp, Homo sapiens
  source 1..201: mol_type = unassigned DNA
gcgtccgaggccggcgcggtggggaccgcgggcccaccaccagccaagcccagctacttaactatttgtagagctgctgcaggcacaggtccaggctttcgccctccacctcctcgcgggtgatgcgctctgacagcggtcgcgggagcgggggcaaaggcggcagctggggcggcggcggcggcacggccgagtgccccg

SEQ ID NO: 3008 - DNA, 201 bp, Homo sapiens
  source 1..201: mol_type = unassigned DNA
ccgcaaggggcacccggctctgtgcgcgggggcggcgggggctctgcgcggggccgggctgggccgggctgagctggcccgctccggcgccggggaccacgcgcgactggttagatcttgtcgtgatctctggaaaactgtgactatctcacatgtcctgcccagctcggatcccctgcgctaacgagccaggcccccctt

SEQ ID NO: 3009 - DNA, 324 bp, Homo sapiens
  source 1..324: mol_type = unassigned DNA
cggggtccgggctgggaccgcggggtgggcggccccgagagcgtcccgcagtggctggagccctgggcgctgcaaagcgtgtcccgccgggtccccgagcgtcccgcgccctcgccccgccatgctcctgctgctggggctgtgcctggggctgtccctgtgtgtggggtcgcaggaagaggcgcagagctggggccactcttcggagcaggtaagtggagccgaggggagccgggtcccgggcgcggccgcccccttccctccgccggcccggccgcggagcttctgcccgggcccccttcgaccgtctcccaggcccccacc

SEQ ID NO: 3010 - DNA, 201 bp, Homo sapiens
  source 1..201: mol_type = unassigned DNA
gagggggcggctggaggacccggaccctcaagaacctggccttgggttttgacccgggcggccggagagaaggcgaagaagaggccgagcagacaggcgcgcggcggacgcgagagaaggacgcgggcgaagcgtccaagacgttcgtccccagggtcgccgagccctcctcctccttcgcttggcgcggcagcaccgcgg

SEQ ID NO: 3011 - DNA, 330 bp, Homo sapiens
  source 1..330: mol_type = unassigned DNA
agcccagcccagccaagcagcagagagaacaggacggaggctcccatttcccagggactgcagcgcctccaaaccgcccatctgcgacggccccgcgagcgtgcgcagcccagcccctcccggacgtcctcgcccccgcccgggcacatcgtgctccgcaccgaggcagagaggggcacgcggatcccagcccctgcgagcccctctgcccgccgccacttcacaccccgcattgcctcagctgccgttccagaagatgcatcgtctggcgcgcaaagcggtgcacggtccccagcccgcgcgcagcagcctggaggggcgccagagtcc

SEQ ID NO: 3012 - DNA, 293 bp, Homo sapiens
  source 1..293: mol_type = unassigned DNA
gcgttccagcccgtggcgctgccggcgcagaccccgcgtggggaccggcgaggctaacccctcctgcggcccggggtcggcagagcacgcaaggggccgcgggccgcgtgggtttgggcgcgccgtggtgggcaagcggggccagcggagcgggaacccgcacaccctccgagcggagccgaggacaggcccgtgcgggccgcggggtccctctggcgccaggaagcggcggccgaaggagacaacgagaacgcagccccggctcagggaggcttaaaagctgagatgctgaa

SEQ ID NO: 3013 - DNA, 201 bp, Homo sapiens
  source 1..201: mol_type = unassigned DNA
accgccggcgtcggcagctagagcgggacccagctcccaccgcgtcctccactggagcccctttcggcccctcggcgagtgcggcccgtggggagtgggcgtcggcgcgaggaagttccccggcccgggcgaccccggcttctgagcggcccctccccacgtcgccgcccgccaggccgacggaggaccggggcggggacg

SEQ ID NO: 3014 - DNA, 201 bp, Homo sapiens
  source 1..201: mol_type = unassigned DNA
cggcgccccacgctctcctcttggagcaaatccgcctcgctctcctcttggagcaaatccgccgcactctcgcctgcaccgaaatcctgagcgccgccccgcgccacccccagcccgcgcccgcgctgccctcctccccgggccgcaggctgagaggctgggccgcactctggccacgctttgtccggctttagcgggata

SEQ ID NO: 3015 - DNA, 226 bp, Homo sapiens
  source 1..226: mol_type = unassigned DNA
tcggggctgccagggcgccgggttcgtgcgcggacactgggggcgcacccggctcccgggtcaggcgcggctggagacctcgaggttggggttttgaagcgcgcaagtattcccctccccatcgcgtctttgcaagtagtttgaagccctaagtcgttgtttacggattcccgtttccaactttttaattgaaaaaacctgccgaggagagtggaggcatcgccat

SEQ ID NO: 3016 - DNA, 363 bp, Homo sapiens
  source 1..363: mol_type = unassigned DNA
cacccgggcgcgggagcacgggcgggccgggggcgcctgggtcggcctgccgtggcccgggggctcggggcggcgcgactcacctggcgccctcggggccgcgattctcctcgggaggtgtctgcgaaggcggctctgccgcggtgggggtggggaggctagggcttcggaccgctggagttggggtcgcagccagttcctggcgagtgtttcctggctgctgccgcaggggcttgctttttcggatttcccctctaatctcgccggacttcttccccttcccccccacgcccgccaagttcatggcttctgcaatgcggtgggtgtggttacctagtaaattgtaactgtggtcccttgcaa

SEQ ID NO: 3017 - DNA, 201 bp, Homo sapiens
  source 1..201: mol_type = unassigned DNA
cctctcggagtgggggactgcgagggggtctcggctttacgaggtgcggaggaagagcccgaggcctggggcgaggcgcgcgggacagtggggctgacgcgtggcttcggcgccgcgcggtctcccgaatcccgagccccgcgcccggcgcggccggggtccccaaccgccctcccgctcgccgggacccccaccgggccg

SEQ ID NO: 3018 - DNA, 201 bp, Homo sapiens
  source 1..201: mol_type = unassigned DNA
ctcgcccggcgttgcatcttcccgtggctcggctgtaaggacctgcggtggaggcttggcggaggcgggcccgcgctccagagagagcgtcacgtcacccgagaaggcgacgctgggggctgctgagcctcccaactccctttggcgcgtcctgctcagaagccggggagctcctggccggcggctggcggggaagcgcgg

SEQ ID NO: 3019 - DNA, 267 bp, Homo sapiens
  source 1..267: mol_type = unassigned DNA
ggtgagctactgggacttcgctgccagggagcaagctggcaggcaggaagtagccaagatttgggggaatccttcccagggaacgaatacagagaaggacgcatctgaaaattccgccgcagccacctccctcccatgggaaagccccgacctcggcgggcccagcgccacccggctccccggggtgtggaacactgagcgaggcaggtgcggcgggagcatgcgcgcggggcgggcagggggcggctcccgcgcccccaccccgcg

SEQ ID NO: 3020 - DNA, 707 bp, Homo sapiens
  source 1..707: mol_type = unassigned DNA
agggaatggggagggtcacgcatactctgtgcggcccgagtggtccggatggcacagcccaggtgtccgggctaaagttggcatctccaaagtccagaacgcaacttgggcgcgccagtacaaactcggccttcggcttttctgaagccagtcaagttcgcacagggcccccagcgcctggaaatctgagaggcgtggaagggtggggagtcccgcgaagtctccagtccctgggtgtcctccggctccgcgggggagcgggcctggagctaaaccggccggccgtaggctggagtagcgggcgccggagcgcgcggtggggatgtccgaaaaggagttagaggctcagtcggagagtccgagaacacgagggatgcctaccttgtaacatggcctcaagtttcttcctgtccacgcggaagcgctcctcgctccactccgggctgtgcagggtcgccccggcgaccaagtcgtcctcggagccgggcactggggagtcggtgctgcgctcgctgttggagccggggtccgactgcgccgccaggtagccgggctctccctgggcggccatggtgggcgcgcagcgctcgggctcccgctgccgccgccgctctgcctgcgctgccgcctccgctcgccggccgggctcaactggctcccagcgccgcggcgctagctcgtccccctgcagccgccgacgccaccgc

SEQ ID NO: 3021 - DNA, 201 bp, Homo sapiens
  source 1..201: mol_type = unassigned DNA
tggtgctgagtgcgggccgggccgctccccggcggcggtgggtgggcgcgcgagggcggagggggccgggagctttggttccgaggcagcgaggagagacgggtaaacagcagagcgctaagccaagcccccaaagtgccaacagttgcagaagtccgaactccagcggctccaggggcgcgggcacagggtcctgggtcc

SEQ ID NO: 3022 - DNA, 201 bp, Homo sapiens
  source 1..201: mol_type = unassigned DNA
gctgcccggggctgctgcacaagccggtgacactgccctgcgggctcacggtctgtgagcgctgcgtggagctggggcccgcgcggccacgggcgcgggcgcgggcgcgggcgcgtgaacgtagtgctgagccgcctgctggagaggttcttcccggccgagtgcccgctgcgcaggctggagggtcaggcgcggagcctg

SEQ ID NO: 3023 - DNA, 201 bp, Homo sapiens
  source 1..201: mol_type = unassigned DNA
agccagcgcggcccccgggtccctgcgcttatggcgagggtcgcgggggaacagcccctggtaggtaacttgccgggcacccacctgagttctccgcaccgcggcccgaaaacctgggagcgtcccaggacaaagggccagccctctggaattagccgtgtgtgactagtgtgtgccagctcgtatgtgggggtcccagtg

SEQ ID NO: 3024 - DNA, 201 bp, Homo sapiens
  source 1..201: mol_type = unassigned DNA
gctgcgcaggcatcgggctccgtccgggcgccggggcagggttgccggggccagtaggtctctcgcgcctttcctggcggggctctaggggctggattgcgggtcccctctgctccttcttcggggccgagcaagctcgcggggggtgtccccaggcagcaggagggtgaggcaggataactcccaggttttgcagttttc

SEQ ID NO: 3025 - DNA, 203 bp, Homo sapiens
  source 1..203: mol_type = unassigned DNA
atctccaaagaatgacaaaataaagaagcgtacgttaggctcccaaggagacaccgcccccccttccccaccattcttcatctccattagattccctaccgcggaccaaagatgaacctgctaccaatcaagttcctgcccaagttattttatttcccgcagcccctccacctgccggggcggtgctcggcgcactctaggct

SEQ ID NO: 3026 - DNA, 201 bp, Homo sapiens
  source 1..201: mol_type = unassigned DNA
tgatcgggcgccgaaacgccgggagtcgggggctaagggctcgagccaggaggccccggagcagcagccgcccgctcctcacgccgccgccgccgcccccgcggttgcctggacacgggataaccgacttggggcctcgaccgcagcagagccggaggggtgggcaggcgcgggtccgggagacgcgcggggaaacgcgcg

SEQ ID NO: 3027 - DNA, 201 bp, Homo sapiens
  source 1..201: mol_type = unassigned DNA
ttattttaaagcggcagcgcacctccagagctggcctccctccccgcctcgggttcccggaccggctgcaggagcttccttccccgggtcgggcggcggcgtctggcgtcctcgggctgggccattgtcccatgtccttctctgggcgcctggcgcgtgtcccaccgccgccaccgcgcctaaaggccaggctggaagccc

SEQ ID NO: 3028 - DNA, 208 bp, Homo sapiens
  source 1..208: mol_type = unassigned DNA
gggggcgccccactgacccttcttggcgcttgctttcctccccaggctgcgccttcctcacctactgcgagcgtgagtcagcgctgaaggcccagagcgcgctgcacgagcagaagactctgcccggggtaagtggcgcccgccgtggcgcaagcggccgacgcgccgacagggggcgacttcgggaggccgggcggcggcgcggcgc

SEQ ID NO: 3029 - DNA, 201 bp, Homo sapiens
  source 1..201: mol_type = unassigned DNA
cactgatgaatgcgcgctcggatccccgggcggactccctccaagccggctcgcttttctagtctaaataaataaataaagccagatggaagaaaaaagcgcccattccacctccgccgccgccccgcccgccatccctgcctttgcttcgcccgcctggcgccctaatagagcatagcttggtggataaagcccccctac

SEQ ID NO: 3030 - DNA, 201 bp, Homo sapiens
  source 1..201: mol_type = unassigned DNA
gaaaggaaaaagcgatacctctgtttcgcacagagccaaacactggaagcacgagatagccgacgtggaccaggaccatcctggctcctcgcgcggcggcggcggcggcggctgcgcgcgggccctttgtggcgcggctccggggcgcgggcgcgggcggcggcggggctgcgggagccgccggggcgggaggcggagcgc

SEQ ID NO: 3031 - DNA, 595 bp, Homo sapiens
  source 1..595: mol_type = unassigned DNA
cctggctctcggcgctcggggccagcgcagcccggggcgagcggggcgcgggccggggagggggagctgcccgcgcactccatccccctcccccccgggcgggcggcggcggctcgctgtatatatctcggcgcaccccgccaggtcgcgcacagcgccccgagcccaggcgcctccccgcccccctcccgcgctccgcggcggcggcggcggcggcagcagtagcagcaatatggctgttgatgggtgtttggggtggcgctggcggcgggaggagctcccccgagcccctgcgccggctgcccgttgctagctatggcaaatggtggcggcggcggcggcggcagcagcggcggcggcggcggcggcggaggcagcagtcttagaatgagtagcaatatccacgcgaaccatctcagcctagacgcgtcctcctcctcctcctcctcctcttcctcttcttcttcttcctcctcctcttcctcctcgtcctcggtccacgagcccaagatggatgcgctcatcatcccggtgaccatggaggtgccgtgcgacagccggggccaacgcatgtggtgggctttcctggcctcct

SEQ ID NO: 3032 - DNA, 201 bp, Homo sapiens
  source 1..201: mol_type = unassigned DNA
ccccttccctccgtcccctcccctccccggagaagagagttggtgttaagagtcagggatcttggctgtgtgtctgcggatctgtagtggcggcggcggcggcggcggcggggaggcagcaggcgcgggagcgggcgcaggagcaggcggcggcggtggcggcggcggttagacatgaacgccgcctcggcgccggcggtg

SEQ ID NO: 3033 - DNA, 269 bp, Homo sapiens
  source 1..269: mol_type = unassigned DNA
cccaccgaccgcaccatctgaccgcgggaaacgaaatctgagctcaggaatttgaactgccccacgcacgttcgttcccggataaatctcctagaggaccgtgatttttccacttagagattatttagggagatgtcctggatgggacaagtagacaaatggcggcccgaggaaaatgcaggaaactctacattgtagacgcttaagcaccaactgtctgggccccggggcagggaacgggagacattatccaccggaaacatcacacc

SEQ ID NO: 3034 - DNA, 201 bp, Homo sapiens
  source 1..201: mol_type = unassigned DNA
cgcggccgcgaggcggggctggagggcgctgcgggctgcgcggaggctgcgggaagcgcggggagcacgcggagcccgactagcagggagatcgcgtcgcgccgggcacaggcacgggacccgcgctctaggagggcgcagcgagaggcgcactgcgcacccaggggctgcggtcccggccgccgtgcggtgacaagctga

SEQ ID NO: 3035 - DNA, 267 bp, Homo sapiens
  source 1..267: mol_type = unassigned DNA
tgaaatttagaggaaaataaaaatgcagcggttcctacggaggctcctggcttgcaggacatttgagggtggagacaaggatgccgcggagggaggactcgggagcccggccgcgccctccagcctcggcacccgcgctcagcgcgccgcgccccgcgtcccccgcgcgtggccgcctcccgcgggccgggccggggctgcgctgccatctagcggccgcgcgcccagcgccgcgccaccgcccctgcaggccgccggggctcctgc

SEQ ID NO: 3036 - DNA, 287 bp, Homo sapiens
  source 1..287: mol_type = unassigned DNA
ggtccagactccgcgagctccgggctccgcttacccggccggcggcctcctcggggcggagcgcggcgtctctggagccggcatcccggactccggcgccgccccgcgcaccgcccccgtcccagccttcagtggcgcggcgccccctcgcgacatccgcgggtccccaggagcgagccgaccctcggctgggtttggagccggggccaagtccactcggagggagcacggagcccacccagctgcccttgggggcaggaggcccaggccccactctgcacaccgcc

SEQ ID NO: 3037 - DNA, 201 bp, Homo sapiens
  source 1..201: mol_type = unassigned DNA
cgacctggcaccagcgcggaggccaccttgcgcagccgggcaggcacggcggctcccaggcactcccgcagcagttccagctcctggtccgcggcgccgcgagggcgagaacccgtgggcgccggcccctcctcccgccgccggtgccctgcaaagtggaggccggcgcccccggcgcccccgccgcgctcggggcaggcc

SEQ ID NO: 3038 - DNA, 201 bp, Homo sapiens
  source 1..201: mol_type = unassigned DNA
cggaggtctacgctgagctcgcgcagcgcgcacggcccgtcggcggcggtggcccccgcgctgcgctgtgcccgacccggcccgcgcggatcccgcccgcgccactccacgcgcaggccctgcagcgccttcaggagcagcagcgctcgcaggggatcgccgaggccgccggggccacctgggcagagcgcgagcaggcgc

SEQ ID NO: 3039 - DNA, 286 bp, Homo sapiens
  source 1..286: mol_type = unassigned DNA
gcgcgggaggcgccgggggccgcggaggcggggcggggaggggccggcggcggcggcggcgcgcggaggagaccgcagtgcggccggcgctaggacccgcgggggcctcccaggccgcggcgcctcccgctttcccccactccccgacccttcttcgcccccaaaatgaggaaacggagcaactcgctccaagttgtgcagccgggaccgcctcggggtgtgcagccggctcgcggaggccctcctgggggcgggcgcggggcgcggctcgggggcgccccctgag

SEQ ID NO: 3040 - DNA, 244 bp, Homo sapiens
  source 1..244: mol_type = unassigned DNA
aatgcttagcattatttaaaaagaaaaccacacacattagccaatgatatattctaaccctcaacaaagctggtatttttctctgattacagactttgccgtggcaaacccgggctccgacgacagaggcagcgcagaagctcgctcctaaatgagacaattttattaaaatcataattccttgcatttctatagcgccttttcagtggcggagatctcaggtgccccacgccagggtctacta

SEQ ID NO: 3041 - DNA, 201 bp, Homo sapiens
  source 1..201: mol_type = unassigned DNA
gttctaacccctctccgagaccccgggcggcggggatcttccctcgggtggctgcgtgcgcgctcagcaacccggtgggtggaggcctggagccccgcccgcggccgcccccgttgaccccccagtgtctctgtttgtcctccagagctcaggcagtcagtttcccgctaggaaggcagagcagcgagatccccggcccac

SEQ ID NO: 3042 - DNA, 372 bp, Homo sapiens
  source 1..372: mol_type = unassigned DNA
ggacccgccgcccaggcccgcgtggggaccgcagggaactcgcgccacgccgggggtcactgtccatcgcgaggtgctgaagtggctccgtgaccgccgcgggccgtggctgacatcgcggagaagttaggactttcacagtctctgccagacttgaaagcaagctggaaatcgatagctgtttcagctgtttcagattctaatctggtttgggtttttccccctttcatttgaaaatagactcagggcaatgcttaagagaattccaaccgacggaagtggccgggaaatcctgccttcggtactgagggatgttaccggagattcccctgccccaggcctgccggagtccaccacattcgctaatgccac

SEQ ID NO: 3043 - DNA, 201 bp, Homo sapiens
  source 1..201: mol_type = unassigned DNA
aaccctcccgtgctccctgcacaatctgggagagacgcagcgctgtgggtgcagagctgcccagagagggctccaggccagggcagggaagagacaggacgccgcggggcccggctgtcggcgctgttgccatcttatggctgaaggggactgaggccgaactgggcaaggagaagtcggtcgcagattgtggagctgact

SEQ ID NO: 3044 - DNA, 247 bp, Homo sapiens
  source 1..247: mol_type = unassigned DNA
ggggcaggaccttagaagttatccaatcagggacgctgggctggaaaccgtccaatcaggcacggggcaggagaggacagggcggcttccgggatgtggcggggcctttgtctctggctgcagttggagctctgcgtctcgtcttcgttcttctgtgtcctctgctgctagaggtccagcctctgtggctctgtgacctgcgggtattgggggatccacagctaagacgccaggaccccccggaagc

SEQ ID NO: 3045 - DNA, 201 bp, Homo sapiens
  source 1..201: mol_type = unassigned DNA
ccgttccctctctcgggatgtcggaccggcactctcaccatttctaggcttccagggggccctggcgtcttagctgtggatctcccaatacccgcaggtcgcagggccacacaggctgggcttctacgtgcagaggacacaaagcagacagacgaaaattggagcttcggcggcagcgagaaacaaaggccgcgccaaatc

SEQ ID NO: 3046 - DNA, 201 bp, Homo sapiens
  source 1..201: mol_type = unassigned DNA
ggaccctgagctggggaccgtccaatcaggcacgcaactggagcggacagggcggcttccgggatttggcggggcctttgtctctcgctgcagctggagcgcttggtctcgtcttccctgctttgtgtcccctgctcttagaggcccagcctctgtggccctctgacctgcaagcattgggagatccacagctaagacgcc

SEQ ID NO: 3047 - DNA, 235 bp, Homo sapiens
  source 1..235: mol_type = unassigned DNA
accccgtcccctgcaagcctgcaacaccccgcacccagacccgcaatccaggcggaggataaagggttgcagcggagggcgcagagcagatgctcagggcggggcagagggggcgggaagctggcgccacggtcgcggcgagggcgagcagccgcgcgctcccggtgctaggaggaatgcccgcagagcggaggctggcaggcgcgagaggccctaagcgcgcagtccgaccaag

SEQ ID NO: 3048 - DNA, 201 bp, Homo sapiens
  source 1..201: mol_type = unassigned DNA
gcggcacctcgctcccggctttgcgcgctcaccccggggcgcgccgaggccaccgcagggcacttacttggcacttgcttttgagtgtgcagatcgtcgcggttttcacttgggttttcaaacaagtttcagggagaaagaaggaggcaaaaaaaaaaaatccaattatgcaaatggactccggactgggaggcgcgggat

SEQ ID NO: 3049 - DNA, 201 bp, Homo sapiens
  source 1..201: mol_type = unassigned DNA
gccgcgccaacgaacgcaggcggcgggaggctcggcggcggggctcgcgttcctgcaccgcgaccgcgccagaaaacaccccggggctgggcggcgtctcggagacgcattcctttgttactcccaccgtctttggtaacgattattaatgccatcatgtcccatttcccctcaccttcccccgctcccagagccgcgccc

SEQ ID NO: 3050 - DNA, 201 bp, Homo sapiens
  source 1..201: mol_type = unassigned DNA
aaagagggagaaagagactaaaaaaagaaaaagataaggggagggggaaggaaggaaggagagaaggaggaagaagtctggggtttgctgctccaggagcgctcaggcagccggtgctggagcgcggggcgcccgccctcgccgggactgtcggcctcggggcctgcgagagcgccagagccccagccggcgcgcccgggc

SEQ ID NO: 3051 - DNA, 201 bp, Homo sapiens
  source 1..201: mol_type = unassigned DNA
gctcctgcgcgcggaaaggcgctggaggcggctttatagccggggaggccagcggcggcgcatctgcatcctgggagacgtctggacccagcccaagcccgcaggctgggcgagcggagacttttgatcttaccgtgtgggtgagatcactgtctcccggtctaaaagaaaagaaagcatgctgtgaacttttgaaacaaa

SEQ ID NO: 3052 - DNA, 201 bp, Homo sapiens
  source 1..201: mol_type = unassigned DNA
tggaacccacggcgcttcgcccgtcccgcgcccaggaatactgtgcgcctagcgcagatgcgtccccacgaccccctgcctggcccggggccatgtggccgcgcaccggcctctgaagcccccatctgactgctggggaaggcgcccagaactaggagcgggttggttggggactggtcctcgcgctgggtcgcttcgccc

SEQ ID NO: 3053 - DNA, 296 bp, Homo sapiens
  source 1..296: mol_type = unassigned DNA
ccgggggtgggggtaagcgccacgtgcgcgccaggtccttggtgtgcccggcaggcggcgctgcgtggctgcggctggctccgagggtgcggggggcggcgacccgggagggaaaacccctgcctcttcccggggcttgctctgcccgtcctttaaactcgccctacaccctccccgactcccgtccttgcaagcgttatctgcagcctcaccggccctcgcaacggtggtggtggttggtggggggtctcgaagcttgcctctggccagccggaccccggtgggagatggaggca

SEQ ID NO: 3054 - DNA, 201 bp, Homo sapiens
  source 1..201: mol_type = unassigned DNA
gccggccgagccccgggagccgaggctggaaacgctggagcgggcgctgcccaccgaaggcggcccgggaccgggacgcgggtccgagcgaccggagcgcgggctgccgtggcgctggtcgtagcccaggctgatgccgctggatcgggcgctgccgccaccgccgccgccgtcggaccccgccaggctggcccgtgggct

SEQ ID NO: 3055 - DNA, 201 bp, Homo sapiens
  source 1..201: mol_type = unassigned DNA
actcgccactgtgtacctggacgccatctgcagacccagcgcctgcggggattccggaaacgggagagcgggcttccggaaacggtgaccaatgggaaacgtgatcagatgttactaggcgaacagtccgtttccaggcaacacagaaggaagagacgctctcagtcaccctaaaatagacggagctttcagccaatggat

SEQ ID NO: 3056 - DNA, 266 bp, Homo sapiens
  source 1..266: mol_type = unassigned DNA
ggaaaccgctagctctgagcgccggactctttgtgctgggtgggagtgggggcccgcggtcctggtgccccaatctttggaggaggacgccgggcggggcgatgcctgtgcttgtggttccctgaggcagtgggagtggcgtgtgaaggactgtgagagtctggcgtgaagtgactgtcatttgccagacattcgtctggctgagtgtggccccgggatcgtgtccgtaagcggatttcgtggaggcgctttcccttttatctttc

SEQ ID NO: 3057 - DNA, 201 bp, Homo sapiens
  source 1..201: mol_type = unassigned DNA
caaagaagccgcgggtatcggcccaacaaggtgcagcgaacagtcgcccgctcccgcctcaactcacagcctcacattccacggtgccattgacttcctcgcacccagtcacacaggacgtggacaggcacacggggtgacagcctcgcactgaacggtaccaacctccactcgcaccggagtcacacagatggcctgcga

SEQ ID NO: 3058 - DNA, 228 bp, Homo sapiens
  source 1..228: mol_type = unassigned DNA
aggacacgctggacagttccgaaaagacacagtgggtggtcccgggcgtgggcaaccgggtgcggaactacagcgtacccggagctgcgaacccagacgcgggtgactgctgaccctctgccctgtcgtttccatttgtgcatgcaggtggcggttagttggggccagggaagcgtggagggtgggttccaatcgagtcaagaaaagcctggggtgtcctgaactctg

SEQ ID NO: 3059 - DNA, 248 bp, Homo sapiens
  source 1..248: mol_type = unassigned DNA
ccgggactgagcttctgcagccctgaggcctggaggcccgggcggtagtaactgtgccggaccaggttcgtgggtgcggcctgtggtgcagttggagaccgaggccccgcgcatcctcgtccgcgcttcagccacttaggctcggccgtagcgaaaaggcccaagagggaagtcagaggtgaacgccccaggatgaaggtcccctgcaaaacgctgggacctagatttggggtgggtgtctggggtct

SEQ ID NO: 3060 - DNA, 387 bp, Homo sapiens
  source 1..387: mol_type = unassigned DNA
aagccgaggtgctggaggacgtgttgcgggagcagttcgggccgctgccccagctggccgctgtctgccggctcaagcggctgccctcgggcggctactcgtccactgaaaacctccagttggtgctggagcggcggcgtgtggccaacgccaaggagcgtgagcgggtgagggatccctagggtcgacgtccgttccccccttccctgctctaccaccaaacacctggtcaacacccgggggtccgctcaccgcccacccccgctcgaggcgacttcgagctcccgaggcctcccacgcccccagcttgtcaggagaatggcagtggcctccttcttctgcacctccgtgcagctgctcgttggcggccgctgcggtggccgcctc

SEQ ID NO: 3061 - DNA, 203 bp, Homo sapiens
  source 1..203: mol_type = unassigned DNA
cgacctaggctctccagcccccgcccagtcccccgcgtgcgggcgccgggaccgcagtacctgtgacgccgaagcccagcaggccgcagacgggagccacgcgcggccctggcacagggtaaaaacctacgctcaggtaggcgggcagccacgatgtcgggcaagcccagggcagacccccggtggcgcacagggaagcagcg

SEQ ID NO: 3062 - DNA, 203 bp, Homo sapiens
  source 1..203: mol_type = unassigned DNA
tgcgaacaagaccaaggcgaggtgaggcccaggcccccgggactgacagcgccgcggcagggggctcgaggcgggagctggggaccccagcgccccccacgcgcgccccacgggggctgccgccaataaaggcggagggcaagggtgcgtccacccaagcaagggggacggtgggccgcccgggctgagcagcggagcgcagc

SEQ ID NO: 3063 - DNA, 312 bp, Homo sapiens
  source 1..312: mol_type = unassigned DNA
ggcccaggaggagccgcgccgggctcggttataagaggccggctagcaggcgctccgctagcacccgcccgaccccggcccggagcaccgggcgcccagcgcgggtgaaggcggagccgcagggttggcccccaaagggatgctctcgcccgagcggcgagaccagccccgctcgcccctcgccgcggccgcgccgcagccgcccacggccgccgacatggccctctactgcggcgacaacttcggagtgtattcgcagcccggcctgcccccgcccgccgccaccgccgccgccccgggcgcccccccggc

SEQ ID NO: 3064 - DNA, 407 bp, Homo sapiens
  source 1..407: mol_type = unassigned DNA
tctcggctcgcgggaggcagctgcaccaagaaggtgaggacgctgagcgggggcccgtgccctccgccgccgcagcccccactgccggcgcgcgccctccgcgcccgccacagcagcgcgctaggcggacgccgcgggaatttgacgctcgaggctcgcggcccctaatgagagtcccagaacacttcccgcccttgacggccagcggcagcgccgccgcctcccgcagagcgcccgcttctccgtttctagagccttagtctctcctcgagcgacctcgcagcctccctcccgtctccatccgccgccggttctgcagcccggctcctccctcagtctaggcgcgcgggctgtagtgggcgatcgcctttccccgacccctcgccgtgcccctgggcctcccgaag

SEQ ID NO: 3065 - DNA, 295 bp, Homo sapiens
  source 1..295: mol_type = unassigned DNA
attctgggccgcgggagaagtgcgtgcagcccgggcaaggccgggcggggccgggcgcgggcgggcggccgagggatgcgacagggccgggcacggctccgcatccccccgcactcggcgccgccgcctcgccgctctctcccgcttgcagggccgccccgggcaccccagggctgctgaggggcgggcgggccgtaaaagccacgagagaggggcggcagggcggcgcggcctgcgagcgccgcgggaccccgaggagcggcgcggggagtacaggggcgcgcggggcgggcgc

SEQ ID NO: 3066 - DNA, 435 bp, Homo sapiens
  source 1..435: mol_type = unassigned DNA
acaattctggccccacacatttcacatgccccgcacaaagaaacagaaagcgggcgacacgccctgggagggcgggctggcggcttctccagctcggagcgcgtggaggctgcgcgtaggggtccgggacgcgggacagggactccgcgcagcccaggcgccggggaaccggggctggagtcggggatctgagcccagcggacgcctcctccgcctggaggcccggcacggaccgggacaccagggcgtccgtggccgtggctcggcccctggctgctgcgggccgcggcctccagtgggtccccaggacccttccccacggcgggtactcaccgaggctgagaggccacgccgtgctgttggggcttctcgtcgaccacattcctgggcgtcagcccgggcagagaccgcggggactggccaggccgggccagg

SEQ ID NO: 3067 - DNA, 410 bp, Homo sapiens
  source 1..410: mol_type = unassigned DNA
tggctgtgccagccgatatgagcccctccctctctaggaaggcgcaggactcggggaagcctccgcggccaggccgcctgcctacccgcagaccccgggcgccgcccgcgttccctgcccttcacttcccaacccctgcgtggccccagggtccacattcctggagttttcctccccagtaaatagtgctgtcccccacttaacagcagaggcgcccaggagttcaggcgatgtgtccaaggccgaacagagggacagcagtgagctgctcaacctttccagctgcgcagccaggacacggctgggggcgggtggagatgtggcgcagggttagggtccgggtcccgggaagtaatgaccgagggcggtgaccactgtcttcagcttcccggcgggcttccctccaaggg

SEQ ID NO: 3068 - DNA, 392 bp, Homo sapiens
  source 1..392: mol_type = unassigned DNA
tggaagcatccgccccatcgcggggcttggcatctaggctttgggacctctgccattgccaaggatctcttcggggacccgagcccccgggctgaggaccgcgggggaccccaggtcgggacggagcctcctctggctcgctgtgcgcgcacgcctggaaaggcgggatttaaggcagcgatgctgcgggaggctctgcagtgtcaacgagcccccgaacggttccgcctcattccctctctgtgtgcctcgcaagtctctgcttagtaaaccgtcacagcttcggcgcgcgagagtggcgttggcacgtccaaaccccggggtcctcggccaggccaggggggcgggcgtgcggcggggccgggccgggccgggcgcgcccagcgggctcc

SEQ ID NO: 3069 - DNA, 203 bp, Homo sapiens
  source 1..203: mol_type = unassigned DNA
cccgaccccagtccgccgccgtcttctaggcggattccccagaggcaggtcccagtccccggcgcggggaggcggcgcgcttcagaggggcgcagggtgcgcgggggccgttggccctccgggcacttcccctttgcggtctccccgccctccttcggagctggtgcctgaggtcgctgggacctcagcctggcgtcttctct

SEQ ID NO: 3070 - DNA, 398 bp, Homo sapiens
  source 1..398: mol_type = unassigned DNA
gggttcggggataaagggtgacgtgtggtcctggggaaggtccgggatgagggagctgaacccagttgttccgcgcggtgcttagagtgtttcaccgcgcgcaataaatctccgtagacaccgcatctccaatgcggtgtccctctgtgtcagtgccccggcggctcttgcagggtgccaatgttacggctgtacaccgcttttccctcccatcatcctcacctgaacagacctggaggaggcggaaatggaaattagggcatgtccacaagctggattcgttagatcctcctgctcggcggtatgcttgtgcatgcctgcatgccggcaaggagccacggatagggaaggctcaagagctggccacctgagcgcagtagatgggctcccgcagtttt

SEQ ID NO: 3071 - DNA, 286 bp, Homo sapiens
  source 1..286: mol_type = unassigned DNA
gccggttcctccacacccacgtgcccctcgtgtgcgcgcccccggcctgcagatgctacaaggctggcgccgcctggatttccgggcggccccaccctccgcggccgctacgcctcgctccctgcattcagtctccttggcgtctccgctgcagcatccaagaccaggcgccgcctctgctagccgtgctgcccagcacgcctgagggccgctgccggcaggcctcacctcccgcccgggtcccccactcacctttccttctggacggtggggttcaagctctgca

SEQ ID NO: 3072 - DNA, 267 bp, Homo sapiens
  source 1..267: mol_type = unassigned DNA
ccccatctccttctcccctccctagtctggctgaagaacgtccttaaggaaatccgggctgctcttccccatctggaagtggctttccccacatcggctcgtaaactgattatgaaacatacgatgttaattcggagctgcatttcccagctgggcactctcgcgcgctggtccccggggcctcgccccccaccccctgcccttccctcccgcgtcctgcccccatcctccaccccccgcgctggccaccccgcctccttggcagcc

SEQ ID NO: 3073 - DNA, 260 bp, Homo sapiens
  source 1..260: mol_type = unassigned DNA
gaaatcacgataggtttgcaccaccgcccctccccctacgcccccgcccaggtctgcaaagccggttgcccctggctaataggcgcctttcctgctccacggtgaaaactagtctgtggtgcattgagatttgcaaaccattccctgaatgccaggggcgctgcaaaacagccgccgggtgcagtgggccgggcgctcggccaccctggctgcgatcatcgcagcctcccaaaggatgcgggcagatgcagacggctctg

SEQ ID NO: 3074 - DNA, 239 bp, Homo sapiens
  source 1..239: mol_type = unassigned DNA
gtgagcggggcacgagagtgcagggctccgctggtgtcctcctcccggcgcccgccggacccaccgtccccaccgctgcggtgttcgaacccgcggactcggatcggcggcagcagaagcggcagcggcaaagcacccgcagaatggggtatcgcgaaatagtttcttctcctcctcctcctgctggtggtgcagccgcgacagcccgtcttccaggcaggggtttggagcttgccttc

SEQ ID NO: 3075 - DNA, 846 bp, Homo sapiens
  source 1..846: mol_type = unassigned DNA
ggtggcctctggggcagacagagcaggacctgcttctgccccttgccctcctcgtcctcctctctccagcggcggcgaccgcagtaacagcggcagtggcggctgctgccactgctctgccgctgccgagccggtcacctgggcacccgcggagccgcgccgctgctaccgccccggcggcctcccggagtgcgcggagggggcggcggaggagcgagatatccatagtaaccgaggatgcgaggggcgcccagcagcagcgagtgcctgggagccaggaggaggcccccgcgcgccggcaacccccagtgctaggcgccctgcagcccccgcgcgccgcgcctgggcccgcatcgctctcgcagtgagggtccgcccgagcggtaagccctccccggcggccaagccgacacctcccccccgcctcgccgcccaccccgggcagcagccgcggaacaatggagagcgcagccagcagccctggagacggcgttcgggggaggacgcgccgccgccgccgccgctgccgccagggcaggcgcgcgccgcgtggagccgggcgggtgcgagggcgcgcggcggggggtggggggcacgcgccgcgcggggggcgggggcagtggggggcgcgcgcgcgggcccggggagctcgcggggagagcccggcgctcggcgcagcgcggcgcggccaagctccgcgcctctcccgcccttcctcggcgcgctcgccctcgcctcgccgctcgcattcgctgggggcgcccagaaagatgcacagaggcaacggctaggggagcggaggttcaagccacatgtctgcgtcctcgggggccagagcccgccagc

SEQ ID NO: 3076 - DNA, 526 bp, Homo sapiens
  source 1..526: mol_type = unassigned DNA
agctgtgaagaggcgtgggggccgcgggaactttcctctggccggtgcgatgaaagccgggcggacgaggtggctcaacggggctgagagtggttcggccgaggcgcgggctgagccctcagcacctggcctgagcggcgtgggcagcagcctgcaccgcggacacctccaactctgccgcgtctgcgccgcactctggccgtggcagcgattttccgggcatctctgaggccgcccttagtcccacaagcacttagccgcccatttcagagcagcggcgccgaccgttttaagaggagtcagttcccgacaccgcctcccacttacttctccacatttccaccgctggagggggtgagtgccgtggacaggcgctcccgtccggggacagctcagcggcggcagtcagcccgaccctcctccgcgcgggtcgcccaaacttgaccagcagagcgagcggctcagcgcagtagccgccttcgcggcttccagttgtagaaaagcaaagcgccgggaggaagcagca

SEQ ID NO: 3077 - DNA, 201 bp, Homo sapiens
  source 1..201: mol_type = unassigned DNA
gtttcccgcagataagtaaacaatctggacgtgaaatggaaatggtaattaatgcagtaatgctgttacacctcgagtgtgcaaatcccattgactcgccgcgccacggggggtgccgggcgtacggggaccggtggcgtgcgcccaggctgcccactccctccctcctctctccctcctccctaggtccccgggcggggc

SEQ ID NO: 3078 - DNA, 523 bp, Homo sapiens
  source 1..523: mol_type = unassigned DNA
ttctacgagaagaataagaagggctggcaaaatagcatccgccacaacctcagcctcaacgagtgcttcatcaaggtgccgcgcgagggcggcggcgagcgcaagggcaactactggacgctggacccggcctgcgaagacatgttcgagaagggcaactaccggcgccgccgccgcatgaagaggcccttccggccgccgcccgcgcacttccagcccggcaaggggctcttcggggccggaggcgccgcaggcgggtgcggcgtggcgggcgccggggccgacggctacggctacctggcgccccccaagtacctgcagtctggcttcctcaacaactcgtggccgctaccgcagcctccctcacccatgccctatgcctcctgccagatggcggcagccgcagcggctgcagcagctgcggctgcagccgcgggccccggtagccctggcgcggccgctgtggtcaaggggctggcgggcccggccgcctcgtacgggccgtacacacgcgtgcagagca

SEQ ID NO: 3079 - DNA, 276 bp, Homo sapiens
  source 1..276: mol_type = unassigned DNA
ccgcccaggcagcatcctcgcagcagccgccaacgagctgcagccgccgcctactgtccgcgccggctctcgcctcccggtgcctgccgcaccgtgggccgcctcgccgtgcccgatgggtgcgcttctagcgctgccgccgcggcgctcggcctcgggttcccgccgctgcgccgctagctcgccggcagcagccgcgctcactggcgcggacccggagcggctcaggcgctcaccccgggacggcccgtgacgtcacggagggagggaggtggc

SEQ ID NO: 3080 - DNA, 357 bp, Homo sapiens
  source 1..357: mol_type = unassigned DNA
atccttcccccaggcaggagcagacacctgcttgtccccacggcgcgccagcgccctgctctagccgtccctgggccagagctcgaaactcacccactgcgctcccaccccggcacagacagccctcaaagttgtccgtactccccagacctcgccttctgctcagcccccggaccccgcccaggggttgagttgacgtccgcgggtggacctctctggtccgctgcgcagggaactgacttcgggaatccagggcgcacagaggccaaagaagctgcggcaagggagggtgggcaaatccagcttgagcctaggtccttgccgctttcaccctcaagcctgccctgcctccctcct

SEQ ID NO: 3081 - DNA, 278 bp, Homo sapiens
  source 1..278: mol_type = unassigned DNA
tgccgcgctgccgccgcagtcagccgcgccgccgccgctgccgcagcgcgggcggccgcgcgccggtagcaggggcttggcgaggaagccgctgagcctcgcgcgctccgcgctcctggcggtcgcagcgctgcctattaattgattctcttattgatttatttaatttttaggagcggctgctcggaggcacgggtcttctcctaaacctgcagcgacgcccccggcgtgggcacaaaggctccgacggcggccggcgggggctgcccagcgcccgg

SEQ ID NO: 3082 - DNA, 336 bp, Homo sapiens
  source 1..336: mol_type = unassigned DNA
ggtgatgaagtttgggcagaaatcccctgtcggccgtccgctccacgcttccctcggggccgacactgccaacctctccgggcactgaggacacctctgcgccctggagcggtgggaggacgcggagcgccgttctctggcttccgacaccctgcccgccctctctagtgggtctgtggctgcgccctctcgaaggaagtaataaatctttctgaccttgggggtcagaggagacgcttcagttttccggaggggtgtgcgggcgggaccgtctttccgctttactggacctctggccggggctgctcttgtttcattgtgccccacatgcggagc

SEQ ID NO: 3083 - DNA, 311 bp, Homo sapiens
  source 1..311: mol_type = unassigned DNA
gggagggcggtaaggagtgcggaggtccaaacgggcatgagcacggggcggcccggccggaggcggccctgggcgcccccagctgcctccggctgcccccgctgcggcacccagcggcccatcggggttgcactgctgcagcggctccttgtgccacttgtagtccaggaggttgagcatagtgagcaccagcagcagtgcatagcccgcgcacaacaccagcgccttcctacggaacaccttcattccgagaggggacgcgggccagcggcgtcctgggcgccggggccactgcgggagcagggcacgcg

SEQ ID NO: 3084 - DNA, 201 bp, Homo sapiens
  source 1..201: mol_type = unassigned DNA
aacgccggcaccggctgggaagcttcggtgctccgggtccctcttggcgagggcggagaagtcggcggcctctgcctagaattctgtgattgtagggatcgagacatcaagggcgggggtgcagaggattacaagttccctagcgcgtctcatttgcacataaatgtgctttgcctcctaaccttgtctctgttacctgtg

SEQ ID NO: 3085 - DNA, 201 bp, Homo sapiens
  source 1..201: mol_type = unassigned DNA
ctcccacttcgcgcctctcggaattccagaactcgggtggccggcccctggaaagccgcagccggcgcgatgcattctgtagacctcaccctgctgggacggacctcctaatcttcagaaccgcgggccgcagggagttaaattgctgccttcctctccttctctcgtgcggttggtggcttgttttctaaaggaacgttt

SEQ ID NO: 3086 - DNA, 481 bp, Homo sapiens
  source 1..481: mol_type = unassigned DNA
ccggggccgcatcgccatggcgacctgctcacctgactcgctccgggtggactcgccgcgacccctgggcgttcaggcccctgagggcccaacgggcgacggccctccagctccagctgtgcgtctccgcccgggcgaggtggggctgaccgcggccgtctgcacacgtcccctctggtccgcgcccccggcctgggagggcggactcgcccaccccacgatggccccggctttggaagggactgtttccgtgacccgttctcccaacagccgctaacaaccccctctaacgtctcctgcgcggcccgctcctgagaaccctggctcgggagagcgacgcggggtcctcggggctgcgcaggctgcggcgccctgcccacgctggcccgagggcgcggctcgctccgggtcggctcacacacctacgcttcctgccgggaggcggctgggacgcggcggggctgccccaagtgcagtcgcg

SEQ ID NO: 3087 - DNA, 280 bp, Homo sapiens
  source 1..280: mol_type = unassigned DNA
gagccagccggaggggcggcggcggctccgcgcgcccagagcctcagcccatgaatgggactccaccctgagcgccccctcccgggcctggggaggcggcggcgcggcggcggggggcgccccgcaagcccgcggctctgagcggccacccgcgcagcaagttgggcgagttggcagccgcctgcacctgcctcctggccccggcccctgattccgcctccggccccaagcgcccgggttgcgccctcggctgcctcgcgaggtagccccaggaggccta

SEQ ID NO: 3088 - DNA, 252 bp, Homo sapiens
  source 1..252: mol_type = unassigned DNA
gcgtggggagcttggtatcttatccaatcagagcgctggattgagaactgcccaatcaggcgcgcagccggagaggagggggcggcatccgggatctggcgcggcttttgccttttgcgccagcgtgagctcggttagggtctccacggccgtgctttcacccctcagggaggcgtcggtgattcggtcacagcctcagcctccgtcgctctgtgacctgcgggtattggatgattcgtagctgagactccg

SEQ ID NO: 3089 - DNA, 239 bp, Homo sapiens
  source 1..239: mol_type = unassigned DNA
acaggcgatggacccctcgggctcccgggggcgccccacgtgggtgctggccgggggtctcctggcagtggccctggcgctggggggccgaggctgtctcggcgccagctcacgtccccgctggcgccccctcggcgcgcagccaccccgggatccccaggtggctcctaggtctgggcccggcctgaggatccctccggggcggagcggggcggggcccgagagcagcacgcaggtaa

SEQ ID NO: 3090 - DNA, 405 bp, Homo sapiens
  source 1..405: mol_type = unassigned DNA
agttcccaaccaggctcaaggagtcgcagagccggggctccgggcccgcaggacccagaagccacgcgccccgcgctccccgccccgccgctgtctgctcggccgacccacctggtgtcgcgtgcgctggcggcccgcgcggcagccaagccaaaggccgaggccgaggccgagcgcggcgcccagcagcacggcgggggccagcagggcgggcgccggccgcagcgcgtcccgccccagcagcagccgcgcgtcgctcttgcaggccgccccgccgcgggccatccggggcgctcaggctgccgccccgccgcatcccgccgcctgctgcaccgtccccgccagggcggcgacgcgggacttggagcccgggcgggccaggggcgcggcccgctccgcagactt

SEQ ID NO: 3091 - DNA, 237 bp, Homo sapiens
  source 1..237: mol_type = unassigned DNA
tcaagctgctgtcgcccaaggtcaccaagcagaactctctcaacgacgagggctgccagagcgacctggaggacaacgtctcgcagggtagcagcgacgcgctgctgctgcgcggggcggcggccgccgtgccctcgggcccgggagcgcacggtggtggcggcggcggcggcgcgcaggacaagcgctcgggcttcctcacgctgggctaccggggctcctacaccaccgtgcgcg

SEQ ID NO: 3092 - DNA, 204 bp, Homo sapiens
  source 1..204: mol_type = unassigned DNA
agccgagcagcagccctagagcctctcgcaagtctctctcacacttccccgccctcgccccaaaggagcagcagctccttcttgcctctccattgccgccgccgcaccggcggagctcctctctcgcgcgtctctcctccgatggagctcgggcgccgccgacgccgccgctgccccgaaccctgagcggggccgccccggtcg

SEQ ID NO: 3093 - DNA, 224 bp, Homo sapiens
  source 1..224: mol_type = unassigned DNA
ggtcggggtgcgcgcgtgtgcatgctgtgaatgcgttgcgcgatgtgcgcctctattccacacccagccggtctcttgcttgtgctgttcgagtgtggacgtgtgtacgcgttgcattcgctcggtgtggcagcgtttcgtgagctcctggaggcagggaaaggctacttgtgtttagaggttctgttgagggcgggaggggctcagccccagtggggagtcct

SEQ ID NO: 3094 - DNA, 278 bp, Homo sapiens
  source 1..278: mol_type = unassigned DNA
agcgggtttgcctcccactcccccagcctcgcgtcgccggctcacagcggcctcctctggggacagtcccccccgggtgccgcctccgcccttcctgtgcgctccttttccttcttctttcctattaaatattatttgggaattgtttaaattttttttttaaaaaaagagagaggcggggaggagtcggagttgtggagaagcagagggactcaggtaagtacctgtggatctaaacgggcgtctttggaaatcctggagaacgccggatgggagac

SEQ ID NO: 3095 - DNA, 232 bp, Homo sapiens
  source 1..232: mol_type = unassigned DNA
gggaaacaggtcggcgtgccgaaagacaccgagtaggtagaaataaggcaaactcacagaggcgcaacaggtccggtcctccgtggccagggcgagccgcggccccgcgtggcgcctcggccgttgccctcggaccctgagcggccactgttggggccctcgaaagaggtgtcggtcctctgggagtcggaagagctgtctgggtgggtttcgtcttgctttttaccccacc

SEQ ID NO: 3096 - DNA, 331 bp, Homo sapiens
  source 1..331: mol_type = unassigned DNA
tgctctgcctggactttaccgtggccgagaaggaggaatggtacaccgccttcgtgaacatcacctacgccgagcccgcgccggaccccggggccggggcggcgggcggcggcggcgcggagctgcacacggagaagacggagtgcgggcgctacggagagcactcgcccaagcaggacgcccgcggggaggtggtcatggccagctcggcccacgaccgcctggcctgcgaccccaacaccaagttcgccgccccgacccgcggcaagaactggatagccctcatccccaagggcaactgcacgtacagggataagatccggaacgcgtt

SEQ ID NO: 3097 - DNA, 231 bp, Homo sapiens
  source 1..231: mol_type = unassigned DNA
gctgcgccctgggcgcatctgcgcgcctggccccgcgccccgcggagagggcgatgggtcccggtcaggactgagccccccttcccctctccccagtcccgcctggcaccccctcctctgccccgagggcgagccacggtctgcgccgccgccttcccctccggtgcccccggctcgccgtcctcccgcgccctccctccccggacccgttcccggggccaccatggccgc

SEQ ID NO: 3098 - DNA, 201 bp, Homo sapiens
  source 1..201: mol_type = unassigned DNA
tgcccggccctgggcttagcccgccggcgctgctgggggcggcaagttccgcaccagcctctactcgcctcaccttccccggctgaatgagtgtcagcccgcgcactggggccacccagaggagacgggcaaagccgcggctccacgggctgcactactggccgcggagcccaggggagctgcaggagaaaccactgcgag

SEQ ID NO: 3099 - DNA, 201 bp, Homo sapiens
  source 1..201: mol_type = unassigned DNA
agctcgatgaccaggagctcccggccctcgaagctgcgccccaccgtgtaaatcctgctgatggcggtgcactgcagccacacggacacgagcgcctcgcgcagctcggggtagcggtggtactcgaaggagatgccgtcctcttgctgcagccgccggcgccgcctcatgcccgccgcgggcgccccgggctcctgggct

SEQ ID NO: 3100 - DNA, 219 bp, Homo sapiens
  source 1..219: mol_type = unassigned DNA
ccgctgcagccatgaggagaacccctacttccatggctggctcatcggccaccccgagatgtcgccccccgactacagcatggccctgtcctacagccccgagtatgccagcggcgccgccggcctggaccactcccattacgggggggtgccgccgggcgccgggcccccgggcctgggggggccgcgcccggtgaagcgccgaggcaccgccaaccg

SEQ ID NO: 3101 - DNA, 284 bp, Homo sapiens
  source 1..284: mol_type = unassigned DNA
gccgggggaggtggggccgccggggaggaggcgagggaaacggggagctccagggagacggcttccgagggagagtgagaggggagggcagcccgggctcggcacgctccctccctcggccgctttctctcacataagcgcaggcagagggcgcgtcagtcatgccctgcccctgcgcccgccgccgccgccgccgccgctcagcccggcgcgctctggaggatcctgcgccgcggcgctcccgggccccgccgccgccagccgccccgccgccctcctcccgc

SEQ ID NO: 3102 - DNA, 429 bp, Homo sapiens
  source 1..429: mol_type = unassigned DNA
aaagcatctctctcccaacccatgaacggatcccgacccctgctctgccaccattcatgcgtcccgcatccgaggtgtcgccttcacccacacgccccacggccccgcgaaactcggccctccagctcgcgggacgcgctgcctgccaggcgggcccggcggtacctcgggggcgggaggggtcggtcgcagggcccccagcctggcgcccgcggggcgtccgcagcgaaggggtgggtgtcgctcgtgaacgcagcagggaccagctcagcccgcgctcgcccctgggcctcggccaccgcctctccgccactttctcggcccctgcgtggaccggcccgtggcgggggctgctctgcgccctcgtccccgcagcagtcgcggacccccattaacgttgacgagtcagtgtcgcgacccggggagaga

SEQ ID NO: 3103 - DNA, 283 bp, Homo sapiens
  source 1..283: mol_type = unassigned DNA
aaaagaccgcggtggagaagatggggcgttctccgcgacactcggctgcccagaggtgcaaagccggtgggcgcacgcccggggcggccctacagccctcgggccgccagtctcagggtgtcgggctccaactaaggccccgaagcccccacgcacctgagggcattttgaccagctcttgcgggctgtcttgcggccgcagtgggttctgaaagtccattccggcgtagggtggaaaccggcgggaggcgttgctgattctcgattaaacaatagtgacgag

SEQ ID NO: 3104 - DNA, 241 bp, Homo sapiens
  source 1..241: mol_type = unassigned DNA
cgcgggtggcggcggctgtggggccgtctgggattctccgcagcactgaccctgcaacctcctgtgtctgcgcttcgtggtgaggggcggcgggatgcgcgcgatccctttttgactcagccaaacggaaaagctcgcgcgtcccggctggaaggtggaggtcaggcaggacccggcaaaggcacattccaaacgaagcagaccccattcctcacctgcagagggaaggcggtgtggacgg

SEQ ID NO: 3105 - DNA, 244 bp, Homo sapiens
  source 1..244: mol_type = unassigned DNA
gcagcagccccacgttgttggcgcaggcggcgcgcaggagggtcgccgtctccgggacgctttccgggacgccctccgggacgctctccgcgctctcgacgccgtgctcctcctcgtcctcgaaagggtagaaagagtcgtccgaggcgatgctgcgggtgtctggcagactcgagaagtcctcaaactcttcgtagtcagcggggtcctcctcgacctgcgcgccccggggtggggacggcgg

SEQ ID NO: 3106 - DNA, 225 bp, Homo sapiens
  source 1..225: mol_type = unassigned DNA
gcagggggcgctgcgctcgccgagctcggaggggccgccgggccgggcgctgcgcactcgcgtcgggagccgcctctcgcccgcggcgctcgcccctgccgcccgccagcatcccttgtcccgcggccgcgctcagacaacaaaagcggaagatgctgcagttgggcaaggtcaggaccttgccctgaagccgggcggcgccgcgcacgcctcttcccggactga

SEQ ID NO: 3107 - DNA, 249 bp, Homo sapiens
  source 1..249: mol_type = unassigned DNA
cgccgctctcgcggcggcactgggcatgctccgcacccggggccggtttcggcggcggggcggacgctccctcactagccgggcgcccgggccggccgccgaggtttaggtggaggctgaggctgccgcgcgccgcgggaggagcctcgccctcggcggctgaggcggcggcggcacaggtggcgcgggccgcgcgcggggcgcagctcgggagcgctcggcgccgggcgccgcggcggccccaggctc

SEQ ID NO: 3108 - DNA, 255 bp, Homo sapiens
  source 1..255: mol_type = unassigned DNA
cccgaccgggagcccagagccctgccagcgccgcactgtgcgccgcgcaagtcgctcgatctccccagcggtaccggctctaagcagtaaacatctgtgcgcttctgagccagggacgcgcgtggggggtgggcgtgcacgcgggtgggccagcgcagagtgggagcttgtgggtgctttccgtcgggatttccaactcagctgcctccgagagcctaagctgagcgccgcacgtgctcgtgccatctgctgtac

SEQ ID NO: 3109 - DNA, 243 bp, Homo sapiens
  source 1..243: mol_type = unassigned DNA
acgtttgcctgagccgtgttgccggggaccagcgacctttcacccctcccttcccacaggagcgccccggcccccgcccccgccccaaccgccggcgcgcgtcctcaccgcgcacgcgctcccctcgcgcgcgcacacgctcgcgcacacacgctccctcgcccccgcccgcggagttccccctcacccctcagccgccccgccggctgaagcatcggcgctgggaggcggcggcgctgctga

SEQ ID NO: 3110 - DNA, 201 bp, Homo sapiens
  source 1..201: mol_type = unassigned DNA
cggcctgctctgggctcgtgaggcgaggccgcagcgccccgacgccgggtgggcgtgtgggtggagtggagacttgggtccctcggcgcatgggagtcccgccgcctgcggtagggaaccgcctcccacccctggcccggcccgggccgggagccgtgtcccgcgttgactcggtgtaactctccagctcatttctctcca

SEQ ID NO: 3111 - DNA, 208 bp, Homo sapiens
  source 1..208: mol_type = unassigned DNA
gagaattgaaaaggaaggcgaggagcaggggctgcgggccgggcttttgttgctcgcggtccccgggggccgcgccgcgccgggccacgtgggggctctcgccttccgagcgggcgtcggtgggaaacctgcgcggcgagagacagggggatggggcgcttttgacgcgactgtggggtgcgggtagtcctggaggaggatgtccggc

SEQ ID NO: 3112 - DNA, 257 bp, Homo sapiens
  source 1..257: mol_type = unassigned DNA
tagcgctctcgccctggccatggagcggccggcgcccggcgaggtggtcatgagccaagccatccagccggcgcacgccactgcgcgcggcgagctgagcgcggggcagctgctcaagtggatcgacaccaccgcctgcctggcgggtaggcgggcgccggggctgcggggaggcgcgggaccggggctgcgggagcggcggcggctgggggctggggggggtaggaaggcgaggaaggtacttgcggagagctgaa

SEQ ID NO: 3113 - DNA, 350 bp, Homo sapiens
  source 1..350: mol_type = unassigned DNA
aaagtgcttgtaaagtctgagcagagtgcgcggggccgagcggggagaagggtgcggggtaccggggtgagatacaggaaagaggaggacggtggggagcggtagaagacagcgtccccaggaccagcgactctgtggctcactcggccactgggtctcggcgcaaaccctccctaggcagtgcgggcgatgctgactgcagacgtcgggcagggctttcgtgcgggcgggagcgggggaagccagtgcgcccgggcgtcagctagttgatgcgggaagaggctggggagctgcagggccgtccgcccccgggtgcggtgctctggcgcagggcctgggctgagccgttc

SEQ ID NO: 3114 - DNA, 216 bp, Homo sapiens
  source 1..216: mol_type = unassigned DNA
ccaccctgcccgctagtacatttcagagtctctaacccctccctgcatgcaagcccaggcagagtcctgccaggtttcacaccagagcacacccctgcacggactccccaggaccgcggcgccggctggctgcctcggccccccgcggccgcgtgagctccctcttggtggtggagggcgcatttcaatctggaaactcccagcccctaatttggt

SEQ ID NO: 3115 - DNA, 269 bp, Homo sapiens
  source 1..269: mol_type = unassigned DNA
ccgcgaagggcacaacctgagaagcccgtggcagcccctcgcagcgtcgggtgacacagggctcccccacccccaggagaagtgggcaggagagagggccgcccgctgctccccgctgcgtccagggatggagggccccaccacccatggaattgctggcccctctgcgtggcccgggacttcagccgtggcttcgcgtcaagagggtatttttcctaaacgaaaccgcttcgttcgttcgttcgttcgttcgttcgggcagcaatgcc

SEQ ID NO: 3116 - DNA, 258 bp, Homo sapiens
  source 1..258: mol_type = unassigned DNA
agcaaaactcccactaccctcccggtgcttaccagtccgctcctccaggcctctgggaccatctcactcaaaagcagttcctctcagcggggtccagatcgtccctgagatttcgctgagaaactttcagcgggttagcgcttgggcgctgggcgccgagtccgacatggctttctggatgccgttgatttgctcgccggctgttcagtctctgcctcatcccggggcgcagaaaggggacgggcaggggcccgatct

SEQ ID NO: 3117 - DNA, 224 bp, Homo sapiens
  source 1..224: mol_type = unassigned DNA
agcttccagggatatttgaggcaccatccctgccattgccgggcactcgcggcgctgctaacggcctggtcacatgctctccggagagctacgggagggcgctgggtaacctctatccgagccgcggccgcgaggaggagggaaaaggcgagcaaaaaggaagagtgggaggaggaggggaagcggcgaaggaggaagaggaggaggaggaagaggggagcaca

SEQ ID NO: 3118 - DNA, 256 bp, Homo sapiens
  source 1..256: mol_type = unassigned DNA
ggccgtgtagcccgccccgctcctccttccgaagagagatctggtgctggcatgggcaccccgcggccaccggagtggcttcccggatgagcctggcttcggcgctgacgctctggccctgggggctgcctggctggtgtcaggtagcggaagacgcctggagagtcactcgctccttcccccacccgcccccaccgctgctcgtgccaggacgcgcagtttgcagttgcagctcaggcactggcgcgggatggcg

SEQ ID NO: 3119 - DNA, 310 bp, Homo sapiens
  source 1..310: mol_type = unassigned DNA
ctccgccgctccggaggctggcggtgagggcactcgggcggcaggggcccgccgaggggtcgtggcacacgggtaagggggccaacccggaatggcttccgagcagctccacgtcctgccaaggacggtaggtgcaagggtcgggggactctctgacggggtcgtcccttcgggcacggggaggttcccaccgagccccaaccctgaacggggcagggggcagagctcttggcaggcaaggtctccggaggagggaacggctggggagtggcggagccccggagtggtggccctgttaacgccccttccc

SEQ ID NO: 3120 - DNA, 410 bp, Homo sapiens
  source 1..410: mol_type = unassigned DNA
aaggatccacccagacgcacgcccgcgcggagacgcacgctggcacacgcgctcacacacgcgagcacacacacgcgcacactacccggttcgtgcgcgcgggtcgctgttcctgttgcattatgcaaaggtggctgggaaagcgcgttgacttacatttacatagcccatcttctccccacagtatgtgactaatacgtatcccggggaggagggagcgcggctgggggtgctaatcggaagggaacagacagtgagtgccatcttgctgggaggttccagaagcaaagcgccaacgacgacagtagcggtggcctcagctccaccagtaactgccgctggcaggagcaccacacgctctaggagtttcccgggtatcaagtatgggtccagcccgtcccagttatcct

SEQ ID NO: 3121 - DNA, 274 bp, Homo sapiens
  source 1..274: mol_type = unassigned DNA
agaccgagggaacgctgctcatgcggtgagagccagcgcgggaggcggcgagggcgcggggagaccggggagggggtgggccccgcggcgcccgccgcccgcccccacgcgcgctgtcggtatttgcccgccttgctgcaacttgctgcagtgtttgaaagagtagtaggagcgcatggaggtggggccggggaaagaccaggcggagtggttgtggggtgagcgcggagtgggtggggaggcggcggcggtggggaggggggactggccccag

SEQ ID NO: 3122 - DNA, 201 bp, Homo sapiens
  source 1..201: mol_type = unassigned DNA
gccgccgccgccgctgcgccgctcttcacccagagcccggcggcgccgccctcctctcctcccgcgtggtggcggggcatggcatcaccacgggcaccgcgagggggccgccagcgcctgcggcgggggcagcggcctcatgtgcgccggcgggtttcaaggaggaagccggcggccgacggggcgcccgccagccagaga

SEQ ID NO: 3123 - DNA, 265 bp, Homo sapiens
  source 1..265: mol_type = unassigned DNA
ggccgggaggcgcggagccagccgcctacggagcccaactgtttgcatcggggaccggcgggcggggcgcgcccgagtggtctcgccgggaaagggcggcgggcgctggagaaggcgcctggcgcgaagctgggcggcgccccgagggcggaggacaggtggccgcgcgaccgcagccaggtagcgaacggctcgggggctgcgcagcgcggtcccaaagctcagcccggccccgggcccagctcgctgccgcctgccacgggag

SEQ ID NO: 3124 - DNA, 201 bp, Homo sapiens
  source 1..201: mol_type = unassigned DNA
gcgcagggggcagctgcgcataacgcgctcctggcagcgcggcggctgcgggcggggcgcgctccacgtgcttgaaggcggacgcctcttccggggggacggagagcagagggaagccgcgcagggccccagagcagggcaggccaggcggcggcggcggcggcgggtccccagcgagcaggcacttgggatggtggtggt

SEQ ID NO: 3125 - DNA, 362 bp, Homo sapiens
  source 1..362: mol_type = unassigned DNA
tttcaaaccgagtcctcgggtgtgcagacccgcagcggagtcgcgggagcgaggtgggaaatcctggccgcggcgccgggctccgcccgccggggggcgcggggcggcgggcgcatgcgcgtgcgcggtgcggccccagccctggctgccgccgcctgccgccgccgtcgcgatgcctattttagtcaaagcggctgcgggcttggggacccggcccgggcagcggagcttccggacccgccgacccgccgaggagcgcgcgtcgggctcccgtcgagcagctgagcccgtgtgccccgcgtcccgcgccccgaagctgccgctccgaactttggtcggcgctgcccaggctccccgccagg

SEQ ID NO: 3126 - DNA, 298 bp, Homo sapiens
  source 1..298: mol_type = unassigned DNA
cagcggagacggttaagtgttttttcattaactctccttccccggagctcaggggtgctgcatgggcggcgcttggacccgcgctctggagtcatcaggcggagcaaagccagcgcgctccgcggctcggaatccagctggctcgctaccctcccactcctgcgattttactcccgaccgcgctccagggcagaagcgcctgagctcccgctagtgggcatttaaagcccatgcccggcgggcgtgctgacgccactcgggggctgcggagcgggagggggcggtggggggcggggac

SEQ ID NO: 3127 - DNA, 295 bp, Homo sapiens
  source 1..295: mol_type = unassigned DNA
gaaggacacgcaaacctgccgagggctcgggggctccgggctgctgctgctgccagcgtcctgggaagtgacaggcattaggacctgctggcgcggcggcggcggcggcggcagctccagccgcgcccgccacacataccttcactcgctcggtgcacacgccgcgccgcgggcagtgccgcctgcggaggcgcgctcggggcccgcaggggcagcagcggcagcctggcagcgccgccgcgccctcgggcatctggcccgcgaagtttcgcccctgccgctctccgcgccgctc

SEQ ID NO: 3128 - DNA, 203 bp, Homo sapiens
  source 1..203: mol_type = unassigned DNA
ggatgcggccgcgcaggcgctcgctccctggcttcctggccgggtagcgggcgttcggctaccggagtccagcctaagggcccagccgaggtctccccgcgcgaggcggttgcgctaggtgagcgggtaccgcggccgcgcctcccttgtcatttactcagcggtcagaggcatcctgcgtctgggagtcccaagtgccttcg

SEQ ID NO: 3129 - DNA, 215 bp, Homo sapiens
  source 1..215: mol_type = unassigned DNA
agccccaaacctcacgccataaagccccgaagaggcgggttgggggcgggggccggggcggacttccaggggcgtggctgcgcgcctgcgaccccggaccgtgccaatctcgccgccgccccaaaacctgtgggaaaccccagtcctgccacccactcctcctggaggacgcagacaggatctgctctgcaggagcccaggccggccgatccgcg

SEQ ID NO: 3130 - DNA, 201 bp, Homo sapiens
  source 1..201: mol_type = unassigned DNA
gggcggcggcgcgcgggggacccactccgtttttatttgacctcgggtgactgcctattgtcatggtttgcgatctcgcgtggggaccgcccagggcctcggggccctggatgtcccgggtggcgccgccgtaatctccgtgccctccgcgccgcccccaccccgcccccacccgggccgactcgagcggctgcagcctcc

SEQ ID NO: 3131 - DNA, 340 bp, Homo sapiens
  source 1..340: mol_type = unassigned DNA
cccttcgagcactcgccccgggtccccctcaagcagctgtcccggccccggacccctacttgatccccccaaccgacctggcagggcacgcatacctgacgcccattttgcagtcgagcacacaaggtccgtcgaagccatcgagcaggtcctgcagctgcaggtagctttcgccgtcgcgctccaccacgccgtggaaggcaggcacgcagccgcgcagcgcgtcagccatcagccgcgccaggcagtagcgctccggctccgagcagcgcttcaggatcagcccgctggtgcccgccgccttaaaactccctgaggaccggcatccgtcagcgccgcc

SEQ ID NO: 3132 - DNA, 201 bp, Homo sapiens
  source 1..201: mol_type = unassigned DNA
ggcggagggacagagctggactcggaagccgcgggtgggagctgctcctcgcgagcccgaggctgctggcaccttgtcgcgggcagcccgcgccagcctcgggagtccctgggctccgggagagcgagccggggtcgcctggccacaaagatgcccgcgcgcccgccctgcgtacgggacccgccctgcgccctgagccct

SEQ ID NO: 3133 - DNA, 236 bp, Homo sapiens
  source 1..236: mol_type = unassigned DNA
aacgctcggccaggtcccagagttcccgcggagagcggggcgcctgctgggggcggccgggagggccgggccaggggcgcgggagaccccgcggggacgcgaggtgttgcgggttttgtgcggttggttgggaacgaggagaatgtgccatcaacagtgtccaatcgactgatcaccttgggtgctgtgtttcctcccttatctctctttacctttgggaaaatgcactgctcagg

SEQ ID NO: 3134 - DNA, 251 bp, Homo sapiens
  source 1..251: mol_type = unassigned DNA
gtgcctgaatctcccgggacacttagacggctggagcctcccgactccaaggcgggcgacggcaaagttaaacgccagcgcgctgcggtccccgggcaccgaggcgtccccgctcccgccacccacacagggcgccaagtgccccgacccgcgagtgacgaggacgcacaggctagtgacacgacccgtagccagcactgagcgggacgacggggcccgagcgcaggagggtgcgcggggagctgaggagc

SEQ ID NO: 3135 - DNA, 201 bp, Homo sapiens
  source 1..201: mol_type = unassigned DNA
tgagcagctcaggcagccgcggtggtcgtgaacggggcgggagtggggggtgcccaggccatcagaggcggccccgcggcctgcaccggctggagtgggcgactcagagtctgagtggagggggcggggggcggcgacagcggggggtcctggcagcgatggcctgaacctgcgccggtgggggatggggcgggggcgggg

SEQ ID NO: 3136 - DNA, 206 bp, Homo sapiens
  source 1..206: mol_type = unassigned DNA
gcgctggggaagggacctctcggaggcacggggcagcgtgcgggctgcggcagcgaccccgacccgggcccccgggctttgtcgggctgagcctgcgcccgctccgccgccgccaagttcctccaactttgcccgctgcgctcggatcgcgcgccaggcctgggggcgcagcaggggctgggggcgcacgctgcgcactcggggac

SEQ ID NO: 3137 - DNA, 201 bp, Homo sapiens
  source 1..201: mol_type = unassigned DNA
gctccggctccgggcgccgaccaggtccccttggcccccgccgcgcgccctccaacctgctgctgccgccgccgcgccccccaggctctgccagctacccgcgctctgagcccggggccagattcccatggaagcgccgcgatgttcgccccccggctgctggatttccagaagacgaaatacgcgaggtgagcggcggcc

SEQ ID NO: 3138 - DNA, 203 bp, Homo sapiens
  source 1..203: mol_type = unassigned DNA
tgggacttcctttccaaaaacgtaggcgttttcccgggtcgcagtcgcagtcgggagactgagggttagggcgcggccgcggggtctcctgggccggggcgcggcccacgtctcaggcctctgcggctctgaccagaagccgctgcgcctttggccgcttcccacccgtcccgtccccgcaatcccaggcccagggttacagc

SEQ ID NO: 3139 - DNA, 216 bp, Homo sapiens
  source 1..216: mol_type = unassigned DNA
taggggagacgaatcgattggctgcccggccgccggaacggcaggtcccgtcgctcccctcgcctcccgcattcccggcccggtcccctcccatcaccgcgtcccgccccaactcgcagtcagcatccccttcccatcctctccccgtccccgctgccacttccttccttggatgttggaagcgcagctggtattttcgttctcccaaccccccaa

SEQ ID NO: 3140 - DNA, 335 bp, Homo sapiens
  source 1..335: mol_type = unassigned DNA
gcccacccgccccctaggtgacccggcgtcctcgccgcgcccgctggaagtttgcaaactttctccgggggttccgccgccacgctgggaagctggggacgcggggggaggttcctggctcgccgtctccgctgccgcttgaccgcacttctggagggctccgcaccttgccaggtctctggaggcaaacacacacccccgattcataactggtccccgcgtcaggggactcgcgcgctcccacacacgcacgcacgccgggcggactcggcgccggctccacgttagcatccctccaggcgcgcggcgcggcggccaccgagcgctccggcact

SEQ ID NO: 3141 - DNA, 230 bp, Homo sapiens
  source 1..230: mol_type = unassigned DNA
ccgggcgctgacagacgacttttctcacttgtcagttttctcgcttgtcagcagagctgctggtaagtgagagaaaacagaggggcgcgaaggcaggcgcggccagggagtgagcggggcgctgggcgcggggcggagccgggtgcgcggcgtccgggtcaggccccaccgcccgcgccggctcccgctttgctcagccgccgcttttctctcccttctcactttctctc

SEQ ID NO: 3142 - DNA, 224 bp, Homo sapiens
  source 1..224: mol_type = unassigned DNA
agcgcagctatttgaaggctcccatggtccccggcgcctgcgtttgaagcccgccttcaggctttggggggtatttgcagaaaactcccagcagcggctcgccaaccagacctcagggtgcacggggggtggcgccggtaattatggcaactctcaaaataaaataatataaaataaagtaaccaacgttcaccaaccaccaccccatctcaccccctgtactg

SEQ ID NO: 3143 - DNA, 211 bp, Homo sapiens
  source 1..211: mol_type = unassigned DNA
gggacacgcagggggacacgcagggactgcccgcgcgaatggcttcgaacgcatgcgctccaccctacatttcacagtcgccatgacgaccgggaggtccgctcgtcaacggctagtcaacggctgcggggacaagtccgttgaggctgccaggcgagtcaggcctttctggacctcgcctgactcggatgggctgtgcctgaaattgacc

SEQ ID NO: 3144 - DNA, 205 bp, Homo sapiens
  source 1..205: mol_type = unassigned DNA
ggcggtgccaggtcggggcggggggcttctccacccagcacggggcaccaggccgggatgggacctttttccagaaagtcgattggatgccaggagaggcgtacggctgggggtttctttctttctctttcccctccctcccgcggttgaaccaaatcagaactgtcactcagggcttgtgagtcagaagggatcggattacacg

SEQ ID NO: 3145 - DNA, 398 bp, Homo sapiens
  source 1..398: mol_type = unassigned DNA
ggcgcgggccccggcgcgcccagcagctcggccagcgccagcgcgcccgccagcaggctgagaacggccagcgccttcagcgtggccgcctgctccagccgcagcgtgtagccgcggaacagcgcctccagctctgggcaagcgaactcctcgtcgcacgcccggagcccgcgccggcggcttgtcccggccgcccgctcggcgcccccgggctcgcccgcgccgcctccgccgccgcctccgccgcgcggcgcccccgccatctcagcgccatgcagcggccgcggccgcgggcgcgcccctcgccggcccggggcgccggggcgcgggcggcggcgccggggcgggcgggcggcgggcggcgaggcgccggggcgcggggcgcggggcgggcggag

SEQ ID NO: 3146 - DNA, 290 bp, Homo sapiens
  source 1..290: mol_type = unassigned DNA
catcgcgccgcggccccgcacgggatgcggcggccggcgctgtgtccgcgggccgggcagcccggctcggccgcggcgctgcgggacccgcgcgtaacccgtgggggcgcggcgcgggcgacacgtgcgggccgccaggagggggagggggacgcgcgccgccgggcccgccaccctgcacccggggccgctggtcggtcggggcaccctcacgctcgccccgctggcgagactggagggactcgggacatcgtaaagcactttccccagtgtctgggagcgcccgctgt

SEQ ID NO: 3147 - DNA, 307 bp, Homo sapiens
  source 1..307: mol_type = unassigned DNA
ccaccgcagccggttccggccggattcaaacagcctcttccccattctcgggacacccactccacgcactcaccatttcccagcctccagatgttccgccgtcctccctatggatctcccagtacctgcaggtcacaggataacagaagctatagtagagtcaccgaggaactccaggaacggaggagatggaacagtggagacgcgaactaggatcagagcccggaagctaggagacaaaggccccgccatattgaagaggccgcctcttcctctgtagctgcgcacttgattggacagtttcacg

SEQ ID NO: 3148 - DNA, 212 bp, Homo sapiens
  source 1..212: mol_type = unassigned DNA
gggggtggctgtgggtccgaagtggaggacgagcatggtttgggagataaggaaccgtcctgagacagagaaggctcccgggagcggacagagagtgggcgaaatcggtgcgcagtaatcgcggcgccagcttcagcgcggcccctggggcgcagtcccaccccgcctcagcagctgcggagccttctgacgagcctccgcctggcagcact

SEQ ID NO: 3149 - DNA, 375 bp, Homo sapiens
  source 1..375: mol_type = unassigned DNA
cagggcgtccccgtctggactacaggagaaagtttgggaggcaggttcaacttttcaacttggcggggaattcctctccctcttacacagtttgcagcgcgggggcggcggggtgacagtccccgtgcatgaatcagccacccctcaggctccgccccggcgggggtcggccggacgctcgccccgcataaagcgggcacccgggccgcctggagcagaaagccgcgcacctcctcccgccaggcgctttctcggacgccttgcccagcgggccgcccgaccccctgcaccatggaccccgctcgccccctggggctgtcgattctgctgcttttcctgacggaggctgcactgggcgatgctgctcaggagcca

SEQ ID NO: 3150 - DNA, 201 bp, Homo sapiens
  source 1..201: mol_type = unassigned DNA
ggcggcatggagcgcagtggctgggcccggcagactttcctcctagcgctgttgctgggggcgacgctgagggcgcgcgcggcggctggctattacccccgcttttcgcccttctttttcctgtgcacccaccacggggagctggaaggggatggggagcagggcgaggtgctcatttccctgcatattgcgggcaacccc

SEQ ID NO: 3151 - DNA, 356 bp, Homo sapiens
  source 1..356: mol_type = unassigned DNA
gggcggggcggcgcgcgggggcgggggagcggccgggacacgtgtggcggcggcgggggggacgcggcgcccggggctttaagaaggtgtggagcggggcgggcgctttcccaggcctggccgaggggcgtcgcgcagaggcggcggcggcgcacggaggcggcagacgacgcgctctcggcgcccgcagccccggtcccgcgctcccgcggcccaaagtaactttgggagccgccgtctcccgcggaacttctcggcgggggcccgctcccaggcccgctcccgagcccgttccgctcccgtccgccttcttctcgccttctctccgcgtggctcctccgtcccggcgtctccaa

SEQ ID NO: 3152 - DNA, 265 bp, Homo sapiens
  source 1..265: mol_type = unassigned DNA
atttccaggcaccactcgagtctgccaattccactttcgcttaatctcattttaaaatcctctacagatgaggctctgtcgctgccgcgaggggccgggcggccgcggcgggagggacagggggcctgggtgggaagggagcgcgagggcccctagcggttcgcggcctcgggcggattcccagaacgagtgcgggccgcccggactggcagactgcgagccccgaggggcgcgggacgcagccggctcagacaaagaaaccggc

SEQ ID NO: 3153 - DNA, 697 bp, Homo sapiens
  source 1..697: mol_type = unassigned DNA
gcggggaggcggcgggggcgggagcgggcgaggggccgcggtcggccggcgtccgggcctcgacccccgggccggccaggggcgcgccgagcagcaggccgtgcgccaggcggaaatgctccagcaggtccccgcgcaccgggccgttcggggggcagtaggggcaggcggcggcgggcaggccgagcgcgccgggcggtggcgcagcggggcacgagtacttcttgtgcgccaggtaggcctcgaggctgtggaagctcacgcggcaggccgtgcactcgtggtagtcggccagcgccggtgccggggctccggggagcgggcgccgcggcttcttgctcaggtcgatggggccgtcggccgcggggccgggcgagcgcgcaggggcgaggccggggccgcttccgcttccgcttccgggccgcggcgactcgggcgcgggggcgtggccgggcggcggggggggcggggcgccggccgcgtgcagctcgtagagcttgcggcgtctgcgcgtgcgcacaggcgcggcgggagagggggccgggggcgcggccggcccagggggtcccgggggcgcggccggtcggcgcggcggcgggtcgtggcgcgaggcgcagtagtaccgcttgtgcacggtgtaggtctcgtggcggctgaagcggatgttgcaggcctcgcacagcgtgcggctggggtc

SEQ ID NO: 3154 - DNA, 226 bp, Homo sapiens
  source 1..226: mol_type = unassigned DNA
gcagaggcgcgcagaaaacgcgcgggtggcgcgcgcggccacccagtgggtcccgcccgcgccgccggcgccgccgccgccgccgcacgtgcgccgccgcgagcgcgaagggcgttcggacccgcgctctgcccgcccgcctgcccgccggggccactgtggacttccaggtaacagccaagtgagaagccctccctatcaccgaaaggtgtctgcgctcctccca

SEQ ID NO: 3155 - DNA, 201 bp, Homo sapiens
  source 1..201: mol_type = unassigned DNA
tctagggaggatgggggtcgcgggggaagccgggcgcttcggggtcctcgacacccacatccccgcacggcgcacgctctgcctcgagtttgcgttctccgagttagcacggcgagcttgggatttccgtgcccctcttttgtggctttcgagaaacgccggagttccgtgtcctgctgggggttggggggatggagaaaa

SEQ ID NO: 3156 - DNA, 201 bp, Homo sapiens
  source 1..201: mol_type = unassigned DNA
cttggagatgtgatcccccaaaagtttagtcggcgaatgggagactgaagggtgacgggaagggggcaggcgcgctcggcgctctgactgggcgtgcggcggcaggattttaaagcgctctgcctcggatcgtctgccctgggtgacctcccggacctgccctggtggaatccggacttgccccgccgagatgacgaggta

SEQ ID NO: 3157 - DNA, 215 bp, Homo sapiens
  source 1..215: mol_type = unassigned DNA
agaggaggaaggaaggaggaaagaggaagacgggcggccggaggcgcggggctgcgcggcgccggccggcgcggcgctggaaggcgccggcgttaaccccgcgaggcaggcgacggagggggagcggcgctaatacataagagcactgcatcacgctaatcttctcccagaacagtatgcgtcagcagtacattcacgttctgactgaaggacaa

SEQ ID NO: 3158 - DNA, 252 bp, Homo sapiens
  source 1..252: mol_type = unassigned DNA
ccgccgctgctcgggctccggggctgggtggaggaaaggggtgttcggaatcgatccccattttccgacctttttgttggacattacgcccaccttggacgccgcaagagaagctgtcaagccccgcaggctctgattcggcgccctccgcgttcctcggctgctcccggcttccctgtgcctcggtggagtatttgcgttcggggctggggctggaggaggcagccacacgcgcgcacacgcacacgttca

SEQ ID NO: 3159 - DNA, 203 bp, Homo sapiens
  source 1..203: mol_type = unassigned DNA
ggcgggggagtgagcggagtttcccacaatgccccggtgcggtgcagccgcggatggatgctgcgggaaggggctgccatttgctgcccctgccagcggcgcgcggacctgcccgcgctcctgcagccgccgccgccgccgccgccagcccgcccggcccctgcagcggcgccgcctgcgctccctccgcggccgccggagcg

SEQ ID NO: 3160 - DNA, 201 bp, Homo sapiens
  source 1..201: mol_type = unassigned DNA
ggccggctccatgcggggcgctccgccgcgccgcgcccgcgctcctgcaccggggtgcggggcccagcccgacgcgcactcggcgctccgcgcgccctgcgggccccccaggccggcctcgggtgggctaggaccgcggcgctggcaggccggggctgagcccggctccccgcgctggagcctctgcgccgggtgccgccg

SEQ ID NO: 3161 - DNA, 201 bp, Homo sapiens
  source 1..201: mol_type = unassigned DNA
tgaaccccagagggctgggctttgatttgagtgccgatccgttaatgaggacgggaggataaggttgccgacgcagcggaaggtaggggggaagcgactcgaggacctgacgattatccccaggcaggggcttcccaagcaggcacggaaaccaacttcaccaaaccgcggagtggggactgggcccgggcggtgttcagc

SEQ ID NO: 3162 - DNA, 201 bp, Homo sapiens
  source 1..201: mol_type = unassigned DNA
ataacccccggaaggagggggttaaatgcggcagcggcgggcctgaaaagggccaggagcgtcgtaggaactggggtgcacaggccctcgcgtgcccagcgcttcgcctttccccgccccaggcctgccaggggcgcgcgtggcgcgggcagagcctggtgggtgggttggcgcggacagaagctctgccggggagcgggg

SEQ ID NO: 3163 - DNA, 213 bp, Homo sapiens
  source 1..213: mol_type = unassigned DNA
ccgaccgcgtctcctgcgctcgcccgcgctttccctgtcgcttcgcggttcaggggtgtgagtcacccggcgacagccccgccaggtcaccccggggcgcgtaggtggacacgcacaggaagatcgctatttttaagatttccatattgtttaccgtggggcgaaatcccacaattccttgcacaaaatgcataaataatattaaatgagctg

SEQ ID NO: 3164 - DNA, 385 bp, Homo sapiens
  source 1..385: mol_type = unassigned DNA
cttgcacgcatgagcaggtactcaacactttctggtccagctacatgtgacatgaggccactcacgctctttttaattaacccttatgacaatcatgtgcgttatggagaaaattaatggaggaaaaattacagagtcacccgaaacagttgcgctgcttatcacccggtgtttgagcctgtttcccctgtaattagattacatgtgaggcagccccagctaattgtctgtgccacccaccggggaactccagctctatctgtgaacacccaggccttcccgccgcaggacagatgttgggtgaggcttgcctcccacgcaaacatctgctctgttgttccgagtcagtcacgagagccagccggcttagacaagcaggggatga

SEQ ID NO: 3165 - DNA, 278 bp, Homo sapiens
  source 1..278: mol_type = unassigned DNA
agggcactaagaaaagaggggcatgcgagcctggaagctggagagagtccggggctccccagagcgggtgggacgccgcgtccccaggactccgcgccacgcgtactttctccaccccgacacccactgccactcccacagcggagcgaggggccccgccgagggcgagcgtaccccgtgcggctgagatgcccggaacgcctccccgcgccccggcttccccagaaggggccacagtcggcccgcgagtccccgggcgggggctgagccgcagtgcc

SEQ ID NO: 3166 - DNA, 248 bp, Homo sapiens
  source 1..248: mol_type = unassigned DNA
tcggcgcaggcgagtttggtccaagggctcggatcgggtttgggaaaagtttgtccctcgagggggagagcgagcggccgcgctgaggcgctcgcgctgcgcgggggcgtctcccgttgcctgcagggagcgcggcgcggacgcggcgggcggtccggccacctggaacgggcgctcgccctggctctcggggctgctcctgtcgccccgggaagtcgtcgatgggtcccaccgctggcggctcgcgt

SEQ ID NO: 3167 - DNA, 216 bp, Homo sapiens
  source 1..216: mol_type = unassigned DNA
tcgccgccgctggtgggtggcggcggtccgggtgctttctggattgcgcagtaaagaggcatcttgggagatggggccaaggttttagggggtgccactcgcgaacggttcatccgctagactaggggggctctttggctgtgcgtctggccagaactggccttgacgatggaagtttctggaaccaaagcgttgctttctctcccttgtgttata

SEQ ID NO: 3168 - DNA, 201 bp, Homo sapiens
  source 1..201: mol_type = unassigned DNA
gcacctaccagggcgtcccgtaaaaaacctcgccttcgcctgtctctgggaaccataggtaagctttgggctttcgaggtgcagttctaggtagagctccgtgctgggaggtgggaagggggcttgaccctggggactcaggcagtctggggacagttccaccaggggccggtgcctagaattggtgagggaggcacctca

SEQ ID NO: 3169 - DNA, 208 bp, Homo sapiens
  source 1..208: mol_type = unassigned DNA
cgagacggacaggaatcgaggagattcccctgtagcgctctccaccttccggacagaaatcctgtagaccacgttcacttctccactccgtgcatcgcccgtggcccgtgggcagcagctgctcccctgggatccccctcgcctgtccgcgagctctcgcacggccgcgtccctgctgctggggtcgctcgctggccctggctgctcg

SEQ ID NO: 3170 - DNA, 201 bp, Homo sapiens
  source 1..201: mol_type = unassigned DNA
acttggtttaatcgtcgccagccctaagtcacggcctcggctccctctcctcaactgtgtgggatcccgccgcctggtttcggccgggcggaggggtgacgtcagccgctcacacagtgccccctggccgctggagctcgggaaatctgtgcgctcgaacttggctccgccaagaagctgggcaaggatccgggctcctga

SEQ ID NO: 3171 - DNA, 364 bp, Homo sapiens
  source 1..364: mol_type = unassigned DNA
ggcggtcagcagggtccccgtccccggggagaagtgcccacgatccaagggctgtctgctctaggaacttcttaaagaattacagacactgagagcattcggggtctggtaggaagtgcagtgtatctcccagctttagggtaactaggacagcatgaatcttttaccttgtggtagaataaacggctagcgcctcgatgtggcgcgctcgacttttcctcacagagcctaaaagtcacgctcaaccaaactgcagcgttcccgcctcagctgggcaccggcctggaagcggcctggaatcagactggactcgaggaggtaagacctcggcagcgcgaggttaaccacaggcctcacccgcggc

SEQ ID NO: 3172 - DNA, 213 bp, Homo sapiens
  source 1..213: mol_type = unassigned DNA
ttctccaggtccttggcgctctcggcgcggctgtctccgcggctgtcctcgctcatggtcggcggcggtgcgcagcgcggcgctgcccgccgtgctgagcgctgacccgcgcgcccgctgctgcccggcccccggcggcgagaatggaaagttgccgcctccgccaactccgaggagagacagaagactttacatgctggggagaggctgggc

SEQ ID NO: 3173 - DNA, 201 bp, Homo sapiens
  source 1..201: mol_type = unassigned DNA
ggtttgcttttggaagaaccggttcctcagccccccgtcgccgcagttgtgacacaagtaagtgcagccgcgctgcccggggcccgccagggtcccccgcgcccgctccccaccgtggctcgcggcggccgcgctcccgccccgccccgctcggccgccccgccggcttctgcctccagttgggttgccgtgacgaggaga

SEQ ID NO: 3174 - DNA, 201 bp, Homo sapiens
  source 1..201: mol_type = unassigned DNA
cccacccatcgcgcccaaccactctgtacagttggcttttttttttttttaagtacagtttaagaaggcaaagggagataggaaagggtggcagcttgacgactcagcgatgcattttagaatcgcccttacctctccagtgtgaagtttcctgggagaggtgagccaaaccggacggccggcctctgcagccgcccagag

SEQ ID NO: 3175 - DNA, 296 bp, Homo sapiens
  source 1..296: mol_type = unassigned DNA
catcagccgggctggctgggcggctcgggagcccgagcggtggcggagcggcgagcagcgagcagcgcctgcgggagcggccggtcggtcgggtccccgcgccccgcacgcccgcacgcccagcggggcccgcattgagcatgggcgcggcggccgtgcgctggcacttgtgcgtgctgctggccctgggcacacgcgggcggctggccgggggcagcgggctcccaggtaagcccccgaccgaggtggggggcggcgggcgcggggggctcgggcggccgaggcgcggtcccgga

SEQ ID NO: 3176 - DNA, 201 bp, Homo sapiens
  source 1..201: mol_type = unassigned DNA
gtttccagcaggcttccatctcatcctcctcgtcgtccgccgagctgggttccaccaagggcatgcgaagccgcaaggaaggcaagatgcagcgggcgccgcgcgacagtgacgcgggccgggagggccaggaaccacagccgcggcctcaggacgaaccccgggctcagcagccccgggcgcaggagccgccaggcaggg

SEQ ID NO: 3177 - DNA, 297 bp, Homo sapiens
  source 1..297: mol_type = unassigned DNA
tgcactcccgacacggagttggtgctccgggaaggctgctctctgaagctcttcttgctctgctgtggttttgctcctccgcggactcctttcccgtgccgaggttcagtttctggttttaaggaataaattcgctggcttgaaagggagctacggcagaagtttaggggcagagcggcgggagcgcgcgatccgcgcggctggagctccgggggtatctggagagcagcgcgtccaagcggggccactggctccgcggctgcgcccctcctcctcccgcgccgcgcctccctcccc

SEQ ID NO: 3178 - DNA, 268 bp, Homo sapiens
  source 1..268: mol_type = unassigned DNA
gtgcagcggggtctggcgccggcccctcctcatcacgcgcccggcccagggtcgctcagccgccgccaccgccgccgccccttgggtcgatggagtcggcgcggaaggcccgcgcgccctgcgccgccgccgctcagtgccgccgccagcacctcctccgcccctccgcctcccgggctcatcccgcgggggcggcgtcacctcctcgctgcccaggcccgggcaccgcgggcgccccgcgggcggcagccgcccctcccgagcgcga

SEQ ID NO: 3179 - DNA, 201 bp, Homo sapiens
  source 1..201: mol_type = unassigned DNA
aaggagcgggactgcccctccggctggacgacagcgccggggactcgcagcgtgcgcgggtcggaattaaaaaagcagcccgggagcgcgagggctgagcggggcaagcatgggctgctcctcgcagcctctctcctgcccgaggctcgggctggccgtctgtctgtctatgactgtctagttgtcccttcgactgctcag

SEQ ID NO: 3180 - DNA, 201 bp, Homo sapiens
  source 1..201: mol_type = unassigned DNA
ccaactcgtccgcagctgcccgctctggattaagccgctccgcggctcgtgctaggcagtgggttcgcttcctccttccctctcttctttaaattgggacgtgcgaaggcgcagctgcctccccggggctctctccatcccccacacaccctgttttcgcttcttgtctctcaggttcgtggcggagagatgctgatcgcg

SEQ ID NO: 3181 - DNA, 201 bp, Homo sapiens
  source 1..201: mol_type = unassigned DNA
gccctggagcctagcagagctggagcgcatatccccgctctctctccttcgtctccgagtactaggcggacacatccgtacctcgaatgcctcagtgggcgcagagttcaccagaaatggatagccggattcctcggcgcctgctgggggcaccgctgccaggtgcttggggctcgctctcccggctttgctcgcacaggg

SEQ ID NO: 3182 - DNA, 201 bp, Homo sapiens
  source 1..201: mol_type = unassigned DNA
ggccgccgggcgctgcagtgggacgcgcgcggctgtgagcctgcgggacatgccccccgcgccggctccttgctggcggccatgaagaggcagaacgtgcggactctgtccctcatcgtctgcaccttcacctacctgctggtgggcgccgccgtgttcgacgccctcgagtcggaccacgagatgcgcgaggaggagaaa

SEQ ID NO: 3183 - DNA, 302 bp, Homo sapiens
  source 1..302: mol_type = unassigned DNA
cgcccggacgccggagggccccgacccccgcgcggctcatgcgcccgcgtccgccccgctgctccgcgaggcccgcgggacccctcccgccgccgccgccgcgcccgccgcccccggaggagcgggctggccgaccgccaccgcgccgtcccccggccgcccccgaagccgctccatcgcggtccctgccgtcctggggccgcgccccgctcccgcgccttgggggttgagccgagcaaacttcgcgcaccggccgacgcccggcggggaccccgctgcgcacccgcgcgcccgggtgggcg

SEQ ID NO: 3184 - DNA, 201 bp, Homo sapiens
  source 1..201: mol_type = unassigned DNA
cctccctggggcccttcatgccaggccccgcggctgtgtccgcaagcgcagatggtctcgggactcgggccaccctgacgccgcagacccagcacgctgcggaccgggcacgttggatctcgggacaagtgcggagggtcgggggctggaagggatccgagagcagagcccgcgtccccatttcacggacgcggccaccga

SEQ ID NO: 3185 - DNA, 220 bp, Homo sapiens
  source 1..220: mol_type = unassigned DNA
cggcccgccgccccgcacctgcgcccgcagccgcgcgcccgtccgcccgccgccgccaggccccgcggcccgggcgcccatgccgcgctctgcgcccgccgccgccgccgccgagagccgcggagcgcagcccgagggagcgccgggcgggggagccgagcgatcgggggcggggcggggggcgagagctggcccggggcccggcagtcgcccgccccgc

SEQ ID NO: 3186 - DNA, 347 bp, Homo sapiens
  source 1..347: mol_type = unassigned DNA
ggcggcacaccggcagggcggccggccttgctgggctctctgggcgccggccccgggggctcgggcggcccctttcggtcctcggcctggatccgcgaacgcgcgggcgcgaggggttgggacgcgggagcctcttgagtgcggagcgcggagccctggtgtcccggcgcactgcagccacactcccgggccgcgcgctcccgccgcctcttacccgcgccgcagggtcctcccctttgaggcgccgcccgcgcaccgccgggggggagggggcagcgccaacaaattggggagctcggcccgccgcgctcaggtctccgcttggagccgccgcacccgggacggtg

SEQ ID NO: 3187 - DNA, 201 bp, Homo sapiens
  source 1..201: mol_type = unassigned DNA
cgtgcacgccccgcttttattggctccgctccgtgaccacgcccccgcaaccttgatagactccacccccgaggacccttctcaggagcacagtgaccccgcctccacagggtccgctccgccacactgacccttccgtgtcgctcgcgggaccccacccctgtccgcctgctccggtgcccatggggaagcctggtgcca

SEQ ID NO: 3188 - DNA, 201 bp, Homo sapiens
  source 1..201: mol_type = unassigned DNA
cagactcgggggaattaggaaacgcgcccggcgaccctcgggcagtagcaccgggccaggtttgctttcggaaccgctgacgccactcgccgcctttcccgcctgggcctctcgcgggtcgcaggggtggaagcccgacctgggccagggcccggatttcttcctcccggcctctgcgccgccgcccccggtgccaggacg

SEQ ID NO: 3189 - DNA, 225 bp, Homo sapiens
  source 1..225: mol_type = unassigned DNA
ctgcagcctgggcaaccgagcgagactccatctaaaaaaaaaaaaaaaaaaaaaaactaaggctgaacccgggctcccgcacgcccgcacccacctgcgcggccatcacgcgctgcctctcggcgatcaggttgcacttcttgcactggcagtcgcgccacatgcagaagcgcttgtggcccttgagcggcgaggcgtagccgtggttcctgcagcgtgcgcact

SEQ ID NO: 3190 - DNA, 318 bp, Homo sapiens
  source 1..318: mol_type = unassigned DNA
ggccctggcagagcgcgcagcgagtcggggatgaggctctccaagctctcgttggcctgctgccggcgcagcgccacctgcgcagccatgacccgctgccgctcgatgatgaggatgcacttctcgcaggtgcagtccttgaagcggcagtaacgcttgtggcccttgagccaggacaggacgccatggttgcggcagcgcgcgcacttgggcgtgcgctgcaggggcgcccgtggcggctgcgacaccgggccgcccatgtacaggtagggggagccgtagccgttcatgccccgggctcccgaatgagttggcagc

SEQ ID NO: 3191 - DNA, 265 bp, Homo sapiens
  source 1..265: mol_type = unassigned DNA
gtggagggaaggagggaggaagccagtcaagtcctcagcgacctagcccagcacatcccgaactctgcaaagttctgctcggtcttctgcagcctcgggcgcctcaccttgctgaggccgctttcggcttcctctgacccaggctgggcgggaaaggtcgggccgcccccgcctggctcagatcgctggctcacccggcgggcgcgcgcagttgcattcagcgcagcgccactggcttcagtctgcagactgcgctccccttcct

SEQ ID NO: 3192 - DNA, 259 bp, Homo sapiens
  source 1..259: mol_type = unassigned DNA
gggccgcggggtcgggggcggccgccgcctggctgggggatcggggccgtgctgggcgccgcggagccgggacagcagcagtggcggcggggacagcgccgcggctggggcctcgcgcctcctggagcgccttctgcccagacacgacgacttcgctcggaggcacatcggccctggggacaaagaccagagagagatgctgcagaccttggggctggcggtaaggacctccacccggccctccgcggcctcccctccg

SEQ ID NO: 3193 - DNA, 201 bp, Homo sapiens
  source 1..201: mol_type = unassigned DNA
gagcgcagaccaggcctccagggcgcgggagcctgttgctctcccctgcaggggccgctcccggacgccccatccgccgttacgtggtcccgggatgtgcgggttgcggtagagagtgggcagcaatgctcctggtcctgcgttctcgccttagccgcggggaccccgaggcgagccgctaattggtaccggtgccccgtc

SEQ ID NO: 3194 - DNA, 323 bp, Homo sapiens
  source 1..323: mol_type = unassigned DNA
acgcgcctgccggggaagggctcgccggcgccgcgccttcgaggctcctgcggcgaaccgcgtcacgcgcgactcctggccgggggcgggaggcggcggcggcggcaggagaagcccaaggcccgagcggcccgcagcccccacgcctgcacccctccacccccgccagcccgatggttcgctccgcggcgtgcactggagcaagcaggtcccgctccgagcgcgcgcgctctgggaagtgctgcaagtttggagacctggagtgagctccgggcgctgctggcccgactgtccgcggtgtttccccggtgaggtcgcggggg

SEQ ID NO: 3195 - DNA, 201 bp, Homo sapiens
  source 1..201: mol_type = unassigned DNA
cagcggcggcggccgagcccagcccgtagggtgggaactgagacaggcgtcccacgctgcccaccgcggctgccgcggccgccgccgccgccgccgccacggccgccgcctcctgcatcttgccggggtgagacggctgctgaggctgcgactgctggggcggttgctgcgggggctgtgacgggaggtgcggaggcggct

SEQ ID NO: 3196 - DNA, 355 bp, Homo sapiens
  source 1..355: mol_type = unassigned DNA
cagcgccgtatagaagtcgcagagcagcggcgtgaagtcgcggctcggcgcgcaccgggccgccgcgaagtacagtgccaccaccttgttctgcagcgccgcctcggcctccaccgtcgcgcccttacaggtcaccaggtgccgctcgcccagaatgtcaaccatggcgcagacacgcagccacctgagacccgaggacacctgcaggaggatgatcacctgcggggaggcggcggcgagcgccgcggtgccccgcctctgtccgcaccaccgggcgctggacctctcaagacctgccccagatgcgcccacaccttggccaggcctcgcctgtggctggagcaattgtgttcgc

SEQ ID NO: 3197 - DNA, 201 bp, Homo sapiens
  source 1..201: mol_type = unassigned DNA
tgcacctgcgtcgcttttggctccttcaggaatgcgctgaagcttgtaatcagctttgtgaagccattgagtgcacggctgagtgaaacttccaaagctcgaggaaaacgggccggctgaatgggagccagcatggggcttctctccaagcctccgcgctgccaaattccagcagagcccctcacaatcgctccgcgcggg

SEQ ID NO: 3198 - DNA, 290 bp, Homo sapiens
  source 1..290: mol_type = unassigned DNA
ctgctatgcgcggcagcccgcgccggggccggcaccagcagcgcccgggcggatgcagcgagcccacggaggggcatgcttccacgcaccaagtataaccgcttcaggaatgactcggtgacatcggtcgatgaccttctccacagcctgtcggtgagcggcggcggaggcaaggtttcggcggcgcgcgcgaccccggcggcggctccctacttggtgtccggcgaggcgctgcgcaaggcgcccgacgatgggcccggcagcctgggccacctgctccacaaggtgtc

SEQ ID NO: 3199 - DNA, 201 bp, Homo sapiens
  source 1..201: mol_type = unassigned DNA
tcactcggcggaaacccgcgagccggcccttccgcgtccaagaagtttacttcctaagcctttttattatgatcttgaatgcggacaattggggccaaacgaggaaggacacagacccaaaagccagacccaggtcccagcgcgcttctgggctctaacctgggagactcgcatccagcccggcggaagctacagtctcta

SEQ ID NO: 3200 - DNA, 201 bp, Homo sapiens
  source 1..201: mol_type = unassigned DNA
ctctagcgcccaggccgactgcgccctgaccgggagccactgcgcccagcgcagcccgagggcgctgagctcggaggatgcggcgcggggcgggggtctcgggagcaacagagactgggatccgagggcccggcccgcgctgctgcccacgcagcgcttccactttggaaagagtgtctcccgcgcggcgggccggcctct

SEQ ID NO: 3201 - DNA, 288 bp, Homo sapiens
  source 1..288: mol_type = unassigned DNA
gcccaggagaacccgcaagccagcggcgcctgcgcccgagctgcagccgccctctgccgtccacgcgagctcgagagcggctcccggagtccgggctagcgccgagctgcaggcgcgcgcctaaccgctttgctgggctcacgcggtctgagaggtcggagcgcccaactgctggcacgcgagtaacggcttagttaagctcactcggtctgagaggtcggaggctgcgagtgtcgctgctgaaggctgtggtggaccgggctggatcgcggattctgagctacatcg

SEQ ID NO: 3202 - DNA, 212 bp, Homo sapiens
  source 1..212: mol_type = unassigned DNA
ccttgcgtggtagatatttagggataggccaatcaccacccccaatcatccgtctttgagaggcccaggatctgtctctatttgatggatagtggtgcacggattaaagacgacgcaggataggtaacctcctcctccaatcccccgggaccagggtagctctgaagacccccagaggcagccaagcagccccttcccgcagcggggagtga

SEQ ID NO: 3203 - DNA, 201 bp, Homo sapiens
  source 1..201: mol_type = unassigned DNA
gaggcagggaggcgggggtgcgggaggctccgcggctgcgcgggcgcgtgctggtggcctcggcggaggctcagtcccggcccgcgcccgcggcgcccccgctgcggcccgagcggcctggctgcgggatctgtgcgcacggatggcgcggccgccccggcagcacccgggggtctgggcgtcgctgctcctgctgctact

SEQ ID NO: 3204 - DNA, 246 bp, Homo sapiens
  source 1..246: mol_type = unassigned DNA
cgcccagctccgcgcacgcccctctgcgagtccggccgcccagcgcctcttcccgcccgagccgccgcctgcgctccggggcagccgctctgtctccagcgcgatgtggcctcgcctggccttttgttgctggggtctggcgctcgtttcgggctgggcgacctttcagcagatgtccccgtcgcgcaatttcagcttccgcctcttccccgagaccgcgcccggggcccccgggagtatccccgc

SEQ ID NO: 3205 - DNA, 201 bp, Homo sapiens
  source 1..201: mol_type = unassigned DNA
cctcccagggatggagcagctacgccttccgagtgtgcccattccaccgatggagcaaagtgaggctctcagctcgcccggatgtctctgcgccgctcgcggggcagctctcgcacagacacgcccgcaagcccccgacccgcccgccacccgcgcccagacacccgcgagcctctggggccgcagggacggtgcagcgcc

SEQ ID NO: 3206 - DNA, 201 bp, Homo sapiens
  source 1..201: mol_type = unassigned DNA
accccagatacacaggcagtcgggattcccgcccggtgcgcttgtctattcatccctctgcgtcaggctgggacgcgctccgtctgtaaaaggctcaaacgcatctcccgccgcggggcgggatctaggggcccaggccccggggtccagaggcgggtaactttgctaatctcccccagcggcggggaacgtcgcgcaacc

SEQ ID NO: 3207 - DNA, 358 bp, Homo sapiens
  source 1..358: mol_type = unassigned DNA
ctaacgggcccggtgcatcgccaccgcggccccggccccgcccgagctcggctgagcccccaggccgggctccgggccccgggcgctcgcggggcaggacgcctcccgccgaggcgcaggggcagctacattgcggggcgcctgggcgacggcgccaaagccagggtcacaagggcacgggacaagcggggcggggggagcaggagactaggacagaggtcggcgcccgccgcgggcgctttcacgccgcgggcatcgcccgcccggcttcagcgcccggggcgcaaagcaagggcgcaaactctgcccgaggcggcgacggctgcggtcggggttcaccctgaagccgctaggtgtc

SEQ ID NO: 3208 - DNA, 201 bp, Homo sapiens
  source 1..201: mol_type = unassigned DNA
gctgcgtgttcgccgcccacagccgcagccaaagagacgcaggcggccccacgcggcctggttcaccgccgcctgcagtgtccgcggcgcggggcgccccgaggctgggctcaccgtcctctccgcgtccttgaagatctcccgggcctcctcgaaggagcactgctcctccttgcactccctctccagggagcccggccg

SEQ ID NO: 3209 - DNA, 201 bp, Homo sapiens
  source 1..201: mol_type = unassigned DNA
cgcctccccgtccccggcccgagcggccgtcatcgcgggcgggcggcgctgcgcccgggtgcggctcctcgccggcggcggcggcgcggccgagaggtgcgggctccgcgcgggcgggacgcggggcgctgctcgcaggagcgaccaggtgggcgccgggccgaccgcagccgccgtcgcgccccctctcgcgtcccgggc

SEQ ID NO: 3210 - DNA, 201 bp, Homo sapiens
  source 1..201: mol_type = unassigned DNA
gccgaggcccagagccggctcctgcccgcaggcggcgaacggcaccttgctccgccaggcccctgcgggtgtgatccgtgacccgcagattctcccgggcgcctctggcccatgacgcgggggctgctcgctccacgcaggcggcttcgggatgctctcccgctcagatttcagcggcagaaacagcctcggattctctct

SEQ ID NO: 3211 - DNA, 277 bp, Homo sapiens
  source 1..277: mol_type = unassigned DNA
aggggagcaaaacggagcccccgggggcacgcaggcttcgtttctgggtgttggttttgcttttggttttttcagccggtgcagtgacccggaacagcgcggccgcttctccgacgcccgcggctccccactgcgccgaggcgagcgccacggctaaagcccaagcctcggcgcccgctgcgcctgccggagttctgcttgtccgagcaggcagcggggctcaggcacggcggcgacgtcgaagggccagtcggcagacagggctgggtctctgcgg

SEQ ID NO: 3212 - DNA, 201 bp, Homo sapiens
  source 1..201: mol_type = unassigned DNA
caccctgctctcagcccgatcctccctgcgcccggagcctgggctcggcgcgcaggagactgcgtgcactctggcgtccccgacctctgccagggcgcacggggactccagagcggatcctctacgagttctaataggaggccagggagccgggacatcagagacaaattcctccgaagtccccctccggttccactgact

SEQ ID NO: 3213 - DNA, 247 bp, Homo sapiens
  source 1..247: mol_type = unassigned DNA
gccgccacagtcgccccgagctcgcgcgcagccctagttgccacgcggatcccctgctcagactgcgctgctgaagccggcgcttcgcttcatacgggccgcgccaactcggtcgctgtgcacggtcgggtgcgaaactcctccgcgggctcacggggctgccgaggcggggccgcagcggccgtcggggctggggctggtcccggcctgagacagcttcatggaaggccaggctcccggcccttgc

SEQ ID NO: 3214 - DNA, 201 bp, Homo sapiens
  source 1..201: mol_type = unassigned DNA
cgccgccccgcgcgccccggccatcgccgcgccttccccgggcgccagggaaggtggccaggtggcctctgcccgccgcgccctgcgcctcgcgccgcccgccctgcgccctgccttgcccggctgcgtccctccgggctcctccgccgccaccgggaagcgccgtccggctctgagcgctgcgcgggctgcgcgcggggg

SEQ ID NO: 3215 - DNA, 201 bp, Homo sapiens
  source 1..201: mol_type = unassigned DNA
cttgaagccggcggtgtccaggagcgcgccgtcccccgcgcagggccgcctgcgggcacacgccagcgcccctcagcccgcgtcgggcgccctcgcggacgcgcgcagcccccggcccgccaggcccggcccgcgcagcgcagcccgcggccaccgcgacccaccgggcgggcgggcggccgggcgggggcgggcctggcg

SEQ ID NO: 3216 - DNA, 201 bp, Homo sapiens
  source 1..201: mol_type = unassigned DNA
caggtttggttccagaaccgccgggccaaggagaagaggctgaagaaggacgccggccggcagcgctgggggcagtatttccgcaacatgaagcgctcccgcggcggctccaagtcggacaaggacagcgttcaggaggggcaggacagcgacgctgaggtctccttccccggtaggcggagggatcgcggagctcggggg

SEQ ID NO: 3217 - DNA, 356 bp, Homo sapiens
  source 1..356: mol_type = unassigned DNA
ctgatcgtgatgataagaaggctggggaggccaagagaaaagggaagagagagtgcagctgcaaacccttctccgggcccgagaagcaccgctctcctgcgtgttcaactggcatttgccaccaacatgtctgtttttatttaaatggcccagagcaaggctctgactaaactagcattcccacgccaacactcagcagcgcctctggtttttggcagattttttccttagctgtcaaagcaaaactatagaagcgtcctggtcttacttaaggcttgttggggctttttgccttcccccggagacccgaatagctcgcagatgtgcggtacctgcttatgttcgtgctccgtgtt

SEQ ID NO: 3218 - DNA, 201 bp, Homo sapiens
  source 1..201: mol_type = unassigned DNA
agccgacacgcgcgatgcgcgagaaagcgcggtgcaccgggccgctgtcgcggcaaaactgcagtacgtggcggcacacgctgcccacgcggccgtacacgcagcgcgccttgtgggcgtcccagtcctcgcggcggcacaggcgcgagcagtagtaggtgtagcagctgtggcaggacttgaagtagaggcaggcgttga

SEQ ID NO: 3219 - DNA, 281 bp, Homo sapiens
  source 1..281: mol_type = unassigned DNA
gggctccaccggggcgcagggctggggaaccggagctccgcccgccgacccggagcaccgcccacgcagacccgccccgggcgagggaggggccgggcgcgcacccgcggggagggcggcgagcggggatcagccgaagtcgggagaggggcgcttccacggggcgggaaactggcgcgcgactctgggggaagtgcaggatggggggacaggggcgctcccgcgggggtggatgggggaccatagcggggctggcggggcaggggccggcgcacgaggct

SEQ ID NO: 3220 - DNA, 222 bp, Homo sapiens
  source 1..222: mol_type = unassigned DNA
taccgacccctcgtgcagcggcttcgccccgccggacttcaaccattgcctcaaggattgggactataatggccttcctgtgctcaccaccaacgccatcggccaggtgaggcggccaggcgggccgcgggtctgggggcgggcagagagcggcgagggcggggcctcacgcccgctgcacccttctcacatccccagtgggatctggtgtgtgacctgggc

SEQ ID NO: 3221 - DNA, 237 bp, Homo sapiens
  source 1..237: mol_type = unassigned DNA
gcggctcggaggcggccatgatcatgcacatgaaggggcggccggtgcgccggtccgtggggtagatggtggtgggcgtgaagcgcctgttggcctcgacgaactcgcaaagctgctcgtagacgcgcgggaactcgtggcgcaggaagacgccgcgcagccgcagctcgcgctggatgtggatgaaggccacctcgcgcgcgcgccggcccgcctcgccgtcctgatccaggcccg

SEQ ID NO: 3222 - DNA, 201 bp, Homo sapiens
  source 1..201: mol_type = unassigned DNA
ggcctggaacagagacctcagctgacccacaaggacggggtttgagatctggggctctttgtcacagtggcataacccagcctgtactgactaatacagccccctgtgaaccccggctccaacattcaaatcaaggtactcggctgcttcattaagctgtcacacgttcattcaaaagcactgctagattgaggaaccagg

SEQ ID NO: 3223 - DNA, 364 bp, Homo sapiens
  source 1..364: mol_type = unassigned DNA
gcgctcgggctctgcagccttctgctgctgctcgcgcccgggcacgcgtgccccgcgggctgcgcctgcaccgacccgcacaccgtggactgccgcgaccgcgggctgcccagcgtgccagaccctttccccctggacgtgcgcaagctgctggtggccggcaaccgcatccagcggatccccgaggacttcttcatcttctacggcgacctggtctacctggacttcaggaacaactcgctgcgctcgctggaggagggcacgttcagcggctcggccaagctcgtgttcctcgacctcagctacaacaacttgacccagctgggcgccggcgccttccgctcggccgggaggctggtgaagc

SEQ ID NO: 3224 - DNA, 201 bp, Homo sapiens
  source 1..201: mol_type = unassigned DNA
ccgggacacgccttagggaaaccgctcctgggcttggtagctgaacttagacgtcgagtgcagcccgcccggtgcgcgcggcgtcttactgccagatctcggaaatcagctgccagggtggggccgcgttttggcgacggccactcggccacccctgccgctcccgcctctcccaagagatttttctagcgggttaatttc

SEQ ID NO: 3225 - DNA, 201 bp, Homo sapiens
  source 1..201: mol_type = unassigned DNA
gcctcagaggggagccggggtggatctccatggaagggagacgcttgcgccagctcaggagtggagttcgtgctccaccggttccttaaactgcgagtacgaaatccccagaggggagctgagctggtgccccgcgtgcctctcactctccaccccccacccgcaggccagacctgcgctgcccaccccaggagggagcgc

SEQ ID NO: 3226 - DNA, 201 bp, Homo sapiens
  source 1..201: mol_type = unassigned DNA
ccgccccatcgatgcggagcgcgagctgcttattgtcttccatcatgctcaggattttggcctgggggcgagagaggtgacaaagagctgcatgatgcgcggggggcgcgcggccgggcacccccggctctacctgttgtgtcctccgcggcccggcttcgcccgcgccccgacccccaggcaccggcagcgccggttcct

SEQ ID NO: 3227 - DNA, 222 bp, Homo sapiens
  source 1..222: mol_type = unassigned DNA
agcgcacacacacagacacaggctcatatagacagactcggtcctaaaaatacgcactcgcagaggcaaaggctagcgcacaagcacgcacagacacaccgacaggcggcccccggacaccgcgctccctgccgcactcacggcccacgcaagggctcacacacggcctcacggaggacagtcataaaacacccagacacacgccacacacgcacgcgcgca

SEQ ID NO: 3228 - DNA, 201 bp, Homo sapiens
  source 1..201: mol_type = unassigned DNA
gttcatacatactagtgaaacggttaaatggcagtactaggtgctaagtgaccgtacaggcgtgttcttgtcagctgtgagcaagacaaggcagcttaccgctctcagggagcttagttctcatgggggtgtattcgtttgctagggctgctgtacctaagtatcaccaacccggtggcgtcaataacagatcttattgtc

SEQ ID NO: 3229 - DNA, 265 bp, Homo sapiens
  source 1..265: mol_type = unassigned DNA
ggcgggcgccggcggggcggccccccagtaagatgtgcgcggcgccgcggggcgccccccacttgcagcggcgctcgggagccgggcggctgggccaggcggcgccttcggggctgctgcgcgcccgcgcctagagctgccgccccagggagcccgccacggccgcgccccgggcacgctcggcggcgcccaacgatgaccgctccctggcggcgcctccggagtctggtttgggaatactgggccgggctcctcgtgtgcgcct

SEQ ID NO: 3230 - DNA, 242 bp, Homo sapiens
  source 1..242: mol_type = unassigned DNA
gcccccgccggcggcgctgcaccaccaccaccaccacacactgcccggctcagtgcagtgaccccgcgggccgggcccccgccggcgcgctgcagggcgcgggcgcgcagcccgcccgcgcggcctggactctttttgttcggttgctttggattttacaaaaaaaaaaaaaagcccagaaactttcgaacaaaaccaaacacccggacgaccctctccggtgagcggcgaagacagcccgg

SEQ ID NO: 3231 - DNA, 201 bp, Homo sapiens
  source 1..201: mol_type = unassigned DNA
tcctccctcgccttctctttgctccttcttttgctttgtggcctttctttcccttcccagagacacctgggagctgcccccaagctttggggcgccccgcggggccctgccaagggtgcgtgtgagagagggcggcggagccggcgccgggtgccaggggccgagggtgggagcgggagctcgtggccctgcgccctggag

SEQ ID NO: 3232 - DNA, 261 bp, Homo sapiens
  source 1..261: mol_type = unassigned DNA
cgggctgtacgcgcaggcggcctacccggggggcggcggcggcggcctggccgggatgctggcggcgggcggtggcggcgcggggccgggcctgcaccacgcgctgcacgaggatggccacgaggcgcagctggagccgtcgccgccgccgcatctgggcgcccacggacacgcacacggacatgcacacgcgggcggcctgcacgcggcggcggcgcacctgcacccgggcgcgggcggcggcggctcatcggtgggcga

SEQ ID NO: 3233 - DNA, 201 bp, Homo sapiens
  source 1..201: mol_type = unassigned DNA
ggggacccgcgcaggccagcgtgccggcccctcccagcccatcgctgccgccgccggggctgctccaagggagccaagcggagtgggagcgggtctgcgcgtctctgctctgcgcgcaggggcgggggggcccaggacggggcgccctttcccacccacatgctgatctaggatctccaagcggctcggcccaggacaccg

SEQ ID NO: 3234 - DNA, 337 bp, Homo sapiens
  source 1..337: mol_type = unassigned DNA
gtaagagcggtgcagccgagccggcgccccagaagccgagaggttacacaagtctacgcagagaggcgcaccggacacggtaattaggagcaattcacacgctctcgggcgcacggaaactacttgtcaggaaattttcaacgctcctcctcgcccacttttttccactcctttcctggcgcgccccctcccctcccagaggcacgcagtggagcttttggagtttcgaatctttcggacactgcagaatgcggggctccccgggcgcgggcccggccaatcagagcgccgtctgcctcccctggccaatggcaggcgccacattgttgtccaattc

SEQ ID NO: 3235 - DNA, 201 bp, Homo sapiens
  source 1..201: mol_type = unassigned DNA
aagttttgggtggcgcgcaaaggcgcaggcgagggccgccgcacagagccgcccaagttgtggccggagcgccagggcgacccctgggaaccccccaagcggaatcccccgagacaagcggctcttgctccctgacaccccagtcgaggccgagttgacgcgcagccatttaacccttcctgtcccggggaaacaacttca

SEQ ID NO: 3236 - DNA, 201 bp, Homo sapiens
  source 1..201: mol_type = unassigned DNA
atgagtcgagagggctgagcggagagtgtggtcctcggcggctggaggtaggagaatatgttgcgcccgcccgccgcggcgtgagaggctcgaggtgggcgcgccggggtaggggcggccgcgggcgcctgtccgtctagtgggcgctgcccggacctggcgaggtggtggtctgcaacactgtgcccgcactgcctactg

SEQ ID NO: 3237 - DNA, 201 bp, Homo sapiens
  source 1..201: mol_type = unassigned DNA
gcagcgccgcggcggccagcagcgccgggtagtggactcgcggtggcgcggcgccgggccgcggtgcccagggcgggagcagcagcacgaggcccagggcgagcgcccaggacagcgccagcatgcccgccgtgtggcgcctctggtacagcgcctggtaggtggcgggcgcccgggtgatgagcaggtagcggttcaggg

SEQ ID NO: 3238 - DNA, 201 bp, Homo sapiens
  source 1..201: mol_type = unassigned DNA
gccctaggagggaaggaggcgacggtgcccaaggacgtcggaagccggggatctccgcttccctcgggccccggctaggttaccagtgctggcccgcggcgcgggtgcccagttgcgcctgggacactgcgggcacggctgtggcggcaacggcagcggccgccgcgtcgccgacgcccggcaggactgagcgcacggagc

SEQ ID NO: 3239 - DNA, 386 bp, Homo sapiens
  source 1..386: mol_type = unassigned DNA
ggtggcatgtacgtttcacttaaaaagcagatcttcttctgcaactgccagcaagtggaaggatagcaaaccttatactacctcgagacctgtgcgctccgagcggtcctaactccgtcccgctcgctgttgctgttgctggtgctgctccggctgcagctgctgccgctccacgacctcggggcgctgaggcaacagggccccctccctctactccccatcccccccggctcctccacagaagcgccgtttccagtaactcctcgtgtacctcccacttctgccgccgtccatcccacccctctctcttctgtcccctccccaaaccgttcccaagcacacccttcgccgctggaagtgatcacaatgttgtttttcaacaagca

SEQ ID NO: 3240 - DNA, 201 bp, Homo sapiens
  source 1..201: mol_type = unassigned DNA
ccccccgccccccgcggcgcgcgccgctcccgggggctccgcgcccccgcgcccaggtccctcccccttggcgggcgctcacaggcggcgcgggcagcgcgagccccggagccccggaggcctgtgcgccctgagccggcatggaccccgagcactgcgcgcctttccgcgtggggcctgcacccggcccctatgtggcct

SEQ ID NO: 3241 - DNA, 201 bp, Homo sapiens
  source 1..201: mol_type = unassigned DNA
ggggcgacccggagctgcgcgccggcgcacgcgactccgctcgctcctcactccctgcctcaccaccagtcccaacctggctcccgcccgccgcgcgctcggggctcaggggagcggcgcggggacccaggtcccacggcggagagagcgcgcgggattgcgaagactggggccgagtgccgccctccctgcgccctggca

SEQ ID NO: 3242 - DNA, 309 bp, Homo sapiens
  source 1..309: mol_type = unassigned DNA
aggcgcagacgctggagttggagcggcgcttccggcagcagcggtacctgtctgcgcccgagcgcgagcagctggcgagcctgcttcgcctcacgcccacgcaggtcaagatctggttccagaatcatcgctacaagctgaagcgcgctcgcgctccaggggcggcggagtcgcctgacctggcagcatccgccgagctgcacgccgcgcccggcctgctgcgtcgcgtggtggtgccggtgcttgttcgcgacgggcagccgtgcggcggcggcggcggtggcgaggtgggaaccgccgcggcccagg

SEQ ID NO: 3243 - DNA, 203 bp, Homo sapiens
  source 1..203: mol_type = unassigned DNA
agcgcacactgccgtcagccagccagccgccgtcgcactggtctagccccgaaaacttccaggcggcgtagaggtgcccaaccttggccaccacggcgccgcgtcgccggcacgccgcgtgggcttcagacagcgtcagccgcccgggcacgaagaacacttggcctggggaccacagcgggtcaccgaccgagggcagggtg

SEQ ID NO: 3244 - DNA, 388 bp, Homo sapiens
  source 1..388: mol_type = unassigned DNA
ggctcggcccgcggagtcagcgctcctcccgcgccgacctcgggctccgggcggccgccggggggcgccgggcgcatccttcgctgccaactccccgcccgtgcccccgctcgcgcctgggccccgccgcactccagcagaagccattacagagaacaaactaccttcttgtctccgagatgggtccccggggaggaaggcaaattgcctgcctcgtgcataataagccaggcgtggagagcagcgcggaggaggccgcggcagccaccgagcgggcagagcctcccgcccccacccgccgcccgcgcctgccgagccccctgccgagcgggcggcgcgcaggtccggagaatctcaaaaggcttggaacaccgggctgcttcccggt

SEQ ID NO: 3245 - DNA, 241 bp, Homo sapiens
  source 1..241: mol_type = unassigned DNA
agttttctacctagatcgcgccagtgcgtcccgggtctcaccagtccccatcaggcgttgccctccccgtccctacccagctccctctctccgccctcccgcgagtgcactcaagcgccctcgttccacccaccttcagcgcttccccaagcctggaggagcgcccagagcagcagaaacagcaggcaccccatatcgcccggcgtggggacctcgcggagcgccgctgcgcgccgccctc

SEQ ID NO: 3246 - DNA, 232 bp, Homo sapiens
  source 1..232: mol_type = unassigned DNA
cgttttccctctcagcgctcaggctgggggcggcgtcggtgccagtctagtccagggcgaagcttccagggccggctcgggccgggctgcgggacccgccgtggagcgcaaagtgcctgaagcccccgcgcgcattcggccctgtcttcaaaggccccttagaaatgcaagaggccaggcgcagaaacacacacggacggcagttttatgagaaaatgcagataaagagccc

SEQ ID NO: 3247 - DNA, 214 bp, Homo sapiens
  source 1..214: mol_type = unassigned DNA
gcctctctgtttccgcgccccctggaccagttctggtggggagctggaaggcaccgagtgcgtcccggccaagaagggcggatagccttgtgcgagcagcgttcggctggcgcggcgcggggtgtttcttatgctaaaggaaaggatggatctcttgtctgtctagggtccttactttttaaaactttcctaattgcggcactggaagggattc

SEQ ID NO: 3248 - DNA, 250 bp, Homo sapiens
  source 1..250: mol_type = unassigned DNA
cgcagcggggtcgccccactgccgcatccttactccgcgccctgcgcgcttacctgcccacgaagttctcgagcaccgagctcttgccggcgctctggccgcccaccacggcgatctgcggcagctccagcaggcagctctgtcccagcgccgaaaacgcgtcctgcagacggttcaccagcgggatcagctcctccatctcccggttccccatcttgcccgaggggccggcgaccagctggtccctgct

SEQ ID NO: 3249 - DNA, 201 bp, Homo sapiens
  source 1..201: mol_type = unassigned DNA
tggccggtgaagccccaggacccgtccgcttggggttaaggcaaggggtgcggcacgaggagcgcagggagccccgagtcccaggcgcagacccagctgcggacccgccgtacagccctggtgttgcaagcgtggaccgtgggcgtaaggccccggcgggaggcactcggcccggccgcggccgggtctgcagggtcctgg

SEQ ID NO: 3250 - DNA, 467 bp, Homo sapiens
  source 1..467: mol_type = unassigned DNA
ccgggcaccggcgggagaggggggagaagcggcgtggagaggatctggcaagggtttgcctccaaatccagattatgacccaacactttggacgcgaagcgaagatgggaaacggccgcttgctgagagggggcatttgcagtcctcccagaaaaggctggggcaggagagcgtgcggccagaggggtgggggtaccggagggggggtctcacctcctgctctatagccgggtctctcccgcgaggcgctgggaagcatgaggcatgcagcattcaaaatgttttttgaaaaagacggacttgaagcttttttttacaaacacgccattgtactcacttcttattcagagacgggctgcgcgctccgagctgcacgggcaggcattttccccggctttgttttacaaggtggggagagcggggctggacgcgggagggggcgggggggggagcgtgagaagaaacga

SEQ ID NO: 3251 - DNA, 201 bp, Homo sapiens
  source 1..201: mol_type = unassigned DNA
cgcacagctagcgaagcgactcgagggtcagcgaataagcgctggattcccgcaggctccggcgaccccagacccggccctccggcgaagacaggaaaacgtgtgtcgagagtcgctggagggaaccgtccgcaaatcgaagaagaaaccaaatcagcagcgaacacctgcaaattagtgccaagctgtgagcccctcgag

SEQ ID NO: 3252 - DNA, 232 bp, Homo sapiens
  source 1..232: mol_type = unassigned DNA
ccgggcgcgggggaggcgtgggtgctggggcgggcgagtccagactctccgtgggctggcttgtgggtgtctctccggaaacaaatgaggctgcaggagcggtgatcggtctgactgctcctgggggctccgaacccgtgggtggagagggtaaggcggaggccgtggccagcacttttccagtgacaatgtcgtcggggaccttttccttcacttcctgggagcaccccag

SEQ ID NO: 3253 - DNA, 222 bp, Homo sapiens
  source 1..222: mol_type = unassigned DNA
cacgatctcaggcccgctgatgaccgctgtggtatgaatgaggtcaccgcattcggagaggtggatgtccagatgtggactcaggaaatggcctcatcccgaaagtctcgggctagtgggcgtgccctctggccagtgcctccacgcccgcgccagaagggcagcaggccctcgtagggtccggcgtctcacccacccgtgtctcctttgctgtccctagcc

SEQ ID NO: 3254 - DNA, 239 bp, Homo sapiens
  source 1..239: mol_type = unassigned DNA
cagcgccgcgccccacgcccgtcaccgtcgccgccgccctagcacaccgcaggcgtgagtctcgccgcgaccgggagagccctcccagctgtgcgctctcgaggcacctggtcgggcggggaggcgtcgggtcggggcgcacaggggccaggcgggggcgctgctgcccacttcccgcctcccgggcgtgcgctccgccccggagcccgcacctcgcgcccgcgctccgcctggaagcc

SEQ ID NO: 3255 - DNA, 209 bp, Homo sapiens
  source 1..209: mol_type = unassigned DNA
gctcactcgccgcagcagctcactcctgctcgccagggagctcagggcagcccctgaagctgccagatccccccacgcaggcggcggcgctctgcactgcggagccgcgtcctgggggagcagtacccccagccccggcgccccgcagccagacagcccccctcagggtggcagcattccccggctagggtgcagggacccccggggcg

SEQ ID NO: 3256 - DNA, 380 bp, Homo sapiens
  source 1..380: mol_type = unassigned DNA
gtttagacagacaaaaccatttcatcaaagtgcaatgggagagaggaagaggagtaatgagaaggcatgtgagcggggagaaagaaaaagcccgggaggcgaaaacgaaatccacccccttgcgcccatttctgccagaggtttgcaggacgtgtctcaacctggcatcccgagtccagaacaaaagccacgggggctgcggcatgggcagggggaaggcgcgcggtggctgacgcggggcaggggccctggcgagcgcgggaggggcggtcagcagccgctcgcggggctggactgggagccccgtgcgactccgggtctggcgcctgggtcgggggtggttcccgggcctccctcgggggtcgccgaggcccggcctc

SEQ ID NO: 3257 - DNA, 394 bp, Homo sapiens
  source 1..394: mol_type = unassigned DNA
ggcctccccccatgagggcttcgagcagatgaggctcaaaagccgccccaaggagccctccccaagcctgacccgagtgggcgcgaacttctacagcagcgtcaagcagcaggactacagcgccagcgtctggcttcggaggaaagacaagctggagcacgtaagggcgactcgctcccgggggcctcggccaggcacctgccgcatgcaccctccccgtggtggtggcatgagcgcgcgcggggcgcggggggcaggcgaggggatcctggcaggcgccgacgtcctaggtcggattcgggggcttctctgcctgcagtttcttgccttaatgaccgggctgcggggaggggagggcaggttccctttcaggctcttggtccctgccgacccg

SEQ ID NO: 3258 - DNA, 201 bp, Homo sapiens
  source 1..201: mol_type = unassigned DNA
cccggcttctccaccccggcctctcatggggtctccgggcttgtccgttgtgagcagcttcactttggggtgctggcgggatggctgctccgtgcagggcgctcgggagttcagatcccgtggaaatgtctggggcctcctcttgcccagaggggacagtgagcagccacgctgcgacatgtttgagggacccggacgaag

SEQ ID NO: 3259 - DNA, 557 bp, Homo sapiens
  source 1..557: mol_type = unassigned DNA
cgggggaaaggtcggcgttccagggcggggaggatctgggagtggagttcggagacaaaatcggggtcaggcagaggagccagagggaaagccagcaaacgcgagctcgggtgagagccaccggaatgcgggaacgcagcttagccgggaacagggttcccgacaggggtcgcccgtggccaggacgcggccgctgaacagaggtcgcgcggcggttcctgcccgagggacctcgtgggcgggggccacacggaggccgcgcacggtccccggggctggcgggggcaggtgggaggacctcctccgggcccgcgaacctgatctggcagcggccaggtgcctggaagcgtttttaaatgatagggttacaaagacatgttggccaggtttgtagttagcgcagcaacgtggtttgcaggagcgcagaacgaggctagacagggtcactcggacgccgtgctgtcagtgggtgggggccgggagcaagcggcactggcttggagaccccgcggcaggtgacccctcccacctgggcagcgaggctgaacgatggcgac

SEQ ID NO: 3260 - DNA, 212 bp, Homo sapiens
  source 1..212: mol_type = unassigned DNA
ctggagggagctgggggatcctggagggtgggaagtggctgattctcggtggccggacactcatccagagcctgatccgtactcgtgttttcttggaagcgccacaactgcggggaaggagtctttagaaaccgtgccagtttcaatatggcgggctaaggtggcttttaaaaactgaaaataaaggttttgaggtgggaaaaaacccagct

SEQ ID NO: 3261 - DNA, 201 bp, Homo sapiens
  source 1..201: mol_type = unassigned DNA
aatagctctcctcggcccctccagccctgcccaaggggcctggaaatgttcgcagcttcaagaaaggctctatttaagcacaggatggggtggggcgggcggggccaagattgccctggggattgaatttatctccgctcccagcgatccccggcggataaagcgcaagtttgtgcacacggtcgactgagccattggaaa

SEQ ID NO: 3262 - DNA, 201 bp, Homo sapiens
  source 1..201: mol_type = unassigned DNA
gggggagccaggggtcccccgcttggggacctccgtgctgggcatcccgcacgctttggacgcgcgcagcctcaccgggagcgaactttgtctcgcctgcgggtgccacggagaggggctgggaagccgagccagctctggcggcgactgggggcgtccctggctttctgggggggcgggggcgcgcattgttgtccagga

SEQ ID NO: 3263 - DNA, 294 bp, Homo sapiens
  source 1..294: mol_type = unassigned DNA
tttgaaagtttttgaagcggcccctttttctcctctcctctctccgcaggcagagttgtggtgtggctgggtggtctgcgtgggcgtccgggggattcgcgggcactcgggacgaggcgagggcgcagaaaacttggagcccaatcagcacggagttgagcttccgcgccccaaccttcaggtgaccccgcgcggcggcggcggcagcagcagtggcagcggcgaccggagcccgcagcagctccgagcgcctccgggaggacaggcggcgagctcggcgaatcgtcatctgcc

SEQ ID NO: 3264 - DNA, 244 bp, Homo sapiens
  source 1..244: mol_type = unassigned DNA
ggcgggcgtgagcggcggaggagccgggcgcggcgacacgcggccatggagcgggagccggcggggaccgaggagcccgggcctccgggacggcggaggcgccgagagggcaggacgcgcacggtgcgctccaacctgctgccgcccccgggcgccgaggaccctgcggctggcgcggccaagggcgagcggcgacggcggcgcgggtgtgcccagcacctggccgacaaccggctcaagacta

SEQ ID NO: 3265 - DNA, 303 bp, Homo sapiens
  source 1..303: mol_type = unassigned DNA
cggggcagccggggccgggagagcgggcgcagcgcggcggggatcggagccgcgggcgccgggaaaggtcctcgccaggaggggagggaactccgggagcgcgagccagggggaggcgcgtcggaaagcgagagtgacaagcagcctacaagccgaaaagttcctcgcgggaggcgcgcgccgcgtgggctccgactcagccgctgcgcgtcgccgtggcacacaggctgaaaagtttgcgaagccacagaagccaggcccggcgctcagggggccttgatcctgttcccatggccccagacc

SEQ ID NO: 3266 - DNA, 286 bp, Homo sapiens
  source 1..286: mol_type = unassigned DNA
cgcggaggctggttctggtagtggctagggagtggagaaagcaaaccagagccggttcggttaccgactctgcgaagccccctcgaccccagcccagcgcgggagggtggcggaaggtggtgcaccgcagcgtggtccccgccgctgccgccgcggctttgcaaagtgtcagcgggggcgaaagcgagagtttaaaggaacaggaggcccattgaatttcctaccggagctttcaggggctctggctccccagtttgtttttgttttttcagctcggggatctgtt

SEQ ID NO: 3267 - DNA, 261 bp, Homo sapiens
  source 1..261: mol_type = unassigned DNA
gggaaccgagaagaggaagaagcgaacgcgagtaggagcgcagcgctcttcggacctctgaggctctctttgcaacttgccacactcgcagccctcacccgacactgaacaacaaccgcggggaggagaggccacttgcagccgaggctcgcaaactgtcggttccactcgggcagcgccaacccggtgcccgcggacggtgacttccgagccccagcgatgcgctccactgggttcaaaacagatctaattccacagcca

SEQ ID NO: 3268 - DNA, 201 bp, Homo sapiens
  source 1..201: mol_type = unassigned DNA
cactgaaaggcagaaatggggagtaggcacccagttcgcggtgggcagggttccaggaggcagctcccgctcggcgatagcccccggggcgcaactccccgcaggacgcgcacctgccaggacagccactaagaggatgcggaggttgggggccctctcggggacaaaatcagggcactccaaggaactctctgcgcgttc

SEQ ID NO: 3269 - DNA, 201 bp, Homo sapiens
  source 1..201: mol_type = unassigned DNA
gttggattgggtgcggttgtacctgtggagtgggtggcccggtgactgccacccgggccagtgctgccagcagatgtgcacatcctgggcgggggctggcggccgagtgtcactagtaggggcggcggctaggcagccattcgccgccttccaagcccggcgctgcgcgcagggcttggagcactcggtgctgagacgcga

SEQ ID NO: 3270 - DNA, 201 bp, Homo sapiens
  source 1..201: mol_type = unassigned DNA
caagctgcctcctgccttgggcttctgacacctttacagcctctgaaagggtccccggagaccccagagagaggcgggtgtcgaggggctacgagctcgcggctgacacccgcgctgcggaagagaatggcactgattgagggctctggggacctgggtcctggcgccttggaccttaggaccatgcacttcccggggcgc

SEQ ID NO: 3271 - DNA, 201 bp, Homo sapiens
  source 1..201: mol_type = unassigned DNA
cgcccggcccgcgggtcccaactttaccgccgccggccgaaccctgtccgcccgcggcgcgcacagccggcgcccgcgcacacgcgcgcacaaaccccacgcaacccgcggccgccccgtcccgccgccgccgcagcccgcctgccgcgcgcccacagcccggcccgagtcgcggggcccgagcgacagcgacggcgccgg

SEQ ID NO: 3272 - DNA, 201 bp, Homo sapiens
  source 1..201: mol_type = unassigned DNA
cgcccggcgcagagccgcggctcctctgcctgcgcccgcagtttgcgccgcccgacacagtgggggtggaggcagctcgcttagctgggcgctctggtgcggtgtcgcgttcaaagccctacttttgcgccgagggtttgtgacctgcagagagcgaccgcctgacctcaagctggctgcagagcgaggtcagccgggaca

SEQ ID NO: 3273 - DNA, 201 bp, Homo sapiens
  source 1..201: mol_type = unassigned DNA
ccccgaggtgagccgccgctgcgtccatctgttctcgcagctggattgtggagccgcgtccggaggagcgctggacacggacacccccaaccctttctccgactccgccccctggccccttgcacacacactcccgccaggaggggaggggaaggctcagcaactgcctggcctggctctgacccaccggcccctccgcag

SEQ ID NO: 3274 - DNA, 201 bp, Homo sapiens
  source 1..201: mol_type = unassigned DNA
gcgccgcccacgccacccgccaccccgggtcgcggccccggtccgggtccagtggctgcgccgccccccgccagcaacgcccgcgcggaatgagcgcgccgcgctgcccgcgcctccatccgcagggctcggcgccccctccccgcccgccgcccctacagccgcgcgctcattggcccggccagcccacggggagccgcg

SEQ ID NO: 3275 - DNA, 201 bp, Homo sapiens
  source 1..201: mol_type = unassigned DNA
gcggaaccccgcggccgagagccggccggcccagctgggcggggacacggcggcctcgggcttgtgctccagccccagccgggccccctcgcgccgctgcggctgctgcgcggtgcggtcgtgacaagtcacagcaaacttgccctccgcgccgttccaagccaccaggaagcgcaaccggtgcctctggggatcggcgaa

SEQ ID NO: 3276 - DNA, 344 bp, Homo sapiens
  source 1..344: mol_type = unassigned DNA
ctttgaccagatgaacggagtggccggaggtaagccgcgtgtcttcgcaggcccggacctgcgcggcccggaggtggtggatggggtgcagtgggtgtgcgggaatcgcaggagaggattggggctccaggtggacggtgctgactgcactggctttgaagactggaagtgggtgcaggaggaacctgcgacagctgagaccagggcgcgcgggcagatgcgccaggtcgccagcaaaccggcgtgcgtgcgccccggcgcgcccagccccgggcgagcgcagggatgggggtggaagaggcgtccccccgggtttcgaggcttgcgtaggccctctggccggc

SEQ ID NO: 3277 - DNA, 201 bp, Homo sapiens
  source 1..201: mol_type = unassigned DNA
ggcgcttgcccgaggcgggagtcgctgggtcatgctcttgcccaccaggtcctccgaatccctggtagggcagcgtctgtccgtgtccccgacccctcccgcaggcaactcgcgcgaacctggggctcgcagagagcgagcgcccgcggacaccggctgaacagtctggaggctgcgcgagggggcgccgcggggagggat

SEQ ID NO: 3278 - DNA, 218 bp, Homo sapiens
  source 1..218: mol_type = unassigned DNA
cgggtgccgtggtgcggggtggggacagccaactcagcggggacggaggaagctgggggcagctgggtgcgtgttttgcaccgctcacctgccggggctcggctcctggcggtgggcgagagggagcacatccgcccatactttaggaacctgttggggagatgagttcgtggggtcagaaagaagggaaaaatcctttgggcaagggagagaataat

SEQ ID NO: 3279 - DNA, 234 bp, Homo sapiens
  source 1..234: mol_type = unassigned DNA
cgctgctgcccgccaccgccgccgccgtccggctaccgcaccgcacacatcaattattcatcgcccgtctccagcttcccgggcgaagccaatcataggcggaggctccgctaatggggccgccgccgccgccgccgaggaggcagccagccgcgcgcccgggcgcaagcgacagctctccagggacggggatgggccgggggcgcgcggggggcgggggcgcacggggcgcgc

SEQ ID NO: 3280 - DNA, 201 bp, Homo sapiens
  source 1..201: mol_type = unassigned DNA
tgaggcggagagaggccgcttcgcgcctggggctcccgaaagcggccagctgtcctcctgctccccctgagcggggagcgctgcgtctcctgcgggctgcgggagacccttccagactcccgggtgggaaaaccacactgagcgccccgggaggttgccagatacaatactgtatctggcacccctgcccgggtgcccccg

SEQ ID NO: 3281 - DNA, 201 bp, Homo sapiens
  source 1..201: mol_type = unassigned DNA
agtcagggccgggggcgcacgccggaacacctgggccgccgggcaccgagcgtcggggggctgcgcggcgcgcacctggagagggcgcagccatgcgggcggcggcggcgggggggggcgtgcggacggccgcgctggcgctgctgctgggggcgctgcactgggcgccggcgcgctgcgaggagtacgactactatggct

SEQ ID NO: 3282 - DNA, 235 bp, Homo sapiens
  source 1..235: mol_type = unassigned DNA
gcaggggtgccctgtccgcacgtacccacgacagtgagcagcatgttgtccagcagcagcgccaggaacacgatgaacaggatgagcttccgcgagcggcggctctcctgcagccagcggaccagcgccagctcgctcagggccatggctccggggctccgctgcgggcgcggtgcgcggtgaggacccaaggcggccgtggaccccccattctcccgtcccccaggccgcggaa

SEQ ID NO: 3283 - DNA, 201 bp, Homo sapiens
  source 1..201: mol_type = unassigned DNA
tttcccaacagggcgcgctggcccgcgagccggaggaacctccgcccaggccttgccaagcgcccacccggagcaggccgggggcagtgaaggatgcggcgggagcggcgcgctgcagttccgcgacgtggcacgtaccttggaagcgatgacccagatatcggtagcggtggatgagccaggggtagaaggtggacggat

SEQ ID NO: 3284 - DNA, 241 bp, Homo sapiens
  source 1..241: mol_type = unassigned DNA
agtccccggctcgaggctgcgtcaatccggcgccggatgctaatgatgaaatcaaaatgtcatccaagttaaatgcggggagtatacggcgattgggcgcgtacaatggcaaatgggattaggcaggcgaaggctcagccgagccccggccccgcagccgcctccgccaccgccccctcctcgccttccctcggattttggcgctttggcttcgggctataagagcccgcccgttattggc

SEQ ID NO: 3285 - DNA, 201 bp, Homo sapiens
  source 1..201: mol_type = unassigned DNA
gacgatctgggtgatctgggtggaaggtggtgcagcaggcaggcagtggggaggggcggggaggaaatctagggggagggggcgccgaggctggtgaggcgtcccttccgcgccagggacatgcaggcaccggatggctgcgcaggggttcctgcccgcctggctctgggtgcgcccgcccagccccggtgcaaatgcccc

SEQ ID NO: 3286 - DNA, 201 bp, Homo sapiens
  source 1..201: mol_type = unassigned DNA
ccgcctcgacccatcaggcgcgcagggcccgctcccgaaactcgcgcgggctctcgcagtcggccgcgcggcccttagccgcgaagagagcgtcgcgcacggtggcgccgccacagccgtgggccgccgcgcccaggtagcgctccagctgcccgcaaagctcctgcagcgccgcctcgccggggcccacgcgcgccggcc

SEQ ID NO: 3287 - DNA, 217 bp, Homo sapiens
  source 1..217: mol_type = unassigned DNA
tcaaggctggcttgtgccagaacggcgcgcgcgcgcgcacgcacgcacacacacggggggaaacttttttaaaaatgaaaggctagaagagctcagcggcggcgcgggcgctgcgcgagggctccggagctgactcgccgaggcaggaaatccctccggtcgcgacgcccggccccggctcggcgcccgcgtgggatggtgcagcgctcgccgccgg

SEQ ID NO: 3288 - DNA, 201 bp, Homo sapiens
  source 1..201: mol_type = unassigned DNA
ctacactgcgcaagagatcgcaatgaagtccgtagatctccaggctggagccgcagagcgaggtggcgaggtggagaacgcggggctgggcctggacagcggccctggggtcgtctggagtcctcgctccctcaacccggaaggcagcggactgacatctgcgccgaagtcgcgcgtaccccacggagggtcgggaccctg

SEQ ID NO: 3289 - DNA, 201 bp, Homo sapiens
  source 1..201: mol_type = unassigned DNA
gaggggtggtcctgccccacccagggggtgtcgtgggcaaaggccctggggccacctgcctggtgccttggagggcgtagggcaggagccgccgaggcccgcgggccactgtggggcgcggaacttcagaccaggcacccgcggctcaacttccgggccaggggacccgcgggggccttacgaacctgtttggcccatttg

SEQ ID NO: 3290 - DNA, 201 bp, Homo sapiens
  source 1..201: mol_type = unassigned DNA
acccggggccggaggcaggcgcgtaaccatggggaccggggcgggcgatggcggcgggcgggctcctgccgcagggtggggatggctcttccagccgggcggccgccgtcacactgcagagcgtatttaaagagacacctcgctccgcgctcgctccccagcaccagaccctcgcccgaaaacgccgccgggcggactgca

SEQ ID NO: 3291 - DNA, 317 bp, Homo sapiens
  source 1..317: mol_type = unassigned DNA
caccgcccgggtccccgcctggttacagcatcaggccacagtgcgctggttcttgatcactctcctggctcggtggccgccccccgccctctcccagtccgcgtcgctgttctgcctcaggccccggtgcggccccaagtcccagcccagggcccttaggtccctccaggcggcggtggcggcactcacctgggtcgcggagccggggtctggcacggtcccgcaggtggtaaatgaaatcctggcagctgtcgtgctccagggccccacgggcacagagctcggccagcagctgcagcgcctggtgacagagcgcg

SEQ ID NO: 3292 - DNA, 221 bp, Homo sapiens
  source 1..221: mol_type = unassigned DNA
atttacagcgacgggtaaccacgcgggaggagcaggtcaactcccgacagtggaggtgaagatgcgtgcgcctcgcgcaccttgtccctcgcgcgacgccgtccgcgccgcccgcggttcggtcgggagcggcagcccgtgctccggttccggttccggttccggctggcgtctgcacctgcgaccaccgtgagcagtcatggcgtactccacagtgcaga

SEQ ID NO: 3293 - DNA, 201 bp, Homo sapiens
  source 1..201: mol_type = unassigned DNA
gtgggcggccaccatcccctcagagcacctggtatatcgggttggggttcgcacccgcagggcactgcggggcggcgtccggtgactgggtggggtcgccgctgctctctccctcgctgggggcggcagcctcttgcctgcgcggaggcgactcagaaggcacgtccgccagcaggagggcgggcgccgcagggctctcgg

SEQ ID NO: 3294 - DNA, 201 bp, Homo sapiens
  source 1..201: mol_type = unassigned DNA
gccttcccgaaacggagacttgccatcttttcagagggcggggaagctcacaccactctctgctttatagtgtccgtttcgcctcgcttgctggcccttcgcttacccgagacattccaggcacggctcgcactggagagggccgcgctgctgctgcgaccgcacggcgcccggggcaggaacatgctcgctctcccctgc

SEQ ID NO: 3295 - DNA, 201 bp, Homo sapiens
  source 1..201: mol_type = unassigned DNA
accgaagctaggtggaagcaaatgagcctggatcctgaggcgcgcctggcttggagccgccaaacttgctagcgggcggcgggggaggtggctcggcagcgccgggtgctgcgctcgcatatgcgcccgggaaggcagccccggccgccccgcccccagcccgccccccaccgctggcgcggcggcggcggcgtggggctc

SEQ ID NO: 3296 - DNA, 201 bp, Homo sapiens
  source 1..201: mol_type = unassigned DNA
tgcgctttctctctgccatttcgatgctgggagtggcgctctggccctggcgtctcctgggcaagcaccagccggcggtatctgcggaggtggctggcacgttgttattttttgaaatgagtgaggagggaggtctagatttaggcggccttacgcgcccgccttggcattagcagactgggaattgccgtggctatgccc

SEQ ID NO: 3297 - DNA, 230 bp, Homo sapiens
  source 1..230: mol_type = unassigned DNA
cctcccggctgcagaacgcctctcgttgccggagaaggggctcagcaaaattgactcttccttatttgtttccatccataattgatggggagatgagaacgtaacacatctcagcaccgagctcttgtcgcctggcggagaccctgtccaagacgcttccgtaaagcatttccagtcggggaacaaagcacggaaagttgctgggtagagcggccgggaggagacaccgg

SEQ ID NO: 3298 - DNA, 201 bp, Homo sapiens
  source 1..201: mol_type = unassigned DNA
gacagtggcagaggcgaccgcccttccccccatcatccataccccagccccagatctctctcttttcctcccggtgacactaagtcccagaccggcggccgtacttggccttacagtgcaaaatgtgcttggcgaggaagtcgaggcggcgctgtagcagctgagcgtgggggtctgcaagggcggccagctcggggaagc

SEQ ID NO: 3299 - DNA, 201 bp, Homo sapiens
  source 1..201: mol_type = unassigned DNA
cgaaggtcaccggctgcgtcttgaagcgagactggcgcggccgccgcagccggccccggcccttgggcagcttggcgggccgcacgggctgcgggaactcgtcggccaggcacacgaagtgcggcatcaccgcctggtaactggagcagatgcccatcagctcgccgggcttggcggccatggcgcctccggcgtctgcgg

SEQ ID NO: 3300 - DNA, 201 bp, Homo sapiens
  source 1..201: mol_type = unassigned DNA
tgctgttgctgctgctgctggcgctggcggcgcgcgcggacggcctggagttcggcggcggccccgggcagtgggctcgctacgcgcgctgggcgggcgcggcgagcagcggcgagctcagcttcagcctgcgcaccaacgccacgcgcgcgctgctgctctacctggacgacggcggcgactgcgacttcctggagctgc

SEQ ID NO: 3301 - DNA, 201 bp, Homo sapiens
  source 1..201: mol_type = unassigned DNA
agccccgagccgccagctttcaggcctgggggccgccgtccccggagctgctggcgcccacccgcttcgcgctggagatgttcaaccgcggccgggctgcggggacgcgggccgtgctgggccttgtgcgcggccgcgtccgccgggtgaggacgcgccgggggcgggggcgccaggcccgggtccaagggataggagctt

SEQ ID NO: 3302 - DNA, 201 bp, Homo sapiens
  source 1..201: mol_type = unassigned DNA
ttctgacgcggggctggggacgcagacactcttggctccggcagcccagcgcaacccctgaggtcgggcgccgcctcccgccttcagaaactcgggctccgagcgccgaattccagcgccttcgcccgtgggcacagggcgcgcggtgcagccacagggggcccgagacacgcgccccggcctggcccaggctggggaacc

SEQ ID NO: 3303 - DNA, 201 bp, Homo sapiens
  source 1..201: mol_type = unassigned DNA
cggcgactacctgctgggcatcaagcggctgcggcggctctactgcaacgtgggcatcggcttccacctccaggcgctccccgacggccgcatcggcggcgcgcacgcggacacccgcgacagtgagtggcgcggccaggcgcgaaggggcgggggcggggggcaacggccgccgggccaacccgctcagtcacactctga

SEQ ID NO: 3304 - DNA, 201 bp, Homo sapiens
  source 1..201: mol_type = unassigned DNA
gttgtaccaagttacaatcccacccacatggtgtgagaactccctgggcccctcctcctcagcaagacttggtatttcctgatatttaccagtctaatgcgtgggaaatggtgtctccttttaacttgcattttctctgattcatagaaagctgctcccagttccggttcatcgaccactcagctttccattttctgaatg

SEQ ID NO: 3305 - DNA, 201 bp, Homo sapiens
  source 1..201: mol_type = unassigned DNA
gccttcccggtacccgcagccccgacagctcagccttccccacctgaaagttccacctgaggtctccctcaactctgccctcctgcattcttggcgtcgcggggagtcaggggttaaaccccgtggcccgcgtggccccttccccctccgcagccccctcgcctccactcggcgccgcgcctggagcgtccgtcccggaga

SEQ ID NO: 3306 - DNA, 201 bp, Homo sapiens
  source 1..201: mol_type = unassigned DNA
ccccgggggtgccgagccggcggggggtgaggtggctgcgccggcggccgggctaggaggtgcgggcactgggggcgcgggaggggacgtggcaggccccgcgggggccacggcgatcccaggggccaggaaggtcccgctgcgggcacgcaatctgcctccgtccttcttcacggagccgtcccgggcaggcggcggcgg

SEQ ID NO: 3307 - DNA, 268 bp, Homo sapiens
  source 1..268: mol_type = unassigned DNA
agctggcgctggacaagccgggcaagtcgaagcggaaggtgaaccaccgcaagtacctgcagaagcagatcaagcgctgcagcggcctcatgggcgccgcgccccccggcccgccctccccgagcgccgccgacacgccagccaaacggccgctggccgcccctagcgccccgacagtcgcggccccggcccacggcaaggctgccccccggcgggaggcgtcgcaggccgccgcggccgccagcttgcaaagccgaagtctggccgc

SEQ ID NO: 3308 - DNA, 614 bp, Homo sapiens
  source 1..614: mol_type = unassigned DNA
atcggccggggctgctgccgccgggggcctgggctttccagccagctgtggaccaaacggtcttcccttacccaaattaactgcgccacgcgcaggcggcgcacgggttgggcttgggaatggggaccgcgaggcttcagcatcccgatgccctgaaagtctccccgcctcggggatttgtctctgtgttgcagctggcaggggccgcctgaagtgggagcagcgcctggagaaggcgggaggagcccggcccgggggacgggcggcgggatagcgggaccccggcggcgcggtgcgcttcagggcgcagcggcggccgcagaccgagccccgggcgcggcaagaggcggcgggagccggtggcggctcggcatcatgcgtcgagggcgtctgctggagatcgccctgggatttaccgtgcttttagcgtcctacacgagccatggggcggacgccaatttggaggctgggaacgtgaaggaaaccagagccagtcgggccaagagaagaggcggtggaggacacgacgcgcttaaagggtaaaggaaccggttccctcctttggtgtgggtctcccaagtttcaagatccagaacaacgggcaggatgactct

SEQ ID NO: 3309 - DNA, 201 bp, Homo sapiens
  source 1..201: mol_type = unassigned DNA
agatgcactttagctcagcgactcccactggcggaatcctcgcgctcaccgcgcgccgcgccaagatggtccaggccacctctactgcctccccgccagcgcccctcagccccctacacttgccctgcacacacactggcctgtagaggggattcgtcccgaaccgcccgggagtggggcctgagctcggagctggtgccc

SEQ ID NO: 3310 - DNA, 201 bp, Homo sapiens
  source 1..201: mol_type = unassigned DNA
gccctgcttcctttacaagaggctaagccgacaccacgcgagtgtgtacgcgctggggactgagcccccgaagcgaagccctgtcggaggagtttcaggcgggagtgggaacggctgggcgtggggtcagcaacggcgccacccggtagggtggggggagccaggcttgtcagagccagagcgcgtcaccgtcgccgcgag

SEQ ID NO: 3311 - DNA, 201 bp, Homo sapiens
  source 1..201: mol_type = unassigned DNA
gcactgcggagtagcgaggtagcgcgcaagcaagccagggcaggggccgggggcaggggcgggggctggagctatggccaggggtggctgctcaggccgcgtgagctgtcctccccactcgcacctggccgtcaggccacccggccatcagaagcctttactcacaccttgtctcttacctggaccgccggctggctgcaa

SEQ ID NO: 3312 - DNA, 201 bp, Homo sapiens
  source 1..201: mol_type = unassigned DNA
ggggaccggccgcagggcggggtttctcttggcggtgagtgagcgagaccgttaggctgaagcaccgggagactgtcctggcagctcctggccgccacccgcgccgcaataaaagcctctcgcggcttcccgcccagccagcttcgcactgattggtcgccgtgggagggacccgagttggctggaggcggcggccgagcg

SEQ ID NO: 3313 - DNA, 201 bp, Homo sapiens
  source 1..201: mol_type = unassigned DNA
aagccccggcgcgcggcgctcgctgggcggtgcgcctcttcccggcccctcactcaccgcagccgagccgggcactgtggggtgggtgtgcgtgcctgtcggggggtgtgtgcctgtgtcggggaggggtgttgctggggaactgttgctctccgtatcacggcggcagcgacagcatcgcccggcagttcgcagtacccg

SEQ ID NO: 3314 - DNA, 261 bp, Homo sapiens
  source 1..261: mol_type = unassigned DNA
gcgcccggcccaagcacggtgcgagcgtctcggggaggcggcgagcgagtcggtgcggagcgctccgtgcgtccgggtggttccgcgggccggcgggaccgtgcgcatttcaagcgcgtgcgggagtgtgcgaggcgctgtgcgagctagcggcgggcgcgccagggtgggaaaggcatcccgaacgcatcaggtgcagagaccggcacccaccgagagcggccgggagcgcacggcgagctccggtgtcaccgccggtcc

SEQ ID NO: 3315 - DNA, 201 bp, Homo sapiens
  source 1..201: mol_type = unassigned DNA
gtctgggttccaggctatcgcagaggacgtgcccccgggcgcgcagatggcgggagatgaggcggccgaactccgcgcccttgcgtggtggagcacacacgctccaacaagctcagcgtcacctgttcagccctctaacttttctccttctcgccccggggcggcttctctctccctttgccctggctgttgccctggccg

SEQ ID NO: 3316 - DNA, 201 bp, Homo sapiens
  source 1..201: mol_type = unassigned DNA
ggcccacgcactgcccgccggcccacgcgggagcctcgaggggcgaggcggaggctgggcgcagtccttgcagccagcagccacctccgcgcgctccgccgcggtccagctaattacctgctgcggcggcggccgtgccctttagggtgcattagtattcccgccgcgggcgctgccctcgcggcgtcggcaccgatgccc

SEQ ID NO: 3317 - DNA, 201 bp, Homo sapiens
  source 1..201: mol_type = unassigned DNA
caggcagtcccgcgtggcggcggccgggacagctgggcgcgctggcaggagagcaggcacagcgctccccacaggcaggatgacgcgggctccgcagcccgtcctcccacgctgccccgcatcactgcctcggccctgacgtgcgtgcgacagactcaccgcaaacagtccccagcgggagcacgaggccgggacaggagg

SEQ ID NO: 3318 - DNA, 201 bp, Homo sapiens
  source 1..201: mol_type = unassigned DNA
acacagctttaagggactgagcggcccggacgggatctgaaacctttggaggaccagccacgtccgcacagcccgcccatgcgcgctggcaccaggacccgcaggctgccagcggcgagtccccgccgcggttcctcagggcacccccggagaagggggcggccctgaggaatctcctgcactccggatgccctattttcc

SEQ ID NO: 3319 - DNA, 219 bp, Homo sapiens
  source 1..219: mol_type = unassigned DNA
gccgccgcctcctcgggagtcggagccgccgcttctccagtgggtgcagccggggtcccgacgggggtcgggcggccaccggggctggagctgcggccacggaggcttttgcgtttgcgccgcgccgagggcagggacagggactggggtgaggggctgtcccggaacgtccacagctggcgctggccctcccctgcctgacagcttcctggcccgggg

SEQ ID NO: 3320 - DNA, 268 bp, Homo sapiens
  source 1..268: mol_type = unassigned DNA
tcagccgccggcgaggccacccgggaggggcgggagccgcctgccagccactcggcagccctcctggggctcccctcgcgcgcccgcttgtttttcttccgctgcgcttcctcgcttgctggcgtctttgccttagcgggactcggcagccaggggccccagggggcggtgcagcaaactctcagcggtttgcgttcagcagaccaggttggggagccggcttggcgctgcagggaggtagagagcgggaggaagaggcagtggtagg

SEQ ID NO: 3321 - DNA, 201 bp, Homo sapiens
  source 1..201: mol_type = unassigned DNA
ggctgccctcgggcgcaccctgcggctcgggcacctgcagggcgggcagcggccggttctccatcatgttggccgccggcatgggggccgtcgcctctgcgctccccctgagccctccgccagcggcctggttcgcgtctccctctggctgttccccaccctcggccccgcggcacactccccaatcctggggccgaagga

SEQ ID NO: 3322 - DNA, 517 bp, Homo sapiens
  source 1..517: mol_type = unassigned DNA
cagcgcctactgccggggaagactcggacgaaaaccgaggcaaaccaaccattaaaaagtgcatccaataagaatttttccactcaggccctccgctgccgagacgcggcagactcccagagcggctcacccactcatcgaagcggattctgggcggtttcgggctgacccgcgctgtcagggcgcggactccattccgggcgcattgttaggagaaggggcccctcggggcggcgcgcctcgaccctgggctcccggtgcccgcagagggcggagatccgcggcgccctaggccacctatccgcatcttctcgagccaaacccccagcgcttacccggacccgacggcccaagcactgactcccaggcaagagtcgcccttcctggtccccagggaactgacactaccgcgggacgttccctctaggacagtcagcaggtcccaggagcgcagcacgcaacagcgcagagcagacccagacttttcccggggtgagacccggaggcccgcgctctg

SEQ ID NO: 3323 - DNA, 226 bp, Homo sapiens
  source 1..226: mol_type = unassigned DNA
cgtcggggggtcctgcctcccgggaggagaaggaaccggccgcctccgcccttctccccctccaggcgcccccgggagggggccgctgggcggcggaatcgcgcctccgctcggggagccaccacgcggctttttcgcggaattttgacgtcatccacacgtgggggaaggggctgggagagcaagaggaagcggcgggggagggggccgcggctgggagagcgcg

SEQ ID NO: 3324 - DNA, 201 bp, Homo sapiens
  source 1..201: mol_type = unassigned DNA
accccggaggcagagatgagagcgcctcaaaacttttttcccctaccccaatctccgaggagtaggtgggtgcacagtgccggcggcggcggggacgcgcggcgcggagcctggctctgggaggcagtggccgcttcagcagccgaacctctcgcggctccagcctccgcgcccagcagcccgcggctcgcctcccggaaa

SEQ ID NO: 3325 - DNA, 212 bp, Homo sapiens
  source 1..212: mol_type = unassigned DNA
tgcgcagtggggcggaggaggtggcgatggccgggggaggcggggggactgctgtttatttgcagctgggccaactccgcggcgcaggcggcggcggagcgcggggagctcgcggcgggtccagctgccgcagcaccatgcccgagcccccctccgggcagacgccgcgcgccgccggggccccggtaggggaggatgccagacgcccggga

SEQ ID NO: 3326 - DNA, 388 bp, Homo sapiens
  source 1..388: mol_type = unassigned DNA
ggcagccgcagcctcctcgcgcgcctctccttcccctacgccctccgctcccgccatggggccaacgtggggctcctaagagttgccggctctcagcggcgcaatctccagccaaagtcaccgcgggcggactatggcttagggcgccagaggggttagaggtacgggaagaggaaaagacggctaactgggaaaaaaagagaaaacgaaagaaaagccaaacgatgagtttccacaaggaggacggagtgaacagtctgtgccagaaggctctgcacatcgtcaccgagctgtgcttcgccggccaggtggagtgggagaagtgctcgggcatcttccctcgggacaggggcagccagggcggaagcagcacaggtaaccgggaggg

SEQ ID NO: 3327 - DNA, 201 bp, Homo sapiens
  source 1..201: mol_type = unassigned DNA
ttttttctctcctgtctttcaagacacgcgcccgaaatcgaggggtgagagcaaagaccgcccatcaacttagcaccttggatttagagctttcaatcccgaaaggaggttggcattgcccgggtcatcgagagagggagggagaagagctgaggctgcaacggctcctgggctccctagaccgggtttggcatccaggag

SEQ ID NO: 3328 - DNA, 201 bp, Homo sapiens
  source 1..201: mol_type = unassigned DNA
ttacttcccctggaagcccatcagttgctcaagtgacaaccaacaccggagagccagggttcgcccaacaggagtacgcggagacaccccagacgacagcgcgtcccccccacccccaccccgccctccgggcgctccaggccagcgtccaccagaccccacgcctgggggactgcttgggctctagcgagagtgccacgg

SEQ ID NO: 3329 - DNA, 212 bp, Homo sapiens
  source 1..212: mol_type = unassigned DNA
aggtgcagagacagtggagatgaggccctgatgcccggctctggtttcacgcgggcagcgtcagctggtcggtgtcacggagttcccgcgtcctccgcccgctcagcccccgcggacccatccactggggttgctccgcagcgcgactctctctcatcccgggggagggctaagggcggcggtggggggcggggtgggggggaagcggcggg

SEQ ID NO: 3330 - DNA, 250 bp, Homo sapiens
  source 1..250: mol_type = unassigned DNA
ccctccgtgtcttccgcagggtaggtcacagtcccccagatctccgcccaggtggcaaagaagatggagctgggggccgcgccccggcggcgcggggcccgaaggcgaggccgcccagcccgcaccccaccccacgcacggcacacgccgccgcggcccctgccacgcacaccctcgcgctgctccgcccacgtgggcgccggggaggaggctcgagagatgggaagaaaggctggcacccaccctcctg

SEQ ID NO: 3331 - DNA, 488 bp, Homo sapiens
  source 1..488: mol_type = unassigned DNA
ctgcaaacactggaggaaagctgcgttgcctcaattaaatacgctcccccaaaatacggagatgcggggagtgggggcccgggaaagaaacttttaaagcggcagtgtccttttaagaaggggcaaaaaaatctgtttatggccaccctccttccgctttaccttttctcctcttgacagtttcggccctggctgcccgagtcgggggtgtgttttcggtccctctcagatctgggcggggggcgggaggagtgagcgacctgggaagtcccgggggtggagagggggcgctccggggtctgggggcgacgtggacaccttctttggagcacggcggtgcgtttgggatttgaaggaagggccgaaggaagcggggtgcgggcgggcgagctgttcgccaagttgtctggcgggcgcggcgaggggagatgcgcaagtttgcagaccgggggttcggagcccggcgcccaggctggcggggggcgtgt

SEQ ID NO: 3332 - DNA, 201 bp, Homo sapiens
  source 1..201: mol_type = unassigned DNA
gcagagctgcagctcctgcggctcctcctctcccgctgcccagccgagctttgggctcccagtccaagctctccgcaccgccgctgctgctgccgctaccgccgccgccgccgcgcgctgccagagccgcctcctcgcctctctcctcctcccccggccgggttcccccctccctctgctctccctcccttctcctcagcc

SEQ ID NO: 3333 - DNA, 364 bp, Homo sapiens
  source 1..364: mol_type = unassigned DNA
actgcgcatgtgggcttggggcctgcgcgcaccggaggctgcaggcgctggggagggtgtggggggctgtgcgtggggctgccctcaccggaagctgcacgctctgggaagcgcagaggcgggggtgctgctcgcgctggggagcacgtgaggggacactcagggactgcccgcgcgaatggcttccaacgcatgcgccccaccccacatttcacagtcgccatgacgaccgggaggtccgcaacggctgcggggacaagtccgttgaggctgccaggcgagtcaggtctctctggacctcgcctgactcggctgggctgtgcctgaaattgacccagctccaccatactccttgattatgaga

SEQ ID NO: 3334 - DNA, 220 bp, Homo sapiens
  source 1..220: mol_type = unassigned DNA
gtgtaatcttttggttaaaatgtcacagctaagactaaacccgaagaaaagaatgaaaccacgggaagttcttcagacagtcgccgcaaggttatgggccgaagtggtgcaggggcggcgcccggggaagcgactggcagagctgtgcgcactgggggtgctgcaggcgctggggagagtgtggagaggctgcgtggagctgcgcgctcggggtgggggc

SEQ ID NO: 3335 - DNA, 201 bp, Homo sapiens
  source 1..201: mol_type = unassigned DNA
gcggctgagctcgcggagctgggtgagtgtctgcggctgaccggcccgtgggagcagggagcgcacagccggctggtgctggagggtcacggggacttacggggcaccgcgggagccgccgagcgcagggaagccagcaggcatctgcagtgcggagcctgcaaggctgaggcaggagatcgctcgaggcggggagggcgg

SEQ ID NO: 3336 - DNA, 201 bp, Homo sapiens
  source 1..201: mol_type = unassigned DNA
tctgagggcccgggcagccacccgcacttccccgccacgcggagaaagccgagcacacaggccgcagggtgggggtccgcggggagagggtggaagcagcgggttctccgcgcctggggtggccgctgccccacccaggcccccgtctgccctctacccttccagaccaatcgctccctgcaggtgccaacgcggtgcccc

SEQ ID NO: 3337 - DNA, 201 bp, Homo sapiens
  source 1..201: mol_type = unassigned DNA
gctccagttctcatctgctcaggtgtccccggcgccttggcgaactcggccactccagttcctcacgtggtgagcactcagggcagcgggtcgattttccgaggtcccatacctgggtttgaggggcgcggctcgcagcggcgggtgcaggggcgactgccagccctcaccccgcctcggggtgcgttcggaggccgacac

SEQ ID NO: 3338 - DNA, 358 bp, Homo sapiens
  source 1..358: mol_type = unassigned DNA
acccagggccactgcagctccggggcaccccggaggccacgacccgcgagtagatgtcccggaagaggctctccatgcaggctgtcaggtagatggcggcgtgctcgtggatgcgcagcgccacgcggctgtccaccatccagcgatacacgcggcccacggagaaggtgaggccgcagcgggccgacttgccgcggcccaggcggtcgccgccggcgctgctcatgttgtagagggacagtgcggccagcgcagccgccgtacagtgcgcggccaggccccaggacagcacgatctccatggcgctctggatctcgtacttggtgcacttggcgaagcgcaggctcaggcgctgcgc

SEQ ID NO: 3339 - DNA, 201 bp, Homo sapiens
  source 1..201: mol_type = unassigned DNA
agcgcttctccatggtcgcggcagctaatcgatgactgaaccgaacaaagagcagcggcgagatcaattcctaatacctatcgatgggcagcgggcggccgagccccggcgagccccggcagccgccgcccgccgccccagggcgtccgcctgcccgcccggggacctccccaatgcgcccagggcgcgcccgggggctcc

SEQ ID NO: 3340 - DNA, 328 bp, Homo sapiens
  source 1..328: mol_type = unassigned DNA
ctccttagccccgctggcctgggagccgggagcctcggaggagtctcccgccaagcttccttggctacgagcgcgcctggttctggtctgggagcagaccgtgcgcccgagtggggcacttgcccgaggtcggggactgtgaaccgaaagattccatctagccctgctgtcctcctggtattgcgatttgggggcgggtcactttacctctctgaattccgccccccgccttgcttatggaaggttgtaagcctctctggggtccgggatccctctttacctccacctttcgagcagagaaacaggcgatgccccctccctccctgcg

SEQ ID NO: 3341 - DNA, 201 bp, Homo sapiens
  source 1..201: mol_type = unassigned DNA
gaggtgtgtgttggaggtgggcagtcgccgcggaggctccagcggtaggtgcgccctagtaggcagcagtagccgctattctgggtaagcagtaaaccccgcataaaccccggagccaccatgcctgctcccccgcctcaccgccggcttccctgctaggagcagcagaggatgtggtgaatgcaccggcttcaccgaacg

SEQ ID NO: 3342 - DNA, 319 bp, Homo sapiens
  source 1..319: mol_type = unassigned DNA
gggcgcacacacacgtccacccagacactccgcgcgctccctcgcgcttttgcttgcccgcccgccgccgcctgctttttccctcctgctttcgccggtcgccttctccttctttttttttttttttttttttttttttttttttttttttttttggtaccatagagttgctctgaaaacagaagatagagggagtctcggagctcgccatctccagcgatctctacattgggaaaaaacatggagtcagctccggcagcccccgaccccgccgccagcgagccaggcagcagcggcgcggacgcggccgccggctcca

SEQ ID NO: 3343 - DNA, 201 bp, Homo sapiens
  source 1..201: mol_type = unassigned DNA
ccaagctcaactttacgccttcctcggtgcccgactctgcggccgaatcgcaactgcgagccgcaggtaatggcggagtctttggcactgccagctgtccgcggctgggggcccgaggctgggagggctccgctcccggaacatcgctccggcctggcctccaactttgcgaggagcctccttgcgctctcctcccgcggt

SEQ ID NO: 3344 - DNA, 370 bp, Homo sapiens
  source 1..370: mol_type = unassigned DNA
ctggaccctcggggtgcgggcccctctccttgtcctgcttttcagcatctttggcaattgcgcaaagttgcttgggttgcaatggtggggtgcagggggcgctcggctgctgcacctgttagtgctgggcccaggttgagaggcgacctccagcccccacaataatgtcccgggctctctggtttgggtcctcgcagcgcccgattgaccgccagcgatacgacgagaacgaggacttgtcggacgtggaggagatcgtcagcgtccgcggcttcagcctggaggagaagcttcgcagccagctgtaccagggggacttcgtgcacgccatggagggcaaaggtgaggcgcccccaccccgggccgccct

SEQ ID NO: 3345 - DNA, 201 bp, Homo sapiens
  source 1..201: mol_type = unassigned DNA
cccctccgccccaggcgccgccaagtcccagcactatgcgcccctccagatgtccgaaagcgcctctccagggcagcctatgtccctctgtgtccttcccgcgacgggccgggcccaccactccacacctcccgggtccttccatgtccatcaccgtgtgcctctccagcatcccccctcccctccaagttccaacatagc

SEQ ID NO: 3346 - DNA, 201 bp, Homo sapiens
  source 1..201: mol_type = unassigned DNA
gctgggcgcaggggccgccgcccgaggaccatgggtgggccagcgcctcgccgggctgctagctggcggggaccgccggcgcctgtgccgggccgcgcccgaggctgcgccgtccgtgccgcagcggccaatgcggcagcatccgcgaacgccaccgcggcgggccccgctggcccgggctgcggcgtgggggcgggggac

SEQ ID NO: 3347 - DNA, 201 bp, Homo sapiens
  source 1..201: mol_type = unassigned DNA
gtgcagcgacgcccagcccccgtgcggccagcgcgccgcgtcggcggatcctgcagcccagagagcccagggagcccagggaggggagcggggcgcgggcggggcagtgtcgcataaccgcaggcgcgccccgcgccgcccccgccccgggcccaccctccctcgccgcgcccctcccagctcacccacggacgagcggat

SEQ ID NO: 3348 - DNA, 263 bp, Homo sapiens
  source 1..263: mol_type = unassigned DNA
gcgcggcctcgcggggatcccgcgggcgggcgggcggccgggcgcgcgcggggcgggggcggcgcgcgcgcggggagcgtgtgggccgggcgggcgcggcggggaaagctgggcgcgcgagccgaggctgctgctcacctgcagccgcgccgctcacctgccgcggagtgcgcgccccgcgccctcccggcccgctccggagcccggccgccccccccttgccacagcgggcaactgcgccgacatgcgacacgagtagccca

SEQ ID NO: 3349 - DNA, 201 bp, Homo sapiens
  source 1..201: mol_type = unassigned DNA
ggcgggagaggagccccggccgcgtggaccctagcttgcgcggcaatcatcgcgccttgactctaggcccggctgctcagggaaggacagcccagggcgcgcccagcgagcttcagggggtacggaagtggttagggcagatttcagggtgaacaactaatattttacttaccaattcgttaaaaacaaagaaaacaaaac

SEQ ID NO: 3350 - DNA, 201 bp, Homo sapiens
  source 1..201: mol_type = unassigned DNA
tgccggggccgcgctcccgggcccgcgtcgccagcacctccccacgcgcgctcggccccgggccacccgccctcgtcggcccccgcccctctccgtagccgcagggaagcgagcctgggaggaagaagagggtaggtggggaggcggatgaggggtgggggaccccttgacgtcaccagaaggaggtgccggggtaggaag

SEQ ID NO: 3351 - DNA, 201 bp, Homo sapiens
  source 1..201: mol_type = unassigned DNA
aggggtcaggagcggcgggacagcgcgggaagagcaggcaaggggagacagccggactgcgcctcagtcctccgtgccaagaacaccgtcgcggaggcgcggccagcttcccttggatcggactttccgcccctagggccaggcggcggagcttcagccttgtcccttccccagtttcgggcggcccccagagctgagtaa

SEQ ID NO: 3352 - DNA, 201 bp, Homo sapiens
  source 1..201: mol_type = unassigned DNA
cgggcgccggcgtgaacccgcgtcccccggagcccagcgccgtgtcctcaggccccggccctgacctcagggcgctcaggtggaatggccccgcagctgcgcgctgctcccgcgcccccgccttgccccgcggaaatcgcccccgacagtcaacccgaccgggcgcgcggcgcccccggccggtccccgcccgaccccgcg

SEQ ID NO: 3353 - DNA, 215 bp, Homo sapiens
  source 1..215: mol_type = unassigned DNA
gaccctcccgcgcacacgcacatgcacacgctgcgcgctctcacgcgcatacacacgccctccctgccgcgctcgccgccgcggccaccatcgcggagccgagccctgcggagcgggaaccgaggccggagcggggaccggaggcagccgagccgggggatgccggcccggagcggagccgcgcgcggacggcgcgcccgggacggtgagtgtgg

SEQ ID NO: 3354 - DNA, 201 bp, Homo sapiens
  source 1..201: mol_type = unassigned DNA
ccgcgtaatccctgaagtggtcggccagggcgcggttggcccagccgccgtaggcgtcctgcaggcgctggggcaggtcccagtggtacagggtgaccacgggctgcacgcccagctcccgcagccgctccagcaggcgccggtagtagcgcagcccctcgcggttggggacgcccgcgctgccattggggagcactcgcg

SEQ ID NO: 3355 - DNA, 201 bp, Homo sapiens
  source 1..201: mol_type = unassigned DNA
ggacgggagctgcggggagggcggccgggggactccgcagagcccgctccgcccgcagccgcggggcgccgagggcagggcgggcgctcagcttggccccgccgccccgcccgcagttcctcgaaaggcggccgccctgccctggccagcctggcccgacccgggggcgttgcgtgcgggcggccccggggctgctggcac

SEQ ID NO: 3356 - DNA, 201 bp, Homo sapiens
  source 1..201: mol_type = unassigned DNA
aactcaacacttcctctctcccttctggagtcactttcccttccggaatatgcaagctctgggtggcccagccctgccgccagactcagtttccaagtgcgggggaaggagatgggcgctctcagccgcgatcccctgggaaggtggccactcacctgcgctctgaaatagaagaacagggcgacgctgcagacaacctgg

SEQ ID NO: 3357 - DNA, 217 bp, Homo sapiens
  source 1..217: mol_type = unassigned DNA
attggctgaagttcccccagcgatttgcatgaaccgagagggagtgtcttctgccgccctcccttcaagagcgctctgactgcagcctcccagggaatgcgcggccgagggaatgcgcgcagctcacaggccctgggagtgagctggtgcccggcgacctggcacccgcgcctggatatggggcgtctacatcgtcccaggagcagcaccagctaca

SEQ ID NO: 3358 - DNA, 317 bp, Homo sapiens
  source 1..317: mol_type = unassigned DNA
agcaaaagcctctatttgcagcaccgggcatgttgtccgtttaacgcgctccggggatctgctggctcgtgctcccaacccaggggtggctatacgtctcgcgcctctgttcctgggtagactcccccatctgtgcattttggccccttcacttagcaaagagatgtgcgaagtgtgcgcctggagacgagccgcctcggtgacccccatccgcccgcagcggtggccctggttccccggatccgcgcccgcgccctgcgggtctcccgcgccgcccttgcccgccggaccacccgggctcagagggtcgctcgctt

SEQ ID NO: 3359 - DNA, 201 bp, Homo sapiens
  source 1..201: mol_type = unassigned DNA
gaggggaggcacggagcgggaggagggggacgcggagaagactgcctggccccgccggccccgccaacgtgacggtcagccccgccgagcgctcgcacccgctcacactcatgatcactcgcacactcgctccaatacgtgttaaggcgcgatcgcggggtccctggcagccttcgctgcaccctcccccccacaggggta

SEQ ID NO: 3360 - DNA, 201 bp, Homo sapiens
  source 1..201: mol_type = unassigned DNA
ccgcccaacacggagacgcggagtcccatagcggtggcagaaagtgagcaccaactcagcaacagggggaaggaaggggacgccgggcggccagtgggacgtgcggcagccgagggctgcagcctgcccctgcagcgcgcccgcgcttacctgcgatctcctggtaggggatgtccgccaggctgaatcccttggcaccgt

SEQ ID NO: 3361 - DNA, 201 bp, Homo sapiens
  source 1..201: mol_type = unassigned DNA
cagccgggccgagcgcgctgcctgagctgagccgccgtaggtgaggggcccgcgtccccgcccgccctgggcgccgcgcctggcactgatcctgccggtcgcccactgtcgccgccgccgccgcccgcgggcaccatgacagctctgagcgctggggttacaggttggtcaccgccgccggtgcccgggaggctgcggcgc

SEQ ID NO: 3362 - DNA, 201 bp, Homo sapiens
  source 1..201: mol_type = unassigned DNA
agtgtgactgatgcattcattatttaataactccggggtgaaacttgaggtgaacggtttcaccctttcatactcaggaatggaactagtcctcggtaccgtgcacagtctgacctcacgctcgcacgctgggctcccggcctcctggcagtgcacttaagtgtaccccgcgtgtgcccggcggactcccgtgcacaccgc

SEQ ID NO: 3363 - DNA, 201 bp, Homo sapiens
  source 1..201: mol_type = unassigned DNA
gcgcagcttcactccggatggttcctgtcctcccgcgggtccgagggcgctggaaacccagcggcggcgaagcggagaggagccccgcgcgtctccgcccgcacggctccaggtctggggtctgcgctggagccgcgcggggagaggccgtctctgcgaccgccgcgcccgctcccgaccgtccgggtccgcggccagccc

SEQ ID NO: 3364 - DNA, 221 bp, Homo sapiens
  source 1..221: mol_type = unassigned DNA
agtccaggtctgcgctcacacgcgcggcgctcacacgcgcggcgcccacctggctgcagtcccggccagggccagcgcgccgcggctgaagggggcgctcggactcctctggggcggcgcgcagccgggacagtctcgcatgacgcccgcgctccagcggccccgggacgcggcctcaccctcaacccctggcggtctcagcctcggtctttgtgtctcgg

SEQ ID NO: 3365 - DNA, 311 bp, Homo sapiens
  source 1..311: mol_type = unassigned DNA
gccccgccccgcatccgcacacaccttttccgccgctgccctgagcgcagcgacaagggcccccacacctccgcggcccgcaatgctccggggccaagccgaggcagggaggcgctcccgcagctcctgactttacaacccgcgcgcgtgtgcaccgagccgcgggcacaccgcgaacacacacacacacacacacactcgtgcgctcccgccctccgcccggcccgggctctccgaacttacctccgaggcgccccgggcgcagggcccgcccttctctgcgggtctccagcggctgttcggcagtggtc

SEQ ID NO: 3366 - DNA, 308 bp, Homo sapiens
  source 1..308: mol_type = unassigned DNA
ggtggcgggcagtgtggtgatggcctttgaggaggtctgcccggagcgcatcgacctgattcacaaaaactaccggaaactctgtaacctgctgatcgacgtggaggagtggggccaggtggtcatcatcagcatgctcacccgctacgcccgcacgcagttcctgagccccacccagaacgtaagtgggcccagcccaggcagagcgggccgaagtgtgtcccggggaggcgcccacagacccgtcggtctccccgtccaggaatccctactagaggagaacgcggaaaaagccttctacggctcag

SEQ ID NO: 3367 - DNA, 201 bp, Homo sapiens
  source 1..201: mol_type = unassigned DNA
cgagaactctgcgggtccagaacgcccgcgcggacgcttctcttacggcgccggaagccggcgccgagtctgtcaccgggcatccctctgttgccttgacgacggcgggcgctgtaagagtggagaagctgcaggtgctgaggcgcggtgaaagaaaccctgggagccaagagcacgaggagctggtgtctgtgtcacatt

SEQ ID NO: 3368 - DNA, 201 bp, Homo sapiens
  source 1..201: mol_type = unassigned DNA
aggtgactccggccctggcgaggcgcgatccggctatgcgtgtgtgtgcctctccccggagaggaccccggccgccgagggcacgcggggcccagctaccgcccgcctcccaaccagttgctggctcgtttcgatggtgcaaattgtttttttttgctccccactaaatagcaacagtttggccacgctcaagtggaataa

SEQ ID NO: 3369 - DNA, 201 bp, Homo sapiens
  source 1..201: mol_type = unassigned DNA
gggacttggtgactttagcaccattttttccttttccttttttttttttgcctccccaccgtctgttgcaaccctgcaaagtctcggagtcggagagcgcgcctcgcttccagagcccccggacccggcgagtcagcgatcgccgagccggccaccatgcccggcagaccgcgccactaggcgctcctcgcggctcccacc

SEQ ID NO: 3370 - DNA, 630 bp, Homo sapiens
  source 1..630: mol_type = unassigned DNA
agccccttcctgccactcggagcagagcgcgccagcgcgaggccgggccggccgcctgcgcagcgccgggctaattttaactgttgattacatcttcagcgtgtcctttcataggtctcatttgtaattgagacgaatgattacagtggggcgggaaggagcagctgctcattaattaatttctaattaaaagtgcctctcgttctcgggtgactaaagagaaacaccgttcgctgggcgatattgactcggatggaatttatttgctaacgcccggaggaatggcccctccgtccaccgcgcggccgggactgtcctggcccctcccggcctgagccgccggcgagtgaccggcgagtctgcggccaggccgggctgcgcgaggtggggctgacgtcagagcctcctccgcttcaagccgcgcacatctgacttgacgggttcgcgcgactcgtttttttttttttctttttcgtaaaatatgtatttctgtcgccgctgcgaggccgctcggtcccagagccccctcgagcctccggaatgcgaagttaaaggaatcgcggcggccaccgctgctcactttgttacccggttagaaaagtttgcggagcgcggggatggactaaccgg

SEQ ID NO: 3371 - DNA, 201 bp, Homo sapiens
  source 1..201: mol_type = unassigned DNA
gagggcggggcgggcggcggccgcgcctctaatcccggcgctgcgtgtgggagcggccggatcagggaattagcgctgtaacttcggattagtaacgctcgctaaatgagtgcctaattccgacccttcatgcttttcagcgtcgcggctgagtcctaggaggcctcctggccaggctccctccgcgctctggtcccattt

SEQ ID NO: 3372 - DNA, 239 bp, Homo sapiens
  source 1..239: mol_type = unassigned DNA
cccgtgaaccccgcccggggacaccccacagcagccgcgcccccaccctcctctccccaaaccgtcccgggcccctgtcgccgccaccttctgccaaaccgtccccatctctccagcggagctacagcggggcgcggcgcacacaaagggggtcggagggtggagagtacagaaggagggagagatcccgccagggctcgtggcacgggcctgggagcagctatttacccgatttcttc

SEQ ID NO: 3373 - DNA, 201 bp, Homo sapiens
  source 1..201: mol_type = unassigned DNA
gacgtcagccgcgcgggtcccccgagcccgcgccgcgcccagggacctggcccgccccctgcgcccccactctcttacccctcccagaaacacagcacgcgggccctccccatgcaggccactccctacggagccccaggccagctttggggcggtgaaacgaaggtgtcaaggcatagtactcctccgggaggctggaca

SEQ ID NO: 3374 - DNA, 221 bp, Homo sapiens
  source 1..221: mol_type = unassigned DNA
cagctgccaacttcgcgcgcggagctccccggcggtgcagtcccgtcccggcggcgcgggcggcatgaagactagccgccgcggccgagcgctcctggccgtggccctgaacctgctggcgctgctgttcgccaccaccgctttcctcaccacgcactggtgccagggcacgcagcgggtccccaagccgggctgcggccagggcgggcgcgccaactgcc

SEQ ID NO: 3375 - DNA, 201 bp, Homo sapiens
  source 1..201: mol_type = unassigned DNA
gcggggaggggatggggtggcgggagaactgcccctccccccagccacaaacccatcaggttcccaaacctttcctggatcctcttctccgcgcccccgcgagcccgggatccaggggatggagaactcggggcggaggagcgccgagccaggcgggagggaggccgagccgtgggcgggaggcggaccggcgtggggctg

SEQ ID NO: 3376 - DNA, 246 bp, Homo sapiens
  source 1..246: mol_type = unassigned DNA
gccccgggggcccctagccaagcaccgcctggtgcccccggcccagggtcgtgtgagccggaggctgagcccacgcaaggtctccacctgcacagaccacgagctggagaaccacagcatgtactgcgtgcaatgcaagatgcccgtgtgctaccagtgcttggaggagggcaaacactccagccacgaagtcaaggctctgggggccatgtggaaactacataaggtgagtcctaagaaaaccca

SEQ ID NO: 3377 - DNA, 223 bp, Homo sapiens
  source 1..223: mol_type = unassigned DNA
ccgactatgactatctggacctggacaagatgagcctatacagcgaggcggacagcggctatggctcctacggggggttcgccagcgcccccactaccccgtgccagaagtcccccaacggcgtccgcgtgtttcccccggctatgccgccaccggccacccacttgtcaccggccctggccccggtgccccgcaactcctgtatcacctgcccccagtgtca

SEQ ID NO: 3378 - DNA, 201 bp, Homo sapiens
  source 1..201: mol_type = unassigned DNA
ccagggcacggcgtcagcggattcacggagaaggagaaaagccccactgccgtgcagaagcctaggcccgggtgagacgcctgcgaaggctgccagcagcggaagagaaggggcgtcctccgtgctgcgcagcactcgcccgcggtaggtgggcgcggagctcagagctgggagccaaacgcaaacgctggcgagaagccc

SEQ ID NO: 3379 - DNA, 244 bp, Homo sapiens
  source 1..244: mol_type = unassigned DNA
gccccgctgctccagcggccgctgccttagaaaagttaacgagaaccagatgtggtggccactgccgaactttctcagagccggtgattggtccccagccgagggcctcagccaattagcttgctgggtgggcctggagtcccgccccgcccaggcgcccgcggagatccaggttcgaggctggcgcggcgcggagagtgggctggaggccggggcgggacgcgttgtgcagcgggtaagcgca

SEQ ID NO: 3380 - DNA, 201 bp, Homo sapiens
  source 1..201: mol_type = unassigned DNA
tttgcccggctcgctgaaggctggctctgggcctgggggcagtgcccgcgaagggctgcgatggcaggccccgctgccacacggcatcgagggtccctccgcctcggcgccaggcgcacgcccttctgccacatccctcgcggggcgcgccgccagggccacctgccctttcaagccccgccaggcagccaagggtgagga

SEQ ID NO: 3381 - DNA, 457 bp, Homo sapiens
  source 1..457: mol_type = unassigned DNA
ttgagggaggggccgggccttcgggcctgcagacccgccaccgcgcgtgcgcatgcgtcggccgcgagcccccgggtgcaggcctgggcggctccggcccgcgcacttgtccaggcgctgcggctcagcgcgccccaacctccagctcgggcggagagcgggggcgggactgaagcaccgtgttcctcaaagtatcctctcgccgtcggcagccctggcctcgcaaatgctccagcgcgctcaggcgcacgcagagactggcgcggcagcctccgggccaacggcacgcgagcaaagctggttggcgacctgggacacgcagtagaagttgaggctgcaccgactcccgccgcttcgggggaggcatgggcccgggcaggcctaggaggaagctgcacagcccgaggcccgggcgggagtggcgggccgcgggcaagggaacgtatatttggaaggg

SEQ ID NO: 3382 - DNA, 244 bp, Homo sapiens
  source 1..244: mol_type = unassigned DNA
gcgtcccctctgcgcgcggcgaggccgagacgtctcccgcggtgacagcgtgcaaggcggagacccggcgcgctcccagcccagggaaagcccaggcgacgcgaccgcaagcccgagcccaggtccctcggagccgccagggcgcgccgggctgcttgccttcctgccccttcctgcaggaatcccccgccgcccgcggccgggactccgggcctctcccgggcgtagattccagtcaccgctc

SEQ ID NO: 3383 - DNA, 206 bp, Homo sapiens
  source 1..206: mol_type = unassigned DNA
gagcgcagcggcggggcatggaagaagagggttgggggcgcgcgttacctgcaaaggttctcgaggtctccttccagccctggtggtaatcccgctcagcgccgcgccctcccccagatccaaacttttgctgggtcctccgggtggcggcggcggcgacggcggcggctgctggagccaagccctgtcgcccgcagcgtcggggc

SEQ ID NO: 3384 - DNA, 203 bp, Homo sapiens
  source 1..203: mol_type = unassigned DNA
agagagacagcatgagaacgcgcagagctgcaccccgcgggggccgggcgccagcagcaccgcgctgccccacccacggcgcgtctgctccccgcgctgcgcgcccagcggggcgccgagccccagaaactttagcacatggccggtccggcggccacggtggccgtagctgccctgctcttcgagcgccccccactgcttcc

SEQ ID NO: 3385 - DNA, 266 bp, Homo sapiens
  source 1..266: mol_type = unassigned DNA
cgtgaccactccccgccccacccccggggcggggtccgtcagaaaccccaagcgctcgcaatcgcctcccttcgtgggcgggatggggaaactgaggcccgaggccgccccgctggttggtgcaagaaccagcctgcaacccaagtcctgagctgttggcgccccgccccgtgcagttgaacccaacccacccggggctgtgggcagcgctctcttggggctgacacgttatcccgagcctgaggaccaagatcggagtgacctgg

SEQ ID NO: 3386 - DNA, 242 bp, Homo sapiens
  source 1..242: mol_type = unassigned DNA
cccgaacctccccaaacttggcggcccggggcgcgtgggggggacgccccgttacctgcgcggccataaaggagagatccatggtgtcgctgcagccagcgctcgagtcctcgctgctgccgctgccgctgcgggtcagccgcctgcacagttggcggggatcgggctgagcagcgagcgtccggagaccgcacggcgcactcggctgtctctgggcttctggctccagatctctactaggc

SEQ ID NO: 3387 - DNA, 201 bp, Homo sapiens
  source 1..201: mol_type = unassigned DNA
caaagcaaaacaggacaaacgaccgcggcgcgtcgacgcttggcgggtcacggtcacaaagcgggtctcagagccttcctcaggcggcggcaaagggggcgcccgaggtcaccggcaagagacagattactggcgcctcgggaaaacagagtggggaagggcgagactgtgtgcccatccacgttcgcgcgggtctgagct

SEQ ID NO: 3388 - DNA, 201 bp, Homo sapiens
  source 1..201: mol_type = unassigned DNA
acgctggcgaatgactatggaaacaacattcaacagcagtgttttctatgccaggtacacaaccgccttggcgtgggttgataaccatgcctatctcaccgcgtggcactgagccgaccgcacacccagggccccggtctccagggctcgcttactcgcttactgcgtgaagcatccatccccgcaggagccggagcagga

SEQ ID NO: 3389 - DNA, 312 bp, Homo sapiens
  source 1..312: mol_type = unassigned DNA
tggtcgtctcctccgcggccaggcgcatcctgcagcgcccagaccgccgcgtccccacccgcgtccccaaccgcgagcgctcgcctgggccgggccgggcgcccgagattcgggagagattaggggcccgcaaagcagaagagcagattcagaaagaaaaaaaaaaaagcgagaagtgcgagaaaaatatactgaattcagctaaacacacggcagatgaaaaaaataccttgctcagaagccaaaaacgagctcccgagccgtgagacactgttgcgcccccgccaggcgtgcaggccggatgttaggggg

SEQ ID NO: 3390 - DNA, 203 bp, Homo sapiens
  source 1..203: mol_type = unassigned DNA
gcgctggcagggggaggcttcggcaacgcctgggggcttcaggccagcctcctccgggctggaaggcaccgcacaggggcttccgccaacttcggtcctcgcgcggtcgggacacggccacacctgcccgcgggggtctgcctcccaggccgccgcaggccccccggagcctaagaggaccccacaagcagccaaagccagcg

SEQ ID NO: 3391 - DNA, 201 bp, Homo sapiens
  source 1..201: mol_type = unassigned DNA
tcccggggcgggcggcgaggggcgggagcccagagagtgccccgcccttgcccagtgctgggcggcgcgtggggggggtagggtccccgcttccccacgcggccccgcgcactccaaggaccccaacctgttaggtgagtccctgccccggggaggggcgctgggggcggcggcgaggatctagttgcgcgcgcgcatgcg

SEQ ID NO: 3392 - DNA, 283 bp, Homo sapiens
  source 1..283: mol_type = unassigned DNA
gtggcaaggtctggggattgagaggcccggtgagtgccagtcccgcaggctgcgccggtgctcggctcttactccagcccgggggccccaggctcctcgcgggctctggggcgctggtgtccgcgcagccccagtcgcttccgcagccaccgccgctcggctccgcggaggcggcgcgcagcgggggcgcccgggcgctgtccccctgaggcctcgggggctcagggtggcccgcagtgccactggccagggtctgcgactcctggggcccgccgccgccgct

SEQ ID NO: 3393 - DNA, 201 bp, Homo sapiens
  source 1..201: mol_type = unassigned DNA
gaacgccttccagcccggcctggcactggcgccggtgctcttcatcctggccatcacggccttcagggacctgtgggaggactacagccgccaccgctccgaccacaagatcaaccacctgggctgcctggtcttcagcaggtgagttgggcgggcgggcgagcgagcgcgcggtggcgcagggcagggcgccccgggaac

SEQ ID NO: 3394 - DNA, 247 bp, Homo sapiens
  source 1..247: mol_type = unassigned DNA
aggcgcagacctacgagctggagcggcgctttcggcagcagcggtacctgtcggcgcccgagcgcgaacacctggccagcctcatccgcctcacgcccacgcaggtcaagatctggttccagaaccaccgctacaagatgaagcgcgcccgggccgagaaaggtatggaggtgacgcccctgccctcgccgcgccgggtggccgtgcccgtcttggtcagggacggcaaaccatgtcacgcgctcaa

SEQ ID NO: 3395 - DNA, 427 bp, Homo sapiens
  source 1..427: mol_type = unassigned DNA
cagcgcgcctcgggctccgcgcgccgccagctcctggcccgcccgccggccccgccgcgcccgccagccccgcagcggagcctcggcccggccccgggccgccgccaccacgccgcgcgccgtactccgcgtcaagaatggggcggccaagctgcccaagccgcccgccgccgccgccgccgccgcggccgaggcgcccggcgccggcgcgggcatggagcgctcgcagagccgcctcagtctgtccgcctccttcgaggcgctcgccatctacttcccgtgcatgaactccttcgacgacgaggacgcaggtaagcgcgcggcccgccccccagacccccggggtgtcccgggatccaggtccggtagccccctccccgacccgtgcgccctcctccccacccccaatcccctgggaaggcgcccc

SEQ ID NO: 3396 - DNA, 246 bp, Homo sapiens
  source 1..246: mol_type = unassigned DNA
ctcgggggcggctgcacgtggccgtggccctgaactccctgcgggggcctcgaaacccgcctgcggggaggccagggcgacagaggactcgggagtcaccgctggtgcgtggcggcgtggagcgcgcttgttacggccaaggtgcgggtccggcttcggttcatcccaaggggtcaccgggatgcgaagtccgggacgttcgccgccgcggtgaccccggcgggggcgcatcccggctgtgggccg

SEQ ID NO: 3397 - DNA, 384 bp, Homo sapiens
  source 1..384: mol_type = unassigned DNA
tggtggcggaatccccggggcggccggaggcggcggccggggagtcgagaagcaagtactagcgctccaggaccgcgcgcgccgccccgcgccgccccgcgccgcccctcggtccagagcccccacccccggcctgtgagcctgcggcgctggtggagcccggctccaggaagaggagctcacccggtcccccctgattggacagcagcgaggtcccaccgggcgcctccgcggcttaaaaccgaagcgggggcgagggggaggtagagcccgccccctgcgcgtcgcggctgggagggagaggaggtgggagagaaggaagaggcggaggaggcagcgggcgccgaggctctgggacccgcaggcaagccagaccgacgcgca

SEQ ID NO: 3398 - DNA, 415 bp, Homo sapiens
  source 1..415: mol_type = unassigned DNA
cggggggggcaggggtcccgggccgcggggtgcgggggctgcgccaaaccctcgcggggcgtcccgggcgcacggagggctcggcgcccacccgcccgacggcgttccactcactggcgcccacggcccgcaggcaaagcgtggaaggagctgaacgcggcggagaagcggcccttcgtggaggaagccgaacggctgcgcgtgcagcacttgcgcgaccaccccaactacaagtaccggccgcgccgcaagaagcaggcgcgcaaggcccggcggctggagcccggcctcctgctcccgggattagcgcccccgcagccaccgcccgagcctttccccgcggcgtctggctcggctcgcgccttccgcgagctgcccccgctgggcgccgagttcgacggcctggggctgccca

SEQ ID NO: 3399 - DNA, 543 bp, Homo sapiens
  source 1..543: mol_type = unassigned DNA
cgctggaagaaaaacttcccgcgcgccggcagaactgcagcgcctccttttagtgactccgggagcttcggctgtagccggctctgcgcgcccttccaacgaataatagaaattgttaattttaacaatccagagcaggccaacgaggctttgctctcccgacccgaactaaaggtccctcgctccgtgcgctgctacgagcggtgtctcctggggctccaatgcagcgagctgtgcccgaggggttcggaaggcgcaagctgggcagcgacatggggaacgcggagcgggctccggggtctcggagctttgggccagtacccacgctgctgctgctcgccgcggcgctactggccgtgtcggacgcactcgggcgcccctccgaggaggacgaggagctagtggtgccggagctggagcgcgccccgggacacgggaccacgcgcctccgcctgcacgcctttgaccagcagctggatctggagctgcggcccgacagcagctttttggcgcccggcttcacgctccagaacgtggggcgca

SEQ ID NO: 3400 - DNA, 227 bp, Homo sapiens
  source 1..227: mol_type = unassigned DNA
tccagggcgcagacctcccactgcttcccgggtccctcccgggccttctttctgattctctcccttcccttctccgagttcctgctcacattcaggctgcgtctcggcctggctgccaaacagaacgacgttcttgcgcagagctgaccaggggtggcggcgggaggcaaggctcccggcaccggaaagcaaagcaaagaaaaaggcattgcagccatcgctcctgg

SEQ ID NO: 3401 - DNA, 323 bp, Homo sapiens
  source 1..323: mol_type = unassigned DNA
ccctgctccgcgattggcgggagccggagcctccctgaacccggcgcccacaccatgggctgagcccgtcggcgccgagggagttagtgcgacccggctcggcgcgcacggccaaggcacgcgcgctggcacacgcgggcgcggacacgcgcggacacacacgtgcgggacacgccctcccccgacggcggcgctaacctctcggtaagtccagcgccccacgcgacctgcccggctcccacgctggctacagcggctgcggggacggggaggaaggcagcggggtggccctaggggctcactctgcagggctcttccgacgg

SEQ ID NO: 3402 - DNA, 279 bp, Homo sapiens
  source 1..279: mol_type = unassigned DNA
ggcgcagaccacctggaaggggctgtggatgtcgtgcgtggtgcagagcaccgggcacatgcagtgcaaagtgtacgactcggtgctggctctgagcaccgaggtgcaggcggcgcgggcgctcaccgtgagcgccgtgctgctggcgttcgttgcgctcttcgtgaccctggcgggcgcgcagtgcaccacctgcgtggccccgggcccggccaaggcgcgtgtggccctcacgggaggcgtgctctacctgttttgcgggctgctggcgctcgtgcc

SEQ ID NO: 3403 - DNA, 261 bp, Homo sapiens
  source 1..261: mol_type = unassigned DNA
tctccgtcggtggaggtcgcggctggcggagaccgccaagccagaggaggggatccgaggtcccggctgggcgaaggttctggagggggagaagacggccgaggcgtggaggggcagccgcggcggggcgacccttacctgctcactgcggggcctgtccgtggggccggggcagactccgcaaaggacgcgcagcctgcaagtccgcggcccgcgcggcgcggggatggggagcgtgtgcgccgaggagcgcgcgccgag

SEQ ID NO: 3404 - DNA, 364 bp, Homo sapiens
  source 1..364: mol_type = unassigned DNA
tgtacgcgcgcgtggcccgacgcgaggcccggccggcccgggcccggggcgagattgggggcctgtcgctgtcgccatcgcccgagcgcaggaaaccgccgccacctgaccccgccaccaagcctaaggtgtcctggatccacggcaagcacagcgccgctgcagctggccgtgcgccctcaccaccgccgccaggctccgaggccgcgcccagccccagcaagaggaaacggacgcccagcgacaaatcggcgcatacggtcgaacacggcagcccccggacccgcgacccaacgccgcgccccccggggctgcccgaggaggcgacagccctcgctgcgccctcgccgcccagggcccgagc

SEQ ID NO: 3405 - DNA, 242 bp, Homo sapiens
  source 1..242: mol_type = unassigned DNA
cagggtggaggcggtgcctgactgcccctctgcgtgtgccctgggaggtgggtttgctctggggacagaggtgctggacgtgtaggagcagacatgccgcgcgctccgaggaagcgccggaaccaccagaagcacagggacgcgggtgccgagagtccccagcactgaaaacggggatctcctcttctgtaagggattttcttcccttgtcttaacccacttctctagactcaagggacgcc

SEQ ID NO: 3406 - DNA, 285 bp, Homo sapiens
  source 1..285: mol_type = unassigned DNA
cagtcccgggccggggtggctgctccatcctcgtggctcagggaggaggcgttgggtgcgtatgcttaggggtgtgcccgctgccagggctgcagcggccgccacctccaaccagctgcaagccgagctgcccacctgggaccgggccggcccggcgggcttggctcccggcgaaggcggcggcgttggtgcgcggcggctggggcgcgggacgcaggcagtgcgtggcgcggctggcgtcttcgggcgccgccaccgagcgagggtgcggccccgggcggccgt

SEQ ID NO: 3407 - DNA, 222 bp, Homo sapiens
  source 1..222: mol_type = unassigned DNA
cgccaccgctgccgccgcctccccgcggagtgacgcgccctgcagccaaccggggcagccgggggggaggtccgggaggggtcctgggcggagccgggccgcccccttatcccacgggctcggggctgcttctcccgaaaacttcagccctaattgtcctgggaatgtccgaggtagagaaagggagcgagggagcaagcaagaagctggaggatcagtgcc

SEQ ID NO: 3408 - DNA, 201 bp, Homo sapiens
  source 1..201: mol_type = unassigned DNA
gtagcgctccctggccccgcgcgtcgcccgggggtcgctggctcggtgcgtgtggccgcctcgccgcctggttggagcctgctccgcggcgcagggctgcgctccgagggtccgctggctcggtggcctggggtttgcccggctcagcggctcatggtccggcccccgcgccccagcccccgccgccgccgccgccgccgc

SEQ ID NO: 3409 - DNA, 298 bp, Homo sapiens
  source 1..298: mol_type = unassigned DNA
ccggctctgggtggcggcgtcggggcagcgcgctcggccgagccggggagaggagcgcgggagacccggagcggagcggcaggagagcgcggagcgaagcggcaggagcagctcacagccaggagcgctctcccgcccccaacgccgcgctcccccctccaaaacggtttaaaaaaatccaccaattgcatggccgcgcacccccaaaaaggcacccgccgccacctggtcccggtgaactccaggaggcggaggaagggcgcggggtgggtgcggtgacaccgtgggaggtggtccc

SEQ ID NO: 3410 - DNA, 272 bp, Homo sapiens
  source 1..272: mol_type = unassigned DNA
cactcactccgacccgaggctgtctacccggcctggcatgtcccggcgctcctggggcccctgtactccgctggttcctcgctgtggtgtcccgcagcccgaccatttctgtgcttctaggagcccaccctgggcggcagggaggcgttgcgtggggctcacgagttccacgctgtcatctccaccagctcctacctcccaggcgcctgccctcccgcactgtcaggttctgcctccgcagcatttggcagatctgagcccggtccctgtca

SEQ ID NO: 3411 - DNA, 201 bp, Homo sapiens
  source 1..201: mol_type = unassigned DNA
cttagtaacatctgcagggctggctccccggccgcccaccccgccagcctgggtttctgtgtggagtgcgtctctgtgcccctggccagccgccggtcacgtgcacttcctgccaggggctggcaggctcctcacttgcccaaaccagaaatacaaggcacagtggccttcagctgagggatggcactctccctcatgctc

SEQ ID NO: 3412 - DNA, 251 bp, Homo sapiens
  source 1..251: mol_type = unassigned DNA
tacgctcctcgcgtccgcccgcgtctgccctaggcctccaccgcggcttcctctgtccccggggccgccctgctccccacagaccccactctcgggggccgctcccaggacccccgcccgctctctcctgactcggtccctgcccgccccgcctcccttcctcgggctccctacctctccctcgccggccccgacctcgggggcgctccggacctgctccccgaatatctccagctccgccttcagcctgc

SEQ ID NO: 3413 - DNA, 249 bp, Homo sapiens
  source 1..249: mol_type = unassigned DNA
cggcggctctcacctggagccgcacctggggcgccgagctccggggccgcggaaagaatgcgcgccgcccgtgcgctccgcctgccgcgtctggccacccgcagccgccgcgtccgcacctgaccatggagtgcgccctcctgctcgcgtgtgccttcccggctgcgggttcgggcccgccgaggggcctggcgggactggggcgcgtggccaaggcaggtgccgccgagcggagctccgagagcgggt

SEQ ID NO: 3414 - DNA, 249 bp, Homo sapiens
  source 1..249: mol_type = unassigned DNA
tctctagagctaacttttcagacctggaggtctccaaggcccccgcaactcagtgagtctcggggcaccaacaaatccccgcgggggtcaccgcgcccgcgaacgcagagtccacacgtggattcccgcgcctgtgatgccccgacccgtcccgggtccccgcacagacaatgccgcgcgtccttcccgcagccactccgggacccgcgccccgcgccgcccggacgtccccctgcgtctgccggggac

SEQ ID NO: 3415 - DNA, 201 bp, Homo sapiens
  source 1..201: mol_type = unassigned DNA
ggccgcggcggccggggccggtgccggcgcctccttgggcggcagcggcgaggagatgggccccgccgccgccgtggtgtccgccgtgatcgccgcggccgccgcgcagagcggcgcgggcccgcactaccaccaccaccaccaccacgccgccggccaccaccaccacccgacggccggcgcgcccggcgccgcgggcag

SEQ ID NO: 3416 - DNA, 201 bp, Homo sapiens
  source 1..201: mol_type = unassigned DNA
atggcccaggcggccgccccgcgcgccccagccccgccgcgcgcctgagcccggtgcggcgccagaagacagcgcgcagccgcccctgagtcgtggaggcggggaccaagctggaaggagcagcgactcccggaccgagtcgcgagtgtgcgccgtccgccgcccgccggatcccccggaccccccgaccgtaagtgccgt

SEQ ID NO: 3417 - DNA, 251 bp, Homo sapiens
  source 1..251: mol_type = unassigned DNA
accgcgcagcccgcgccccactgccgaccggaccccacgctgttgcccccagcgctgcgcgccctgcgcggacccgcgctgctggacgccgccatcccgcgcctggggcccacgcgagccgcgagcccctgcctgctcctgcgctaccccgatcccgcgccctgcacccgccccgggcccgcgccccgcgcccgcacgcaacggcacccggccctgcacacgcggctggctctacgcgctgcccggcgccg

SEQ ID NO: 3418 - DNA, 201 bp, Homo sapiens
  source 1..201: mol_type = unassigned DNA
ggggccccgctgagctgagccttgcgacccggtttatgtgacgtgagttccacctcaatctaagtgtgaggaagcgaacagcgttctgaaacgcagaaacgtgcccattcgaattgttaacgcgagcgcagagcccactgacaaagcaaaataagacaaaccgggagtcagaaaactcagcgacccacaggatccaccgtg

SEQ ID NO: 3419 - DNA, 201 bp, Homo sapiens
  source 1..201: mol_type = unassigned DNA
tttcagaacccgcgggtcacccgggagctcctcccgcagtaccagccgaaagctcccagtgccgaggagggcgggcagctgccctccccgacctcgccccgcccgcgcggacgcccccggccccacgcggggaccaccccgggactcccgccggaccccgcgcgcccgcggccaacctgcgtgcacctgcgccccgcgcca

SEQ ID NO: 3420 - DNA, 201 bp, Homo sapiens
  source 1..201: mol_type = unassigned DNA
aggccgagtccgcacggcgcccccgtgcagccagcggtcagtgaccgcgcggcccgggcgctccccgcgcgccctagctccccagacggggcccggacgcggacgtcttctctgcagttctgctctgatcgctagggatgggctctgggcacccagcggctgagggtggggagcggccagcgcctgatgtccagttcctca

SEQ ID NO: 3421 - DNA, 337 bp, Homo sapiens
  source 1..337: mol_type = unassigned DNA
gtggccccgccccagggccgcggggaggcgcccccgtgcggggcggagttgtcaccgccccctccccaatccccggggactgtggccccttcttaagcccgcggcgcctctagctgcccctcactcgtctcgcccgccagtctccctcccgcgcgatggcctcggcgctgagctatgtctccaagttcaagtccttcgtgatcttgttcgtcaccccgctcctgctgctgccactcgtcattctgatgcccgccaaggtcagttgcatctccaggcagcccttcggacacccggcgtcctgtgcccactaacgggcaccgatcccgggagccctgag

SEQ ID NO: 3422 - DNA, 201 bp, Homo sapiens
  source 1..201: mol_type = unassigned DNA
tgccctcggcgtcccacgtgtggcggcggccagcggcggcccaggaggcagccggtgagcgcctgcgagcagagtggcgggggccgctgacaggtcccgcgcagcccagcccagcccagccacgcggctcacaggtggggtccaagagcagtttggagcaacccggcgctacggagaggggtggacggctctgcacgggcc

SEQ ID NO: 3423 - DNA, 201 bp, Homo sapiens
  source 1..201: mol_type = unassigned DNA
ttctttgcggcgaggtcgcctgatgaattcaagggcaccagtgctccgcgagaactttctgtgggttgtgacgagaaccaagcggagcgcaaccctcaccgcacccggacaggatgcgctgcgcaatctgccgtagtttccctgccctaccccgggtggtccgaagctgtaaccctgccaattccctatcatacgccatgt

SEQ ID NO: 3424 - DNA, 201 bp, Homo sapiens
  source 1..201: mol_type = unassigned DNA
tcctgcagctctgtccagatccggaagccgccgaggaagggaggaaggcgggggtggggagagcgcgaccttaagcgctggcgggcggcgaggaggggccgcagcggcccgaggaagcgcctggaggcgtcaggggcgccgagtccccagggaggccgcgctctcgggaagtttcccatcggttgcccggagcaggatcgg

SEQ ID NO: 3425 - DNA, 1216 bp, synthetic construct
  misc_feature 1..1216: note = Description of Artificial Sequence: Synthetic polynucleotide
  source 1..1216: mol_type = other DNA
taaggtggggatygggaygygatyggggatggggaagggggttgtaggaggtttygtttgygttgtygtttttgttgggtatagygttttttattattygyggygatttyggttttygtaaggtggggyggygagtaggagtyggggttaggttaggggttygagttttygttygaggggyggggaaggygggtgaygtgagtygggtygggygggyggagttgggatyggtttygggaggygggggygagygygyggagaggtagaygygaggagggaggyggttgagtagygygggyggttttgyggygggygyggtgggygygggyggyggggtttygggattttygygygtttttttygygyggygtygtygtygygygtttttaygtttygygttttayggygttttygtttygygygtttttygtgttygttttttgttagttttygggtygyggtygtttgtagagygagygtttagayggagttttygggtaatttgagtggygtygatyggyggyggagtttttggtagagtttttygattyggtagygyggaggggattygygttygttygygtygygttattttaaattttaagtagygtygttttatyggygyggagtttyggttggaggtaagagtygygygtygggagataygtatygtgagyggtagygtygtyggttttttttttygtygtttyggagggygaagtygyggttttttagttttttgttgygtygygatagygtyggaataygtttygtttygttgtygttttygttgtgtygtyggyggagggggtygygagtttygygtttyggtyggaggatgtgygttttygygggtygtttagtttgagttatgygttttaayggyggyggygygtyggtyggtatggagtttygygyggtygygttttgattygttgtgygtttygyggtyggygggyggygggaggyggyggatygagagtyggagatyggygtygygggayggaagygagygggygygggygtygygtagatggtttgggygagttaggtttgaggtttygtttttygaaaygtgattatgtggatttaatagtttttaggatttaggtgagygattyggtyggygtygggtgygtgtgggygygtgggtgttaggttgggyggaagyggygtttttttttatgttgtaaattaagggattttttttygtttt

SEQ ID NO: 3426 - DNA, 365 bp, synthetic construct
  misc_feature 1..365: note = Description of Artificial Sequence: Synthetic polynucleotide
  source 1..365: mol_type = other DNA
ggygttygaygtttatttygggtttggygttttttttyggttattaygyggygtygtttttygggattttttagttttyggagtttygygygtttagagtygttyggagygygggyggggttagtttgggtagtygygggtygttgttgygtyggaagttttygtygttagggagttttttgggygttaggttttgggtttttgggygaagtygaygttagaatatgtttggtttygtatttagtttatygtatttttagygygygtgggtggggggygtyggttgaggtggggagggtatagtttagttttaggttatagtgtttygggyggggtagygyggtgyggggtgaaygttatyggtt

SEQ ID NO: 3427 - DNA, 201 bp, synthetic construct
  misc_feature 1..201: note = Description of Artificial Sequence: Synthetic polynucleotide
  source 1..201: mol_type = other DNA
tggygtgayggtttgtggggtttgyggggtgygttgttttyggatttgyggggggaggyggttgagttggyggygttygygggtttagtggtgagtgyggygtttttaygtttagttygaygttttyggagyggtygtygygtaggggtgggygygggtttttaggagggagggyggttgtgaaygygttttgtttttygc

SEQ ID NO: 3428 - DNA, 201 bp, synthetic construct
  misc_feature 1..201: note = Description of Artificial Sequence: Synthetic polynucleotide
  source 1..201: mol_type = other DNA
attaygtygttygtgtttattatttayggtayggaggaygaggtgatygatttttygtaygggttggygttttaygagygttgttttaaggyggtggagtygttgtgggtggagggygtygggtataaygatatygagttttatagttagtatttggagygtttgygtygttttattttttaggagttgtttagttagygc

SEQ ID NO: 3429 - DNA, 201 bp, synthetic construct
  misc_feature 1..201: note = Description of Artificial Sequence: Synthetic polynucleotide
  source 1..201: mol_type = other DNA
gggygyggygggygaggggttygggttgagttgygggtyggttyggatggygggyggygygggttggtygggygttttygyggttttgttgygtttygtgygtygtttgygygaggtgttygaggtgtgyggtygygatttygayggttttttgygygtggagygygtygyggygttyggattgygtttyggttagggyga

SEQ ID NO: 3430 - DNA, 201 bp, synthetic construct
  misc_feature 1..201: note = Description of Artificial Sequence: Synthetic polynucleotide
  source 1..201: mol_type = other DNA
ggygtttttttttygtttttggtttaggttyggttygygggtgtagttttttttagggttttttttttttttygggtygygygttygtttygtatygyggyggtttttyggtagtgtttgtttttattggaygtatagtgatygtgaygggtayggggygygagtttttattattataatgggtgtgtatggygyggggyg

SEQ ID NO: 3431 - DNA, 201 bp, synthetic construct
  misc_feature 1..201: note = Description of Artificial Sequence: Synthetic polynucleotide
  source 1..201: mol_type = other DNA
tttttttttaattgatttaattttttaattttagtttttygtttttggtatyggtttttttttaagtttttagattttaattttggttttygattygtttygttatagtttgggaagygggagaagtagygygygtttttttgyggatttttttttagggaagattgtggtgttagttgtttagggggattagggggttat

SEQ ID NO: 3432 - DNA, 201 bp, synthetic construct
  misc_feature 1..201: note = Description of Artificial Sequence: Synthetic polynucleotide
  source 1..201: mol_type = other DNA
agtttaggggtagggggtttagggtagttagatttttttaggtttaggaagagtagtttttagygttyggttgttaggtaattyggttttyggttttttayggyggttttttyggtgtgttttattaagagygatagggttggtgattygaggggygygtgygyggtygttagtttgggatttgtayggattttttttttt

SEQ ID NO: 3433 - DNA, 213 bp, synthetic construct
  misc_feature 1..213: note = Description of Artificial Sequence: Synthetic polynucleotide
  source 1..213: mol_type = other DNA
gttttttgtttgaattaaagtggttaggtatttagtttgtaagatgaataaatgaaggaaagaaggaaygaatgaataagggtttattttgtagagygttygygttttagygygtattaggtatattagtgttaaaggtgttgggggtygggtttagygttyggygyggttggaatgggggyggygaggagttttttttagttagtygtaggg

SEQ ID NO: 3434 - DNA, 201 bp, synthetic construct
  misc_feature 1..201: note = Description of Artificial Sequence: Synthetic polynucleotide
  source 1..201: mol_type = other DNA
gggaggyggtaggtagggggygttgyggggygaggtaagtgtagttygtygttgtttgtttgygagtttggggttgygygtygttttttatttagttgygygattygagygtygygtttatygygtttygtgggttttygygtttygaagggtygggattyggtttgagttttttttggttttyggtgtaagtygttgggt

SEQ ID NO: 3435 - DNA, 201 bp, synthetic construct
  misc_feature 1..201: note = Description of Artificial Sequence: Synthetic polynucleotide
  source 1..201: mol_type = other DNA
yggggtattyggtygtgtygtygtygtygttttagttgtygtttttgttttygttttygygatygttgttagagygtattattygygaggaggtggagggygaaagtttggatttgtgtttgtagtagttttataaatagttaagtagttgggtttggttggtggtgggttygyggtttttatygygtyggtttyggaygc

SEQ ID NO: 3436 - DNA, 201 bp, synthetic construct
  misc_feature 1..201: note = Description of Artificial Sequence: Synthetic polynucleotide
  source 1..201: mol_type = other DNA
aaggggggtttggttygttagygtaggggattygagttgggtaggatatgtgagatagttatagttttttagagattaygataagatttaattagtygygygtggttttyggygtyggagygggttagtttagttyggtttagttyggtttygygtagagttttygtygttttygygtatagagtygggtgttttttgygg

SEQ ID NO: 3437 - DNA, 324 bp, synthetic construct
  misc_feature 1..324: note = Description of Artificial Sequence: Synthetic polynucleotide
  source 1..324: mol_type = other DNA
ggtgggggtttgggagayggtygaagggggttygggtagaagtttygyggtygggtyggyggagggaagggggyggtygygttygggattyggtttttttyggttttatttatttgtttygaagagtggttttagttttgygtttttttttgygattttatatatagggatagttttaggtatagttttagtagtaggagtatggyggggygagggygygggaygttyggggattyggygggataygttttgtagygtttagggttttagttattgygggaygttttyggggtygtttatttygyggttttagttyggatttyg

SEQ ID NO: 3438 - DNA, 201 bp, synthetic construct
  misc_feature 1..201: note = Description of Artificial Sequence: Synthetic polynucleotide
  source 1..201: mol_type = other DNA
tygyggtgttgtygygttaagygaaggaggaggagggttyggygattttggggaygaaygttttggaygtttygttygygtttttttttygygttygtygygygtttgtttgttyggtttttttttygtttttttttyggtygttygggttaaaatttaaggttaggtttttgagggttygggttttttagtygttttttt

SEQ ID NO: 3439 - DNA, 330 bp, synthetic construct
  misc_feature 1..330: note = Description of Artificial Sequence: Synthetic polynucleotide
  source 1..330: mol_type = other DNA
ggattttggygtttttttaggttgttgygygygggttggggatygtgtatygttttgygygttagaygatgtattttttggaayggtagttgaggtaatgyggggtgtgaagtggyggygggtagaggggttygtaggggttgggattygygtgtttttttttgtttyggtgyggagtaygatgtgttygggygggggygaggaygttygggaggggttgggttgygtaygttygyggggtygtygtagatgggyggtttggaggygttgtagtttttgggaaatgggagttttygttttgttttttttgttgtttggttgggttgggtt

SEQ ID NO: 3440 - DNA, 293 bp, synthetic construct
  misc_feature 1..293: note = Description of Artificial Sequence: Synthetic polynucleotide
  source 1..293: mol_type = other DNA
tttagtattttagtttttaagtttttttgagtyggggttgygttttygttgtttttttyggtygtygttttttggygttagagggatttygyggttygtaygggtttgttttyggtttygttyggagggtgtgygggttttygtttygttggtttygtttgtttattayggygygtttaaatttaygyggttygyggttttttgygtgttttgtygatttygggtygtaggaggggttagtttygtyggtttttaygyggggtttgygtyggtagygttaygggttggaaygc

SEQ ID NO: 3441 - DNA, 201 bp, synthetic construct
  misc_feature 1..201: note = Description of Artificial Sequence: Synthetic polynucleotide
  source 1..201: mol_type = other DNA
ygttttygtttyggtttttygtyggtttggygggyggygaygtggggaggggtygtttagaagtyggggtygttygggtyggggaattttttygygtygaygtttattttttaygggtygtattygtygaggggtygaaaggggttttagtggaggaygyggtgggagttgggtttygttttagttgtygaygtyggyggt

SEQ ID NO: 3442 - DNA, 201 bp, synthetic construct
  misc_feature 1..201: note = Description of Artificial Sequence: Synthetic polynucleotide
  source 1..201: mol_type = other DNA
tatttygttaaagtyggataaagygtggttagagtgyggtttagttttttagtttgyggttyggggaggagggtagygygggygygggttgggggtggygyggggyggygtttaggatttyggtgtaggygagagtgyggyggatttgttttaagaggagagygaggyggatttgttttaagaggagagygtggggygtyg

SEQ ID NO: 3443 - DNA, 226 bp, synthetic construct
  misc_feature 1..226: note = Description of Artificial Sequence: Synthetic polynucleotide
  source 1..226: mol_type = other DNA
atggygatgtttttatttttttyggtaggtttttttaattaaaaagttggaaaygggaattygtaaataaygatttagggttttaaattatttgtaaagaygygatggggaggggaatatttgygygttttaaaattttaatttygaggtttttagtygygtttgattygggagtygggtgygtttttagtgttygygtaygaattyggygttttggtagtttyga

SEQ ID NO: 3444 - DNA, 363 bp, synthetic construct
  misc_feature 1..363: note = Description of Artificial Sequence: Synthetic polynucleotide
  source 1..363: mol_type = other DNA
ttgtaagggattatagttataatttattaggtaattatatttatygtattgtagaagttatgaatttggygggygtgggggggaaggggaagaagttyggygagattagaggggaaattygaaaaagtaagtttttgyggtagtagttaggaaatattygttaggaattggttgygattttaattttagyggttygaagttttagtttttttatttttatygyggtagagtygttttygtagatatttttygaggagaatygyggtttygagggygttaggtgagtygygtygtttygagttttygggttayggtaggtygatttaggygttttyggttygttygtgttttygygttygggtg

SEQ ID NO: 3445 - DNA, 201 bp, synthetic construct
  misc_feature 1..201: note = Description of Artificial Sequence: Synthetic polynucleotide
  source 1..201: mol_type = other DNA
yggttyggtgggggtttyggygagygggagggyggttggggatttyggtygygtygggygyggggttygggattygggagatygygyggygtygaagttaygygttagttttattgtttygygygtttygttttaggtttygggtttttttttygtatttygtaaagtygagattttttygtagttttttatttygagagg

SEQ ID NO: 3446 - DNA, 201 bp, synthetic construct
  misc_feature 1..201: note = Description of Artificial Sequence: Synthetic polynucleotide
  source 1..201: mol_type = other DNA
tygygttttttygttagtygtyggttaggagtttttyggtttttgagtaggaygygttaaagggagttgggaggtttagtagtttttagygtygttttttygggtgaygtgaygttttttttggagygygggttygttttygttaagtttttatygtaggtttttatagtygagttaygggaagatgtaaygtygggygag

SEQ ID NO: 3447 - DNA, 267 bp, synthetic construct
  misc_feature 1..267: note = Description of Artificial Sequence: Synthetic polynucleotide
  source 1..267: mol_type = other DNA
ygyggggtgggggygygggagtygttttttgttygtttygygygtatgttttygtygtatttgtttygtttagtgttttatatttyggggagtygggtggygttgggttygtygaggtyggggtttttttatgggagggaggtggttgyggyggaatttttagatgygtttttttttgtattygttttttgggaaggatttttttaaattttggttattttttgtttgttagtttgttttttggtagygaagttttagtagtttatt

SEQ ID NO: 3448 - DNA, 707 bp, synthetic construct
  misc_feature 1..707: note = Description of Artificial Sequence: Synthetic polynucleotide
  source 1..707: mol_type = other DNA
gyggtggygtyggyggttgtagggggaygagttagygtygyggygttgggagttagttgagttyggtyggygagyggaggyggtagygtaggtagagyggyggyggtagygggagttygagygttgygygtttattatggtygtttagggagagttyggttatttggyggygtagtyggatttyggttttaatagygagygtagtatygattttttagtgttyggtttygaggaygatttggtygtyggggygattttgtatagttyggagtggagygaggagygttttygygtggataggaagaaatttgaggttatgttataaggtaggtatttttygtgttttyggatttttygattgagtttttaattttttttyggatatttttatygygygtttyggygttygttattttagtttayggtyggtyggtttagttttaggttygttttttygyggagtyggaggatatttagggattggagatttygygggattttttatttttttaygttttttagatttttaggygttgggggttttgtgygaatttgattggttttagaaaagtygaaggtygagtttgtattggygygtttaagttgygttttggattttggagatgttaattttagttyggatatttgggttgtgttattyggattattygggtygtatagagtatgygtgattttttttatttttt

SEQ ID NO: 3449 - DNA, 201 bp, synthetic construct
  misc_feature 1..201: note = Description of Artificial Sequence: Synthetic polynucleotide
  source 1..201: mol_type = other DNA
ggatttaggattttgtgttygygtttttggagtygttggagttyggatttttgtaattgttggtattttgggggtttggtttagygttttgttgtttattygttttttttygttgtttyggaattaaagttttyggtttttttygttttygygygtttatttatygtygtyggggagyggttyggttygtatttagtatta

SEQ ID NO: 3450 - DNA, 201 bp, synthetic construct
  misc_feature 1..201: note = Description of Artificial Sequence: Synthetic polynucleotide
  source 1..201: mol_type = other DNA
taggtttygygtttgattttttagtttgygtagygggtattyggtygggaagaatttttttagtaggyggtttagtattaygtttaygygttygygttygygttygygttygtggtygygygggttttagttttaygtagygtttatagatygtgagttygtagggtagtgttatyggtttgtgtagtagtttygggtagt

SEQ ID NO: 3451 - DNA, 201 bp, synthetic construct
  misc_feature 1..201: note = Description of Artificial Sequence: Synthetic polynucleotide
  source 1..201: mol_type = other DNA
tattgggatttttatataygagttggtatatattagttatatayggttaattttagagggttggttttttgttttgggaygtttttaggttttygggtygyggtgyggagaatttaggtgggtgttyggtaagttatttattaggggttgttttttygygattttygttataagygtagggattygggggtygygttggtt

SEQ ID NO: 3452 - DNA, 201 bp, synthetic construct
  misc_feature 1..201: note = Description of Artificial Sequence: Synthetic polynucleotide
  source 1..201: mol_type = other DNA
gaaaattgtaaaatttgggagttattttgttttatttttttgttgtttggggatatttttygygagtttgttyggtttygaagaaggagtagaggggattygtaatttagtttttagagtttygttaggaaaggygygagagatttattggtttyggtaattttgtttyggygttyggayggagttygatgtttgygtagt

SEQ ID NO: 3453 - DNA, 203 bp, synthetic construct
  misc_feature 1..203: note = Description of Artificial Sequence: Synthetic polynucleotide
  source 1..203: mol_type = other DNA
agtttagagtgygtygagtatygtttyggtaggtggaggggttgygggaaataaaataatttgggtaggaatttgattggtagtaggtttatttttggttygyggtagggaatttaatggagatgaagaatggtggggaagggggggyggtgtttttttgggagtttaaygtaygtttttttattttgttattttttggagat

SEQ ID NO: 3454 - DNA, 201 bp, synthetic construct
  misc_feature 1..201: note = Description of Artificial Sequence: Synthetic polynucleotide
  source 1..201: mol_type = other DNA
ygygygttttttygygygtttttyggattygygtttgtttattttttyggttttgttgyggtygaggttttaagtyggttatttygtgtttaggtaatygygggggyggyggyggyggygtgaggagygggyggttgttgtttyggggttttttggttygagtttttagttttygattttyggygtttyggygttygatta

SEQ ID NO: 3455 - DNA, 201 bp, synthetic construct
  misc_feature 1..201: note = Description of Artificial Sequence: Synthetic polynucleotide
  source 1..201: mol_type = other DNA
gggtttttagtttggtttttaggygyggtggyggyggtgggataygygttaggygtttagagaaggatatgggataatggtttagttygaggaygttagaygtygtygttygattyggggaaggaagtttttgtagtyggttygggaattygaggyggggagggaggttagttttggaggtgygttgtygttttaaaataa

SEQ ID NO: 3456 - DNA, 208 bp, synthetic construct
  misc_feature 1..208: note = Description of Artificial Sequence: Synthetic polynucleotide
  source 1..208: mol_type = other DNA
gygtygygtygtygttyggtttttygaagtygttttttgtyggygygtyggtygtttgygttayggygggygttatttatttygggtagagttttttgttygtgtagygygttttgggtttttagygttgatttaygttygtagtaggtgaggaaggygtagtttggggaggaaagtaagygttaagaagggttagtggggygttttc

SEQ ID NO: 3457 - DNA, 201 bp, synthetic construct
  misc_feature 1..201: note = Description of Artificial Sequence: Synthetic polynucleotide
  source 1..201: mol_type = other DNA
gtaggggggttttatttattaagttatgttttattagggygttaggygggygaagtaaaggtagggatggygggyggggyggyggyggaggtggaatgggygttttttttttttatttggttttatttatttatttagattagaaaagygagtyggtttggagggagttygttyggggattygagygygtatttattagtg

SEQ ID NO: 3458 - DNA, 201 bp, synthetic construct
  misc_feature 1..201: note = Description of Artificial Sequence: Synthetic polynucleotide
  source 1..201: mol_type = other DNA
gygtttygtttttygtttyggyggttttygtagtttygtygtygttygygttygygttttggagtygygttataaagggttygygygtagtygtygtygtygtygtygtgygaggagttaggatggttttggtttaygtyggttatttygtgtttttagtgtttggttttgtgygaaatagaggtatygtttttttttttc

SEQ ID NO: 3459 - DNA, 595 bp, synthetic construct
  misc_feature 1..595: note = Description of Artificial Sequence: Synthetic polynucleotide
  source 1..595: mol_type = other DNA
aggaggttaggaaagtttattatatgygttggtttyggttgtygtayggtatttttatggttatygggatgatgagygtatttattttgggttygtggattgaggaygaggaggaagaggaggaggaagaagaagaagaggaagaggaggaggaggaggaggaggaygygtttaggttgagatggttygygtggatattgttatttattttaagattgttgttttygtygtygtygtygtygtygttgttgtygtygtygtygtygttattatttgttatagttagtaaygggtagtyggygtaggggttygggggagtttttttygtygttagygttattttaaatatttattaatagttatattgttgttattgttgtygtygtygtygtygtygtggagygygggaggggggyggggaggygtttgggttyggggygttgtgygygatttggyggggtgygtygagatatatatagygagtygtygtygttygttygggggggagggggatggagtgygygggtagtttttttttttyggttygygtttygttygtttygggttgygttggtttygagygtygagagttagg

SEQ ID NO: 3460 - DNA, 201 bp, synthetic construct
  misc_feature 1..201: note = Description of Artificial Sequence: Synthetic polynucleotide
  source 1..201: mol_type = other DNA
tatygtyggygtygaggyggygtttatgtttaatygtygtygttatygtygtygtttgtttttgygttygttttygygtttgttgttttttygtygtygtygtygtygtygttattatagattygtagatatatagttaagatttttgatttttaatattaatttttttttttggggaggggaggggayggagggaagggg

SEQ ID NO: 3461 - DNA, 269 bp, synthetic construct
  misc_feature 1..269: note = Description of Artificial Sequence: Synthetic polynucleotide
  source 1..269: mol_type = other DNA
ggtgtgatgttttyggtggataatgtttttygttttttgtttyggggtttagatagttggtgtttaagygtttataatgtagagttttttgtatttttttygggtygttatttgtttatttgttttatttaggatatttttttaaataatttttaagtggaaaaattayggttttttaggagatttattygggaaygaaygtgygtggggtagtttaaatttttgagtttagatttygtttttygyggttagatggtgyggtyggtggg

SEQ ID NO: 3462 - DNA, 201 bp, synthetic construct
  misc_feature 1..201: note = Description of Artificial Sequence: Synthetic polynucleotide
  source 1..201: mol_type = other DNA
ttagtttgttatygtayggyggtygggatygtagtttttgggtgygtagtgygtttttygttgygtttttttagagygygggtttygtgtttgtgttyggygygaygygatttttttgttagtygggtttygygtgtttttygygtttttygtagttttygygtagttygtagygttttttagtttygtttygyggtygyg

SEQ ID NO: 3463 - DNA, 267 bp, synthetic construct
  misc_feature 1..267: note = Description of Artificial Sequence: Synthetic polynucleotide
  source 1..267: mol_type = other DNA
gtaggagtttyggyggtttgtaggggyggtggygyggygttgggygygyggtygttagatggtagygtagtttyggttyggttygygggaggyggttaygygygggggaygyggggygyggygygttgagygygggtgtygaggttggagggygyggtygggttttygagtttttttttygyggtatttttgtttttatttttaaatgttttgtaagttaggagttttygtaggaatygttgtatttttatttttttttaaatttta

SEQ ID NO: 3464 - DNA, 287 bp, synthetic construct
  misc_feature 1..287: note = Description of Artificial Sequence: Synthetic polynucleotide
  source 1..287: mol_type = other DNA
ggyggtgtgtagagtggggtttgggttttttgtttttaagggtagttgggtgggtttygtgtttttttygagtggatttggtttyggttttaaatttagtygagggtyggttygtttttggggattygyggatgtygygagggggygtygygttattgaaggttgggaygggggyggtgygyggggyggygtyggagttygggatgtyggttttagagaygtygygtttygtttygaggaggtygtyggtygggtaagyggagttyggagttygyggagtttggatc

SEQ ID NO: 3465 - DNA, 201 bp, synthetic construct
  misc_feature 1..201: note = Description of Artificial Sequence: Synthetic polynucleotide
  source 1..201: mol_type = other DNA
ggtttgtttygagygyggygggggygtygggggygtyggtttttattttgtagggtatyggyggygggaggaggggtyggygtttaygggttttygttttygyggygtygyggattaggagttggaattgttgygggagtgtttgggagtygtygtgtttgttyggttgygtaaggtggttttygygttggtgttaggtyg

SEQ ID NO: 3466 - DNA, 201 bp, synthetic construct
  misc_feature 1..201: note = Description of Artificial Sequence: Synthetic polynucleotide
  source 1..201: mol_type = other DNA
gygtttgttygygttttgtttaggtggtttyggyggtttyggygattttttgygagygttgttgtttttgaaggygttgtagggtttgygygtggagtggygygggygggattygygygggtygggtygggtatagygtagygygggggttatygtygtygaygggtygtgygygttgygygagtttagygtagattttyg

SEQ ID NO: 3467 - DNA, 286 bp, synthetic construct
  misc_feature 1..286: note = Description of Artificial Sequence: Synthetic polynucleotide
  source 1..286: mol_type = other DNA
tttagggggygttttygagtygygtttygygttygtttttaggagggttttygygagtyggttgtatatttygaggyggtttyggttgtataatttggagygagttgtttygtttttttattttgggggygaagaagggtyggggagtgggggaaagygggaggygtygyggtttgggaggttttygygggttttagygtyggtygtattgyggtttttttygygygtygtygtygtygtyggttttttttygtttygttttygyggttttyggygtttttygygc

SEQ ID NO: 3468 - DNA, 244 bp, synthetic construct
  misc_feature 1..244: note = Description of Artificial Sequence: Synthetic polynucleotide
  source 1..244: mol_type = other DNA
tagtagattttggygtggggtatttgagattttygttattgaaaaggygttatagaaatgtaaggaattatgattttaataaaattgttttatttaggagygagtttttgygttgtttttgtygtyggagttygggtttgttayggtaaagtttgtaattagagaaaaatattagttttgttgagggttagaatatattattggttaatgtgtgtggttttttttttaaataatgttaagtatt

SEQ ID NO: 3469 - DNA, 201 bp, synthetic construct
  misc_feature 1..201: note = Description of Artificial Sequence: Synthetic polynucleotide
  source 1..201: mol_type = other DNA
gtgggtyggggatttygttgttttgtttttttagygggaaattgattgtttgagttttggaggataaatagagatattggggggttaaygggggyggtygygggyggggttttaggtttttatttatygggttgttgagygygtaygtagttattygagggaagattttygtygttyggggtttyggagaggggttagaat

SEQ ID NO: 3470 - DNA, 372 bp, synthetic construct
  misc_feature 1..372: note = Description of Artificial Sequence: Synthetic polynucleotide
  source 1..372: mol_type = other DNA
gtggtattagygaatgtggtggatttyggtaggtttggggtaggggaattttyggtaatattttttagtatygaaggtaggatttttyggttattttygtyggttggaatttttttaagtattgttttgagtttatttttaaatgaaagggggaaaaatttaaattagattagaatttgaaatagttgaaatagttatygatttttagtttgtttttaagtttggtagagattgtgaaagttttaattttttygygatgttagttayggttygyggyggttayggagttattttagtatttygygatggatagtgattttyggygtggygygagttttttgyggtttttaygygggtttgggyggygggttt

SEQ ID NO: 3471 - DNA, 201 bp, synthetic construct
  misc_feature 1..201: note = Description of Artificial Sequence: Synthetic polynucleotide
  source 1..201: mol_type = other DNA
agttagttttataatttgygatygatttttttttgtttagttyggttttagttttttttagttataagatggtaatagygtygatagtygggtttygyggygttttgttttttttttgttttggtttggagttttttttgggtagttttgtatttatagygttgygttttttttagattgtgtagggagtaygggagggtt

SEQ ID NO: 3472 - DNA, 247 bp, synthetic construct
  misc_feature 1..247: note = Description of Artificial Sequence: Synthetic polynucleotide
  source 1..247: mol_type = other DNA
gttttyggggggttttggygttttagttgtggattttttaatattygtaggttatagagttatagaggttggatttttagtagtagaggatatagaagaaygaagaygagaygtagagttttaattgtagttagagataaaggtttygttatatttyggaagtygttttgtttttttttgtttygtgtttgattggayggtttttagtttagygtttttgattggataatttttaaggttttgtttt

SEQ ID NO: 3473 - DNA, 201 bp, synthetic construct
  misc_feature 1..201: note = Description of Artificial Sequence: Synthetic polynucleotide
  source 1..201: mol_type = other DNA
gatttggygyggtttttgtttttygttgtygtygaagttttaattttygtttgtttgttttgtgttttttgtaygtagaagtttagtttgtgtggttttgygatttgygggtattgggagatttatagttaagaygttagggttttttggaagtttagaaatggtgagagtgtyggttygatatttygagagagggaaygg

SEQ ID NO: 3474 - DNA, 201 bp, synthetic construct
  misc_feature 1..201: note = Description of Artificial Sequence: Synthetic polynucleotide
  source 1..201: mol_type = other DNA
ggygttttagttgtggattttttaatgtttgtaggttagagggttatagaggttgggtttttaagagtaggggatataaagtagggaagaygagattaagygttttagttgtagygagagataaaggtttygttaaatttyggaagtygttttgttygttttagttgygtgtttgattggayggtttttagtttagggttt

SEQ ID NO: 3475 - DNA, 235 bp, synthetic construct
  misc_feature 1..235: note = Description of Artificial Sequence: Synthetic polynucleotide
  source 1..235: mol_type = other DNA
tttggtyggattgygygtttagggtttttygygtttgttagttttygttttgygggtattttttttagtatygggagygygyggttgttygttttygtygygatygtggygttagtttttygttttttttgtttygttttgagtatttgttttgygtttttygttgtaattttttatttttygtttggattgygggtttgggtgyggggtgttgtaggtttgtaggggayggggt

SEQ ID NO: 3476 - DNA, 201 bp, synthetic construct
  misc_feature 1..201: note = Description of Artificial Sequence: Synthetic polynucleotide
  source 1..201: mol_type = other DNA
atttygygttttttagttyggagtttatttgtataattggattttttttttttgtttttttttttttttttgaaatttgtttgaaaatttaagtgaaaatygygaygatttgtatatttaaaagtaagtgttaagtaagtgttttgyggtggtttyggygygtttyggggtgagygygtaaagtygggagygaggtgtygc

SEQ ID NO: 3477 - DNA, 201 bp, synthetic construct
  misc_feature 1..201: note = Description of Artificial Sequence: Synthetic polynucleotide
  source 1..201: mol_type = other DNA
gggygyggttttgggagygggggaaggtgaggggaaatgggatatgatggtattaataatygttattaaagayggtgggagtaataaaggaatgygttttygagaygtygtttagtttyggggtgttttttggygyggtygyggtgtaggaaygygagtttygtygtygagtttttygtygtttgygttygttggygyggc

SEQ ID NO: 3478 - DNA, 201 bp, synthetic construct
  misc_feature 1..201: note = Description of Artificial Sequence: Synthetic polynucleotide
  source 1..201: mol_type = other DNA
gttygggygygtyggttggggttttggygttttygtaggtttygaggtygatagtttyggygagggygggygtttygygttttagtatyggttgtttgagygtttttggagtagtaaattttagatttttttttttttttttttttttttttttttttttttttttatttttttttttttttagttttttttttttttttt

SEQ ID NO: 3479 - DNA, 201 bp, synthetic construct
  misc_feature 1..201: note = Description of Artificial Sequence: Synthetic polynucleotide
  source 1..201: mol_type = other DNA
tttgttttaaaagtttatagtatgttttttttttttttagatygggagatagtgattttatttatayggtaagattaaaagttttygttygtttagtttgygggtttgggttgggtttagaygttttttaggatgtagatgygtygtygttggttttttyggttataaagtygtttttagygttttttygygygtaggagc

SEQ ID NO: 3480 - DNA, 201 bp, synthetic construct
  misc_feature 1..201: note = Description of Artificial Sequence: Synthetic polynucleotide
  source 1..201: mol_type = other DNA
gggygaagygatttagygygaggattagtttttaattaattygtttttagttttgggygttttttttagtagttagatgggggttttagaggtyggtgygyggttatatggtttygggttaggtagggggtygtggggaygtatttgygttaggygtatagtatttttgggygygggaygggygaagygtygtgggtttta

SEQ ID NO: 3481 - DNA, 296 bp, synthetic construct
  misc_feature 1..296: note = Description of Artificial Sequence: Synthetic polynucleotide
  source 1..296: mol_type = other DNA
tgtttttattttttatyggggttyggttggttagaggtaagtttygagattttttattaattattattatygttgygagggtyggtgaggttgtagataaygtttgtaaggaygggagtyggggagggtgtagggygagtttaaaggaygggtagagtaagtttygggaagaggtaggggttttttttttygggtygtygtttttygtattttyggagttagtygtagttaygtagygtygtttgtygggtatattaaggatttggygygtaygtggygtttatttttattttygg

SEQ ID NO: 3482 - DNA, 201 bp, synthetic construct
  misc_feature 1..201: note = Description of Artificial Sequence: Synthetic polynucleotide
  source 1..201: mol_type = other DNA
agtttaygggttagtttggyggggttygayggyggyggyggtggyggtagygttygatttagyggtattagtttgggttaygattagygttayggtagttygygtttyggtygttyggattygygtttyggtttygggtygttttyggtgggtagygttygttttagygtttttagtttyggttttyggggttyggtyggc

SEQ ID NO: 3483 - DNA, 201 bp, synthetic construct
  misc_feature 1..201: note = Description of Artificial Sequence: Synthetic polynucleotide
  source 1..201: mol_type = other DNA
atttattggttgaaagtttygtttattttagggtgattgagagygttttttttttttgtgttgtttggaaayggattgttygtttagtaatatttgattaygttttttattggttatygttttyggaagttygttttttygttttyggaattttygtaggygttgggtttgtagatggygtttaggtatatagtggygagt

SEQ ID NO: 3484 - DNA, 266 bp, synthetic construct
  misc_feature 1..266: note = Description of Artificial Sequence: Synthetic polynucleotide
  source 1..266: mol_type = other DNA
gaaagataaaagggaaagygtttttaygaaattygtttayggataygatttyggggttatatttagttagaygaatgtttggtaaatgatagttattttaygttagatttttatagttttttataygttatttttattgttttagggaattataagtataggtatygtttygttyggygtttttttttaaagattggggtattaggatygygggtttttatttttatttagtataaagagttyggygtttagagttagyggttttt

SEQ ID NO: 3485 - DNA, 201 bp, synthetic construct
  misc_feature 1..201: note = Description of Artificial Sequence: Synthetic polynucleotide
  source 1..201: mol_type = other DNA
tygtaggttatttgtgtgatttyggtgygagtggaggttggtatygtttagtgygaggttgttatttygtgtgtttgtttaygttttgtgtgattgggtgygaggaagttaatggtatygtggaatgtgaggttgtgagttgaggygggagygggygattgttygttgtattttgttgggtygatattygyggtttttttg

SEQ ID NO: 3486 - DNA, 228 bp, synthetic construct
  misc_feature 1..228: note = Description of Artificial Sequence: Synthetic polynucleotide
  source 1..228: mol_type = other DNA
tagagtttaggatattttaggttttttttgattygattggaatttattttttaygtttttttggttttaattaatygttatttgtatgtataaatggaaaygatagggtagagggttagtagttattygygtttgggttygtagtttygggtaygttgtagtttygtattyggttgtttaygttygggattatttattgtgttttttyggaattgtttagygtgtttt

SEQ ID NO: 3487 - DNA, 248 bp, synthetic construct
  misc_feature 1..248: note = Description of Artificial Sequence: Synthetic polynucleotide
  source 1..248: mol_type = other DNA
agattttagatatttattttaaatttaggttttagygttttgtaggggatttttattttggggygtttatttttgattttttttttgggttttttygttayggtygagtttaagtggttgaagygyggaygaggatgygyggggtttyggtttttaattgtattataggtygtatttaygaatttggttyggtatagttattatygttygggtttttaggttttagggttgtagaagtttagtttygg

SEQ ID NO: 3488 - DNA, 387 bp, synthetic construct
  misc_feature 1..387: note = Description of Artificial Sequence: Synthetic polynucleotide
  source 1..387: mol_type = other DNA
gaggyggttatygtagyggtygttaaygagtagttgtayggaggtgtagaagaaggaggttattgttatttttttgataagttgggggygtgggaggtttygggagttygaagtygtttygagygggggtgggyggtgagyggattttygggtgttgattaggtgtttggtggtagagtagggaaggggggaayggaygtygattttagggattttttattygtttaygttttttggygttggttataygtygtygttttagtattaattggaggtttttagtggaygagtagtygttygagggtagtygtttgagtyggtagatagyggttagttggggtagyggttygaattgttttygtaataygttttttagtatttyggttt

SEQ ID NO: 3489 - DNA, 203 bp, synthetic construct
  misc_feature 1..203: note = Description of Artificial Sequence: Synthetic polynucleotide
  source 1..203: mol_type = other DNA
ygttgtttttttgtgygttatygggggtttgttttgggtttgttygatatygtggttgttygtttatttgagygtaggtttttattttgtgttagggtygygygtggttttygtttgyggtttgttgggtttyggygttataggtattgyggtttyggygttygtaygygggggattgggygggggttggagagtttaggtyg

SEQ ID NO: 3490 - DNA, 203 bp, synthetic construct
  misc_feature 1..203: note = Description of Artificial Sequence: Synthetic polynucleotide
  source 1..203: mol_type = other DNA
gttgygtttygttgtttagttygggyggtttatygttttttttgtttgggtggaygtatttttgtttttygtttttattggyggtagttttygtggggygygygtggggggygttggggtttttagttttygtttygagttttttgtygyggygttgttagtttygggggtttgggttttatttygttttggttttgttygta

SEQ ID NO: 3491 - DNA, 312 bp, synthetic construct
  misc_feature 1..312: note = Description of Artificial Sequence: Synthetic polynucleotide
  source 1..312: mol_type = other DNA
gtygggggggygttyggggyggyggyggtggyggygggygggggtaggtygggttgygaatatatttygaagttgtygtygtagtagagggttatgtyggyggtygtgggyggttgyggygyggtygyggygaggggygagyggggttggtttygtygttygggygagagtatttttttgggggttaattttgyggtttygtttttattygygttgggygttyggtgtttygggtyggggtygggygggtgttagyggagygtttgttagtyggttttttataatygagttyggygyggttttttttgggtc

SEQ ID NO: 3492 - DNA, 407 bp, synthetic construct
  misc_feature 1..407: note = Description of Artificial Sequence: Synthetic polynucleotide
  source 1..407: mol_type = other DNA
tttygggaggtttaggggtayggygaggggtyggggaaaggygatygtttattatagttygygygtttagattgagggaggagtygggttgtagaatyggyggyggatggagaygggagggaggttgygaggtygttygaggagagattaaggttttagaaayggagaagygggygttttgygggaggyggyggygttgtygttggtygttaagggygggaagtgttttgggatttttattaggggtygygagtttygagygttaaattttygyggygttygtttagygygttgttgtggygggygyggagggygygygtyggtagtgggggttgyggyggyggagggtaygggttttygtttagygtttttatttttttggtgtagttgtttttygygagtygaga

SEQ ID NO: 3493 - DNA, 295 bp, synthetic construct
  misc_feature 1..295: note = Description of Artificial Sequence: Synthetic polynucleotide
  source 1..295: mol_type = other DNA
gygttygtttygygygtttttgtatttttygygtygtttttyggggtttygyggygttygtaggtygygtygttttgtygtttttttttygtggtttttayggttygttygttttttagtagttttggggtgttyggggyggttttgtaagygggagagagyggygaggyggyggygtygagtgyggggggatgyggagtygtgttyggttttgtygtatttttyggtygttygttygygttyggtttygttyggttttgttygggttgtaygtatttttttygyggtttagaat

SEQ ID NO: 3494 - DNA, 435 bp, synthetic construct
  misc_feature 1..435: note = Description of Artificial Sequence: Synthetic polynucleotide
  source 1..435: mol_type = other DNA
tttggttyggtttggttagttttygyggtttttgttygggttgaygtttaggaatgtggtygaygagaagttttaatagtayggygtggttttttagtttyggtgagtattygtygtggggaagggttttggggatttattggaggtygyggttygtagtagttaggggtygagttayggttayggaygttttggtgtttyggttygtgtygggtttttaggyggaggaggygttygttgggtttagattttygattttagtttyggtttttyggygtttgggttgygyggagtttttgtttygygtttyggatttttaygygtagtttttaygygtttygagttggagaagtygttagttygtttttttagggygtgtygttygttttttgtttttttgtgyggggtatgtgaaatgtgtggggttagaattgt

SEQ ID NO: 3495 - DNA, 410 bp, synthetic construct
  misc_feature 1..410: note = Description of Artificial Sequence: Synthetic polynucleotide
  source 1..410: mol_type = other DNA
tttttggagggaagttygtygggaagttgaagatagtggttatygttttyggttattatttttygggattyggattttaattttgygttatatttttattygtttttagtygtgttttggttgygtagttggaaaggttgagtagtttattgttgtttttttgttyggttttggatatatygtttgaatttttgggygtttttgttgttaagtgggggatagtattatttattggggaggaaaattttaggaatgtggattttggggttaygtaggggttgggaagtgaagggtagggaaygygggyggygttyggggtttgygggtaggtaggyggtttggtygyggaggttttttygagttttgygtttttttagagagggaggggtttatatyggttggtatagtta

SEQ ID NO: 3496 - DNA, 392 bp, synthetic construct
  misc_feature 1..392: note = Description of Artificial Sequence: Synthetic polynucleotide
  source 1..392: mol_type = other DNA
ggagttygttgggygtgttyggttyggttyggtttygtygtaygttygtttttttggtttggttgaggatttyggggtttggaygtgttaaygttattttygygygtygaagttgtgayggtttattaagtagagatttgygaggtatatagagagggaatgaggyggaatygttygggggttygttgatattgtagagtttttygtagtatygttgttttaaatttygtttttttaggygtgygygtatagygagttagaggaggtttygtttygatttggggtttttygyggtttttagttygggggttygggttttygaagagatttttggtaatggtagaggttttaaagtttagatgttaagtttygygatggggyggatgttttta

SEQ ID NO: 3497 - DNA, 203 bp, synthetic construct
  misc_feature 1..203: note = Description of Artificial Sequence: Synthetic polynucleotide
  source 1..203: mol_type = other DNA
agagaagaygttaggttgaggttttagygattttaggtattagtttygaaggagggyggggagatygtaaaggggaagtgttyggagggttaayggttttygygtattttgygtttttttgaagygygtygttttttygygtyggggattgggatttgtttttggggaattygtttagaagayggyggyggattggggtyggg

SEQ ID NO: 3498 - DNA, 398 bp, synthetic construct
  misc_feature 1..398: note = Description of Artificial Sequence: Synthetic polynucleotide
  source 1..398: mol_type = other DNA
aaaattgygggagtttatttattgygtttaggtggttagtttttgagttttttttattygtggttttttgtyggtatgtaggtatgtataagtatatygtygagtaggaggatttaaygaatttagtttgtggatatgttttaatttttattttygttttttttaggtttgtttaggtgaggatgatgggagggaaaagyggtgtatagtygtaatattggtattttgtaagagtygtyggggtattgatatagagggatatygtattggagatgyggtgtttayggagatttattgygygyggtgaaatattttaagtatygygyggaataattgggtttagtttttttatttyggattttttttaggattataygttattttttattttygaattt

SEQ ID NO: 3499 - DNA, 286 bp, synthetic construct
  misc_feature 1..286: note = Description of Artificial Sequence: Synthetic polynucleotide
  source 1..286: mol_type = other DNA
tgtagagtttgaattttatygtttagaaggaaaggtgagtgggggattygggygggaggtgaggtttgtyggtagyggtttttaggygtgttgggtagtayggttagtagaggyggygtttggttttggatgttgtagyggagaygttaaggagattgaatgtagggagygaggygtagyggtygyggagggtggggtygttyggaaatttaggyggygttagttttgtagtatttgtaggtygggggygygtataygaggggtaygtgggtgtggaggaatyggc

SEQ ID NO: 3500 - DNA, 267 bp, synthetic construct
  misc_feature 1..267: note = Description of Artificial Sequence: Synthetic polynucleotide
  source 1..267: mol_type = other DNA
ggttgttaaggaggyggggtggttagygyggggggtggaggatgggggtaggaygygggagggaagggtagggggtggggggygaggtttyggggattagygygygagagtgtttagttgggaaatgtagtttygaattaatatygtatgttttataattagtttaygagtygatgtggggaaagttatttttagatggggaagagtagttyggatttttttaaggaygttttttagttagattagggaggggagaaggagatgggg

SEQ ID NO: 3501 - DNA, 260 bp, synthetic construct
  misc_feature 1..260: note = Description of Artificial Sequence: Synthetic polynucleotide
  source 1..260: mol_type = other DNA
tagagtygtttgtatttgttygtattttttgggaggttgygatgatygtagttagggtggtygagygttyggtttattgtattyggyggttgttttgtagygtttttggtatttagggaatggtttgtaaattttaatgtattatagattagtttttatygtggagtaggaaaggygtttattagttaggggtaatyggttttgtagatttgggygggggygtagggggaggggyggtggtgtaaatttatygtgatttt

SEQ ID NO: 3502 - DNA, 239 bp, synthetic construct
  misc_feature 1..239: note = Description of Artificial Sequence: Synthetic polynucleotide
  source 1..239: mol_type = other DNA
gaaggtaagttttaaatttttgtttggaagaygggttgtygyggttgtattattagtaggaggaggaggagaagaaattatttygygatattttattttgygggtgttttgtygttgtygtttttgttgtygtygattygagttygygggttygaatatygtagyggtggggayggtgggttyggygggygtygggaggaggatattagyggagttttgtattttygtgtttygtttat

SEQ ID NO: 3503 - DNA, 846 bp, synthetic construct
  misc_feature 1..846: note = Description of Artificial Sequence: Synthetic polynucleotide
  source 1..846: mol_type = other DNA
gttggygggttttggttttygaggaygtagatatgtggtttgaattttygtttttttagtygttgtttttgtgtatttttttgggygtttttagygaatgygagyggygaggygagggygagygygtygaggaagggygggagaggygyggagtttggtygygtygygttgygtygagygtygggtttttttygygagtttttygggttygygygygygttttttattgttttygtttttygygyggygygtgttttttatttttygtygygygttttygtattygttyggttttaygyggygygygtttgttttggyggtagyggyggyggyggyggygygttttttttygaaygtygtttttagggttgttggttgygttttttattgtttygyggttgttgttyggggtgggyggygaggygggggggaggtgtyggtttggtygtyggggagggtttatygttygggyggatttttattgygagagygatgygggtttaggygyggygygygggggttgtagggygtttagtattgggggttgtyggygygygggggtttttttttggtttttaggtattygttgttgttgggygtttttygtattttyggttattatggatatttygttttttygtygtttttttygygtatttygggaggtygtyggggyggtagtagyggygyggtttygygggtgtttaggtgatyggttyggtagyggtagagtagtggtagtagtygttattgtygttgttattgyggtygtygtygttggagagaggaggaygaggagggtaaggggtagaagtaggttttgttttgtttgttttagaggttatt

SEQ ID NO: 3504 - DNA, 526 bp, synthetic construct
  misc_feature 1..526: note = Description of Artificial Sequence: Synthetic polynucleotide
  source 1..526: mol_type = other DNA
tgttgttttttttyggygttttgtttttttataattggaagtygygaaggyggttattgygttgagtygttygttttgttggttaagtttgggygattygygyggaggagggtygggttgattgtygtygttgagttgttttyggaygggagygtttgtttayggtatttattttttttagyggtggaaatgtggagaagtaagtgggaggyggtgtygggaattgattttttttaaaayggtyggygtygttgttttgaaatgggyggttaagtgtttgtgggattaagggyggttttagagatgttyggaaaatygttgttayggttagagtgyggygtagaygyggtagagttggaggtgttygyggtgtaggttgttgtttaygtygtttaggttaggtgttgagggtttagttygygtttyggtygaattatttttagtttygttgagttatttygttygttyggtttttatygtatyggttagaggaaagttttygyggtttttaygtttttttatagtt

SEQ ID NO: 3505 - DNA, 201 bp, synthetic construct
  misc_feature 1..201: note = Description of Artificial Sequence: Synthetic polynucleotide
  source 1..201: mol_type = other DNA
gtttygttyggggatttagggaggagggagagaggagggagggagtgggtagtttgggygtaygttatyggttttygtaygttyggtatttttygtggygyggygagttaatgggatttgtatattygaggtgtaatagtattattgtattaattattatttttattttaygtttagattgtttatttatttgygggaaat

SEQ ID NO: 3506 - DNA, 523 bp, synthetic construct
  misc_feature 1..523: note = Description of Artificial Sequence: Synthetic polynucleotide
  source 1..523: mol_type = other DNA
tgttttgtaygygtgtgtayggttygtaygaggyggtygggttygttagttttttgattatagyggtygygttagggttatyggggttygyggttgtagtygtagttgttgtagtygttgyggttgtygttatttggtaggaggtatagggtatgggtgagggaggttgyggtagyggttaygagttgttgaggaagttagattgtaggtatttggggggygttaggtagtygtagtygtyggtttyggygttygttaygtygtattygtttgyggygttttyggtttygaagagttttttgtygggttggaagtgygygggyggyggtyggaagggtttttttatgyggyggyggygtyggtagttgtttttttygaatatgttttygtaggtygggtttagygtttagtagttgtttttgygttygtygtygttttygygyggtattttgatgaagtattygttgaggttgaggttgtggyggatgttattttgttagttttttttatttttttygtagaa

SEQ ID NO: 3507 - DNA, 276 bp, synthetic construct
  misc_feature 1..276: note = Description of Artificial Sequence: Synthetic polynucleotide
  source 1..276: mol_type = other DNA
gttattttttttttttygtgaygttaygggtygtttyggggtgagygtttgagtygtttygggttygygttagtgagygyggttgttgtyggygagttagyggygtagyggygggaattygaggtygagygtygyggyggtagygttagaagygtatttatygggtayggygaggyggtttayggtgyggtaggtatygggaggygagagtyggygyggatagtaggyggyggttgtagttygttggyggttgttgygaggatgttgtttgggygg

SEQ ID NO: 3508 - DNA, 357 bp, synthetic construct
  misc_feature 1..357: note = Description of Artificial Sequence: Synthetic polynucleotide
  source 1..357: mol_type = other DNA
aggagggaggtagggtaggtttgagggtgaaagyggtaaggatttaggtttaagttggatttgtttatttttttttgtygtagtttttttggtttttgtgygttttggattttygaagttagttttttgygtagyggattagagaggtttattygyggaygttaatttaatttttgggyggggttygggggttgagtagaaggygaggtttggggagtayggataattttgagggttgtttgtgtyggggtgggagygtagtgggtgagtttygagttttggtttagggayggttagagtagggygttggygygtygtggggataagtaggtgtttgtttttgtttgggggaaggat

SEQ ID NO: 3509 - DNA, 278 bp, synthetic construct
  misc_feature 1..278: note = Description of Artificial Sequence: Synthetic polynucleotide
  source 1..278: mol_type = other DNA
tygggygttgggtagttttygtyggtygtygtyggagtttttgtgtttaygtygggggygtygttgtaggtttaggagaagattygtgttttygagtagtygtttttaaaaattaaataaattaataagagaattaattaataggtagygttgygatygttaggagygyggagygygygaggtttagyggttttttygttaagtttttgttatyggygygyggtygttygygttgyggtagyggyggyggygyggttgattgyggyggtagygyggta

SEQ ID NO: 3510 - DNA, 336 bp, synthetic construct
  misc_feature 1..336: note = Description of Artificial Sequence: Synthetic polynucleotide
  source 1..336: mol_type = other DNA
gtttygtatgtggggtataatgaaataagagtagtttyggttagaggtttagtaaagyggaaagayggtttygttygtatattttttyggaaaattgaagygttttttttgatttttaaggttagaaagatttattatttttttygagagggygtagttatagatttattagagagggygggtagggtgtyggaagttagagaayggygtttygygtttttttatygttttagggygtagaggtgtttttagtgttyggagaggttggtagtgtyggtttygagggaagygtggagyggayggtygataggggatttttgtttaaattttattatt

SEQ ID NO: 3511 - DNA, 311 bp, synthetic construct
  misc_feature 1..311: note = Description of Artificial Sequence: Synthetic polynucleotide
  source 1..311: mol_type = other DNA
ygygtgttttgttttygtagtggtttyggygtttaggaygtygttggttygygttttttttyggaatgaaggtgtttygtaggaaggygttggtgttgtgygygggttatgtattgttgttggtgtttattatgtttaattttttggattataagtggtataaggagtygttgtagtagtgtaatttygatgggtygttgggtgtygtagygggggtagtyggaggtagttgggggygtttagggtygttttyggtygggtygtttygtgtttatgttygtttggattttygtattttttatygttttttc

SEQ ID NO: 3512 - DNA, 201 bp, synthetic construct
  misc_feature 1..201: note = Description of Artificial Sequence: Synthetic polynucleotide
  source 1..201: mol_type = other DNA
tataggtaatagagataaggttaggaggtaaagtatatttatgtgtaaatgagaygygttagggaatttgtaattttttgtattttygtttttgatgtttygatttttataattatagaattttaggtagaggtygtygattttttygttttygttaagagggattyggagtatygaagttttttagtyggtgtyggygtt

SEQ ID NO: 3513 - DNA, 201 bp, synthetic construct
  misc_feature 1..201: note = Description of Artificial Sequence: Synthetic polynucleotide
  source 1..201: mol_type = other DNA
aaaygtttttttagaaaataagttattaatygtaygagagaaggagaggaaggtagtaatttaattttttgyggttygyggttttgaagattaggaggttygttttagtagggtgaggtttatagaatgtatygygtyggttgyggttttttaggggtyggttattygagttttggaatttygagaggygygaagtgggag

SEQ ID NO: 3514 - DNA, 481 bp, synthetic construct
  misc_feature 1..481: note = Description of Artificial Sequence: Synthetic polynucleotide
  source 1..481: mol_type = other DNA
ygygattgtatttggggtagtttygtygygttttagtygtttttyggtaggaagygtaggtgtgtgagtygattyggagygagtygygttttygggttagygtgggtagggygtygtagtttgygtagtttygaggatttygygtygttttttygagttagggtttttaggagygggtygygtaggagaygttagagggggttgttagyggttgttgggagaaygggttayggaaatagttttttttaaagtyggggttatygtggggtgggygagttygtttttttaggtygggggygyggattagaggggaygtgtgtagayggtygyggttagttttatttygttygggyggagaygtatagttggagttggagggtygtygttygttgggtttttaggggtttgaaygtttaggggtygyggygagtttattyggagygagttaggtgagtaggtygttatggygatgyggtttygg

SEQ ID NO: 3515 - DNA, 280 bp, synthetic construct
  misc_feature 1..280: note = Description of Artificial Sequence: Synthetic polynucleotide
  source 1..280: mol_type = other DNA
taggttttttggggttatttygygaggtagtygagggygtaattygggygtttggggtyggaggyggaattaggggtyggggttaggaggtaggtgtaggyggttgttaattygtttaatttgttgygygggtggtygtttagagtygygggtttgyggggygtttttygtygtygygtygtygtttttttaggttygggagggggygtttagggtggagttttatttatgggttgaggttttgggygygyggagtygtygtygttttttyggttggttt

SEQ ID NO: 3516 - DNA, 252 bp, synthetic construct
  misc_feature 1..252: note = Description of Artificial Sequence: Synthetic polynucleotide
  source 1..252: mol_type = other DNA
yggagttttagttaygaattatttaatattygtaggttatagagygayggaggttgaggttgtgatygaattatygaygtttttttgaggggtgaaagtayggtygtggagattttaatygagtttaygttggygtaaaaggtaaaagtygygttagatttyggatgtygttttttttttttyggttgygygtttgattgggtagtttttaatttagygttttgattggataagatattaagttttttaygt

SEQ ID NO: 3517 - DNA, 239 bp, synthetic construct
  misc_feature 1..239: note = Description of Artificial Sequence: Synthetic polynucleotide
  source 1..239: mol_type = other DNA
ttatttgygtgttgttttygggtttygtttygtttygtttyggagggatttttaggtygggtttagatttaggagttatttggggatttyggggtggttgygygtygagggggygttagyggggaygtgagttggygtygagatagtttyggttttttagygttagggttattgttaggagattttyggttagtatttaygtggggygttttygggagttygaggggtttatygtttgt

SEQ ID NO: 3518 - DNA, 405 bp, synthetic construct
  misc_feature 1..405: note = Description of Artificial Sequence: Synthetic polynucleotide
  source 1..405: mol_type = other DNA
aagtttgyggagygggtygygtttttggttygttygggttttaagtttygygtygtygttttggyggggayggtgtagtaggyggygggatgyggyggggyggtagtttgagygtttyggatggttygyggyggggyggtttgtaagagygaygygyggttgttgttggggygggaygygttgyggtyggygttygttttgttggttttygtygtgttgttgggygtygygttyggtttyggtttyggtttttggtttggttgtygygygggtygttagygtaygygatattaggtgggtyggtygagtagatagyggyggggyggggagygyggggygygtggtttttgggttttgygggttyggagtttyggttttgygattttttgagtttggttgggaatt

SEQ ID NO: 3519 - DNA, 237 bp, synthetic construct
  misc_feature 1..237: note = Description of Artificial Sequence: Synthetic polynucleotide
  source 1..237: mol_type = other DNA
ygygtayggtggtgtaggagtttyggtagtttagygtgaggaagttygagygtttgttttgygygtygtygtygtygttattatygtgygttttygggttygagggtayggyggtygtygtttygygtagtagtagygygtygttgttattttgygagaygttgttttttaggtygttttggtagttttygtygttgagagagttttgtttggtgattttgggygatagtagtttga

SEQ ID NO: 3520 - DNA, 204 bp, synthetic construct
  misc_feature 1..204: note = Description of Artificial Sequence: Synthetic polynucleotide
  source 1..204: mol_type = other DNA
ygatyggggyggtttygtttagggttyggggtagyggyggygtyggyggygttygagttttatyggaggagagaygygygagagaggagtttygtyggtgyggyggyggtaatggagaggtaagaaggagttgttgtttttttggggygagggyggggaagtgtgagagagatttgygagaggttttagggttgttgttyggtt

SEQ ID NO: 3521 - DNA, 224 bp, synthetic construct
  misc_feature 1..224: note = Description of Artificial Sequence: Synthetic polynucleotide
  source 1..224: mol_type = other DNA
aggattttttattggggttgagtttttttygtttttaatagaatttttaaatataagtagtttttttttgtttttaggagtttaygaaaygttgttatatygagygaatgtaaygygtatataygtttatattygaatagtataagtaagagatyggttgggtgtggaatagaggygtatatygygtaaygtatttatagtatgtataygygygtatttygatt

SEQ ID NO: 3522 - DNA, 278 bp, synthetic construct
  misc_feature 1..278: note = Description of Artificial Sequence: Synthetic polynucleotide
  source 1..278: mol_type = other DNA
gttttttattyggygttttttaggatttttaaagaygttygtttagatttataggtatttatttgagtttttttgtttttttataatttygattttttttygtttttttttttttttaaaaaaaaaatttaaataatttttaaataatatttaataggaaagaagaaggaaaaggagygtataggaagggyggaggyggtattygggggggattgtttttagaggaggtygttgtgagtyggygaygygaggttgggggagtgggaggtaaattygtt

SEQ ID NO: 3523 - DNA, 232 bp, synthetic construct
  misc_feature 1..232: note = Description of Artificial Sequence: Synthetic polynucleotide
  source 1..232: mol_type = other DNA
ggtggggtaaaaagtaagaygaaatttatttagatagttttttygatttttagaggatygatatttttttygagggttttaatagtggtygtttagggttygagggtaayggtygaggygttaygyggggtygyggttygttttggttayggaggatyggatttgttgygtttttgtgagtttgttttatttttatttattyggtgtttttyggtaygtygatttgtttttt

SEQ ID NO: 3524 - DNA, 331 bp, synthetic construct
  misc_feature 1..331: note = Description of Artificial Sequence: Synthetic polynucleotide
  source 1..331: mol_type = other DNA
aaygygtttyggattttatttttgtaygtgtagttgtttttggggatgagggttatttagtttttgtygygggtyggggyggygaatttggtgttggggtygtaggttaggyggtygtgggtygagttggttatgattattttttygygggygttttgtttgggygagtgtttttygtagygttygtatttygtttttttygtgtgtagtttygygtygtygtygttygtygtttyggtttyggggttyggygygggttyggygtaggtgatgtttaygaaggyggtgtattatttttttttttyggttayggtaaagtttaggtagagta

SEQ ID NO: 3525 - DNA, 231 bp, synthetic construct
  misc_feature 1..231: note = Description of Artificial Sequence: Synthetic polynucleotide
  source 1..231: mol_type = other DNA
gyggttatggtggtttygggaaygggttyggggagggagggygygggaggayggygagtygggggtatyggaggggaaggyggyggygtagatygtggttygttttyggggtagaggagggggtgttaggygggattggggagaggggaaggggggtttagttttgatygggatttatygtttttttygyggggygyggggttaggygygtagatgygtttagggygtagt

SEQ ID NO: 3526 - DNA, 201 bp, synthetic construct
  misc_feature 1..201: note = Description of Artificial Sequence: Synthetic polynucleotide
  source 1..201: mol_type = other DNA
ttygtagtggttttttttgtagtttttttgggtttygyggttagtagtgtagttygtggagtygyggttttgttygttttttttgggtggttttagtgygygggttgatatttatttagtyggggaaggtgaggygagtagaggttggtgyggaatttgtygtttttagtagygtyggygggttaagtttagggtygggta

SEQ ID NO: 3527 - DNA, 201 bp, synthetic construct
  misc_feature 1..201: note = Description of Artificial Sequence: Synthetic polynucleotide
  source 1..201: mol_type = other DNA
agtttaggagttyggggygttygyggygggtatgaggyggygtyggyggttgtagtaagaggayggtatttttttygagtattatygttatttygagttgygygaggygttygtgttygtgtggttgtagtgtatygttattagtaggatttatayggtggggygtagtttygagggtygggagtttttggttatygagtt

SEQ ID NO: 3528 - DNA, 219 bp, synthetic construct
  misc_feature 1..219: note = Description of Artificial Sequence: Synthetic polynucleotide
  source 1..219: mol_type = other DNA
yggttggyggtgtttyggygttttatygggygyggtttttttaggttygggggttyggygttyggyggtattttttygtaatgggagtggtttaggtyggyggygtygttggtatattyggggttgtaggatagggttatgttgtagtyggggggygatatttyggggtggtygatgagttagttatggaagtaggggttttttttatggttgtagygg

SEQ ID NO: 3529 - DNA, 284 bp, synthetic construct
  misc_feature 1..284: note = Description of Artificial Sequence: Synthetic polynucleotide
  source 1..284: mol_type = other DNA
gygggaggagggyggyggggyggttggyggyggyggggttygggagygtygyggygtaggattttttagagygygtygggttgagyggyggyggyggyggyggygggygtaggggtagggtatgattgaygygttttttgtttgygtttatgtgagagaaagyggtygagggagggagygtgtygagttygggttgttttttttttttattttttttyggaagtygtttttttggagtttttygtttttttygtttttttttyggyggttttatttttttyggt

SEQ ID NO: 3530 - DNA, 429 bp, synthetic construct
  misc_feature 1..429: note = Description of Artificial Sequence: Synthetic polynucleotide
  source 1..429: mol_type = other DNA
ttttttttygggtygygatattgattygttaaygttaatgggggttygygattgttgyggggaygagggygtagagtagttttygttaygggtyggtttaygtaggggtygagaaagtggyggagaggyggtggtygaggtttaggggygagygygggttgagttggtttttgttgygtttaygagygatatttattttttygttgyggaygtttygygggygttaggttgggggttttgygatygatttttttygttttygaggtatygtygggttygtttggtaggtagygygtttygygagttggagggtygagtttygyggggtygtggggygtgtgggtgaaggygatatttyggatgygggaygtatgaatggtggtagagtaggggtygggattygtttatgggttgggagagagatgtttt

SEQ ID NO: 3531 - DNA, 283 bp, synthetic construct
  misc_feature 1..283: note = Description of Artificial Sequence: Synthetic polynucleotide
  source 1..283: mol_type = other DNA
ttygttattattgtttaatygagaattagtaaygtttttygtyggtttttattttaygtyggaatggatttttagaatttattgyggtygtaagatagttygtaagagttggttaaaatgtttttaggtgygtgggggtttyggggttttagttggagttygatattttgagattggyggttygagggttgtagggtygtttygggygtgygtttatyggttttgtatttttgggtagtygagtgtygyggagaaygttttattttttttatygyggtttttt

SEQ ID NO: 3532 - DNA, 241 bp, synthetic construct
  misc_feature 1..241: note = Description of Artificial Sequence: Synthetic polynucleotide
  source 1..241: mol_type = other DNA
tygtttatatygttttttttttgtaggtgaggaatggggtttgtttygtttggaatgtgtttttgtygggttttgtttgatttttattttttagtygggaygygygagttttttygtttggttgagttaaaaagggatygygygtatttygtygttttttattaygaagygtagatataggaggttgtagggttagtgttgyggagaattttagayggttttatagtygtygttattygyg

SEQ ID NO: 3533 - DNA, 244 bp, synthetic construct
  misc_feature 1..244: note = Description of Artificial Sequence: Synthetic polynucleotide
  source 1..244: mol_type = other DNA
tygtygtttttatttyggggygygtaggtygaggaggatttygttgattaygaagagtttgaggatttttygagtttgttagatattygtagtatygtttyggaygattttttttattttttygaggaygaggaggagtayggygtygagagygyggagagygtttyggagggygtttyggaaagygtttyggagayggygatttttttgygygtygtttgygttaataaygtggggttgttgc

SEQ ID NO: 3534 - DNA, 225 bp, synthetic construct
  misc_feature 1..225: note = Description of Artificial Sequence: Synthetic polynucleotide
  source 1..225: mol_type = other DNA
ttagttygggaagaggygtgygyggygtygttyggttttagggtaaggttttgattttgtttaattgtagtatttttygtttttgttgtttgagygyggtygygggataagggatgttggygggyggtaggggygagygtygygggygagaggyggttttygaygygagtgygtagygttyggttyggyggttttttygagttyggygagygtagygttttttgt

SEQ ID NO: 3535 - DNA, 249 bp, synthetic construct
  misc_feature 1..249: note = Description of Artificial Sequence: Synthetic polynucleotide
  source 1..249: mol_type = other DNA
gagtttggggtygtygyggygttyggygtygagygttttygagttgygtttygygygyggttygygttatttgtgtygtygtygttttagtygtygagggygaggtttttttygyggygygyggtagttttagtttttatttaaatttyggyggtyggttygggygttyggttagtgagggagygttygtttygtygtygaaatyggtttygggtgyggagtatgtttagtgtygtygygagagyggyg

SEQ ID NO: 3536 - DNA, 255 bp, synthetic construct
  misc_feature 1..255: note = Description of Artificial Sequence: Synthetic polynucleotide
  source 1..255: mol_type = other DNA
gtatagtagatggtaygagtaygtgyggygtttagtttaggttttyggaggtagttgagttggaaatttygayggaaagtatttataagtttttattttgygttggtttattygygtgtaygtttattttttaygygygtttttggtttagaagygtatagatgtttattgtttagagtyggtatygttggggagatygagygatttgygyggygtatagtgyggygttggtagggttttgggttttyggtyggg

SEQ ID NO: 3537 - DNA, 243 bp, synthetic construct
  misc_feature 1..243: note = Description of Artificial Sequence: Synthetic polynucleotide
  source 1..243: mol_type = other DNA
ttagtagygtygtygttttttagygtygatgttttagtyggyggggyggttgaggggtgagggggaatttygygggygggggygagggagygtgtgtgygygagygtgtgygygygygaggggagygygtgygyggtgaggaygygygtyggyggttggggygggggygggggtyggggygtttttgtgggaagggaggggtgaaaggtygttggttttyggtaatayggtttaggtaaaygt

SEQ ID NO: 3538 - DNA, 201 bp, synthetic construct
  misc_feature 1..201: note = Description of Artificial Sequence: Synthetic polynucleotide
  source 1..201: mol_type = other DNA
tggagagaaatgagttggagagttatatygagttaaygygggatayggttttyggttygggtygggttaggggtgggaggyggttttttatygtaggyggygggatttttatgygtygagggatttaagtttttattttatttataygtttattyggygtyggggygttgyggtttygttttaygagtttagagtaggtyg

SEQ ID NO: 3539 - DNA, 208 bp, synthetic construct
  misc_feature 1..208: note = Description of Artificial Sequence: Synthetic polynucleotide
  source 1..208: mol_type = other DNA
gtyggatatttttttttaggattattygtattttatagtygygttaaaagygttttatttttttgtttttygtygygtaggttttttatygaygttygttyggaaggygagagtttttaygtggttyggygyggygyggttttyggggatygygagtaataaaagttyggttygtagtttttgtttttygtttttttttttaattttt

SEQ ID NO: 3540 - DNA, 257 bp, synthetic construct
  misc_feature 1..257: note = Description of Artificial Sequence: Synthetic polynucleotide
  source 1..257: mol_type = other DNA
tttagtttttygtaagtatttttttygtttttttattttttttagtttttagtygtygtygttttygtagtttyggtttygygttttttygtagtttyggygttygtttattygttaggtaggyggtggtgtygatttatttgagtagttgtttygygtttagttygtygygygtagtggygtgygtyggttggatggtttggtttatgattatttygtygggygtyggtygttttatggttagggygagagygtta

SEQ ID NO: 3541 - DNA, 350 bp, synthetic construct
  misc_feature 1..350: note = Description of Artificial Sequence: Synthetic polynucleotide
  source 1..350: mol_type = other DNA
gaayggtttagtttaggttttgygttagagtatygtattygggggyggayggttttgtagttttttagttttttttygtattaattagttgaygttygggygtattggtttttttygttttygttygtaygaaagttttgttygaygtttgtagttagtatygttygtattgtttagggagggtttgygtygagatttagtggtygagtgagttatagagtygttggttttggggaygttgttttttatygttttttatygttttttttttttttgtattttatttyggtatttygtattttttttttygttyggtttygygtattttgtttagattttataagtatttt

SEQ ID NO: 3542 - DNA, 216 bp, synthetic construct
  misc_feature 1..216: note = Description of Artificial Sequence: Synthetic polynucleotide
  source 1..216: mol_type = other DNA
attaaattaggggttgggagtttttagattgaaatgygttttttattattaagagggagtttaygyggtygyggggggtygaggtagttagtyggygtygyggttttggggagttygtgtaggggtgtgttttggtgtgaaatttggtaggattttgtttgggtttgtatgtagggaggggttagagattttgaaatgtattagygggtagggtgg

SEQ ID NO: 3543 - DNA, 269 bp, synthetic construct
  misc_feature 1..269: note = Description of Artificial Sequence: Synthetic polynucleotide
  source 1..269: mol_type = other DNA
ggtattgttgttygaaygaaygaaygaaygaaygaaygaagyggtttygtttaggaaaaatatttttttgaygygaagttayggttgaagtttygggttaygtagaggggttagtaattttatgggtggtggggttttttatttttggaygtagyggggagtagygggyggtttttttttttgtttattttttttgggggtgggggagttttgtgttattygaygttgygaggggttgttaygggttttttaggttgtgtttttygygg

SEQ ID NO: 3544 - DNA, 258 bp, synthetic construct
  misc_feature 1..258: note = Description of Artificial Sequence: Synthetic polynucleotide
  source 1..258: mol_type = other DNA
agatygggtttttgttygttttttttttgygtttygggatgaggtagagattgaatagtyggygagtaaattaayggtatttagaaagttatgtyggattyggygtttagygtttaagygttaattygttgaaagttttttagygaaattttagggaygatttggatttygttgagaggaattgtttttgagtgagatggttttagaggtttggaggagyggattggtaagtatygggagggtagtgggagttttgtt

SEQ ID NO: 3545 - DNA, 224 bp, synthetic construct
  misc_feature 1..224: note = Description of Artificial Sequence: Synthetic polynucleotide
  source 1..224: mol_type = other DNA
tgtgttttttttttttttttttttttttttttttttygtygtttttttttttttttttattttttttttttgttygttttttttttttttttygyggtygyggttyggatagaggttatttagygttttttygtagtttttyggagagtatgtgattaggtygttagtagygtygygagtgttyggtaatggtagggatggtgttttaaatatttttggaagtt

SEQ ID NO: 3546 - DNA, 256 bp, synthetic construct
  misc_feature 1..256: note = Description of Artificial Sequence: Synthetic polynucleotide
  source 1..256: mol_type = other DNA
ygttatttygygttagtgtttgagttgtaattgtaaattgygygttttggtaygagtagyggtgggggygggtgggggaaggagygagtgattttttaggygtttttygttatttgatattagttaggtagtttttagggttagagygttagygtygaagttaggtttattygggaagttatttyggtggtygyggggtgtttatgttagtattagattttttttyggaaggaggagyggggygggttatayggtt

SEQ ID NO: 3547 - DNA, 310 bp, synthetic construct
  misc_feature 1..310: note = Description of Artificial Sequence: Synthetic polynucleotide
  source 1..310: mol_type = other DNA
gggaaggggygttaatagggttattatttyggggtttygttattttttagtygttttttttttyggagattttgtttgttaagagttttgttttttgtttygtttagggttggggttyggtgggaattttttygtgttygaagggaygatttygttagagagtttttygatttttgtatttatygtttttggtaggaygtggagttgttyggaagttatttygggttggtttttttattygtgtgttaygatttttyggygggtttttgtygttygagtgtttttatygttagttttyggagyggyggag

SEQ ID NO: 3548 - DNA, 410 bp, synthetic construct
  misc_feature 1..410: note = Description of Artificial Sequence: Synthetic polynucleotide
  source 1..410: mol_type = other DNA
aggataattgggaygggttggatttatatttgatattygggaaatttttagagygtgtggtgtttttgttagyggtagttattggtggagttgaggttatygttattgtygtygttggygttttgtttttggaattttttagtaagatggtatttattgtttgttttttttygattagtatttttagtygygttttttttttttygggataygtattagttatatattgtggggagaagatgggttatgtaaatgtaagttaaygygtttttttagttatttttgtataatgtaataggaatagygattygygygtaygaatygggtagtgtgygygtgtgtgtgttygygtgtgtgagygygtgtgttagygtgygttttygygygggygtgygtttgggtggattttt

SEQ ID NO: 3549 - DNA, 274 bp, synthetic construct
  misc_feature 1..274: note = Description of Artificial Sequence: Synthetic polynucleotide
  source 1..274: mol_type = other DNA
ttggggttagttttttttttttatygtygtygtttttttatttatttygygtttattttataattatttygtttggttttttttyggttttatttttatgygtttttattatttttttaaatattgtagtaagttgtagtaaggygggtaaatatygatagygygygtgggggygggyggygggygtygyggggtttatttttttttyggttttttygygttttygtygtttttygygttggtttttatygtatgagtagygttttttyggttt

SEQ ID NO: 3550 - DNA, 201 bp, synthetic construct
  misc_feature 1..201: note = Description of Artificial Sequence: Synthetic polynucleotide
  source 1..201: mol_type = other DNA
tttttggttggygggygtttygtyggtygtyggttttttttttgaaattygtyggygtatatgaggtygttgttttygtygtaggygttggyggttttttygyggtgttygtggtgatgttatgtttygttattaygygggaggagaggagggyggygtygtygggttttgggtgaagagyggygtagyggyggyggyggc

SEQ ID NO: 3551 - DNA, 265 bp, synthetic construct
  misc_feature 1..265: note = Description of Artificial Sequence: Synthetic polynucleotide
  source 1..265: mol_type = other DNA
ttttygtggtaggyggtagygagttgggttyggggtygggttgagttttgggatygygttgygtagttttygagtygttygttatttggttgyggtygygyggttatttgtttttygttttyggggygtygtttagtttygygttaggygttttttttagygttygtygttttttttyggygagattattygggygygtttygttygtyggttttygatgtaaatagttgggtttygtaggyggttggtttygygtttttyggtt

SEQ ID NO: 3552 - DNA, 201 bp, synthetic construct
  misc_feature 1..201: note = Description of Artificial Sequence: Synthetic polynucleotide
  source 1..201: mol_type = other DNA
attattattattttaagtgtttgttygttggggattygtygtygtygtygtygtttggtttgttttgttttggggttttgygyggtttttttttgtttttygttttttyggaagaggygttygtttttaagtaygtggagygygtttygttygtagtygtygygttgttaggagygygttatgygtagttgttttttgygt

SEQ ID NO: 3553 - DNA, 362 bp, synthetic construct
  misc_feature 1..362: note = Description of Artificial Sequence: Synthetic polynucleotide
  source 1..362: mol_type = other DNA
tttggyggggagtttgggtagygtygattaaagttyggagyggtagtttyggggygygggaygyggggtataygggtttagttgttygaygggagttygaygygygtttttyggygggtyggygggttyggaagtttygttgttygggtygggtttttaagttygtagtygttttgattaaaataggtatygygayggyggyggtaggyggyggtagttagggttggggtygtatygygtaygygtatgygttygtygtttygygtttttyggygggyggagttyggygtygyggttaggattttttatttygttttygygatttygttgygggtttgtatattygaggattyggtttgaaa

SEQ ID NO: 3554 - DNA, 298 bp, synthetic construct
  misc_feature 1..298: note = Description of Artificial Sequence: Synthetic polynucleotide
  source 1..298: mol_type = other DNA
gttttygttttttatygttttttttygtttygtagttttygagtggygttagtaygttygtygggtatgggttttaaatgtttattagygggagtttaggygtttttgttttggagygyggtygggagtaaaatygtaggagtgggagggtagygagttagttggatttygagtygyggagygygttggttttgtttygtttgatgattttagagygygggtttaagygtygtttatgtagtatttttgagtttyggggaaggagagttaatgaaaaaatatttaatygttttygttg

SEQ ID NO: 3555 - DNA, 295 bp, synthetic construct
  misc_feature 1..295: note = Description of Artificial Sequence: Synthetic polynucleotide
  source 1..295: mol_type = other DNA
gagyggygyggagagyggtaggggygaaatttygygggttagatgttygagggygyggyggygttgttaggttgtygttgttgtttttgygggtttygagygygttttygtaggyggtattgttygyggygyggygtgtgtatygagygagtgaaggtatgtgtggygggygyggttggagttgtygtygtygtygtygtygtgttagtaggttttaatgtttgttattttttaggaygttggtagtagtagtagttyggagttttygagttttyggtaggtttgygtgtttttt

SEQ ID NO: 3556 - DNA, 203 bp, synthetic construct
  misc_feature 1..203: note = Description of Artificial Sequence: Synthetic polynucleotide
  source 1..203: mol_type = other DNA
ygaaggtatttgggatttttagaygtaggatgtttttgatygttgagtaaatgataagggaggygyggtygyggtattygtttatttagygtaatygtttygygyggggagatttyggttgggtttttaggttggatttyggtagtygaaygttygttattyggttaggaagttagggagygagygtttgygyggtygtattt

SEQ ID NO: 3557 - DNA, 215 bp, synthetic construct
  misc_feature 1..215: note = Description of Artificial Sequence: Synthetic polynucleotide
  source 1..215: mol_type = other DNA
ygyggatyggtyggtttgggtttttgtagagtagattttgtttgygttttttaggaggagtgggtggtaggattggggttttttataggttttggggyggyggygagattggtayggttyggggtygtaggygygtagttaygtttttggaagttygtttyggttttygtttttaattygttttttyggggttttatggygtgaggtttggggtt

SEQ ID NO: 3558 - DNA, 201 bp, synthetic construct
  misc_feature 1..201: note = Description of Artificial Sequence: Synthetic polynucleotide
  source 1..201: mol_type = other DNA
ggaggttgtagtygttygagtyggttygggtgggggyggggtgggggyggygyggagggtayggagattayggyggygttattygggatatttagggtttygaggttttgggyggtttttaygygagatygtaaattatgataataggtagttattygaggttaaataaaaayggagtgggtttttygygygtygtygttt

SEQ ID NO: 3559 - DNA, 340 bp, synthetic construct
  misc_feature 1..340: note = Description of Artificial Sequence: Synthetic polynucleotide
  source 1..340: mol_type = other DNA
ggyggygttgayggatgtyggtttttagggagttttaaggyggygggtattagygggttgattttgaagygttgttyggagtyggagygttattgtttggygyggttgatggttgaygygttgygyggttgygtgtttgttttttayggygtggtggagygygayggygaaagttatttgtagttgtaggatttgttygatggtttygayggattttgtgtgttygattgtaaaatgggygttaggtatgygtgttttgttaggtyggttggggggattaagtaggggttyggggtygggatagttgtttgagggggattyggggygagtgttygaaggg

SEQ ID NO: 3560 - DNA, 201 bp, synthetic construct
  misc_feature 1..201: note = Description of Artificial Sequence: Synthetic polynucleotide
  source 1..201: mol_type = other DNA
agggtttagggygtagggygggtttygtaygtagggygggygygygggtatttttgtggttaggygatttyggttygttttttyggagtttagggattttygaggttggygygggttgttygygataaggtgttagtagtttygggttygygaggagtagtttttattygyggttttygagtttagttttgttttttygtt

SEQ ID NO: 3561 - DNA, 236 bp, synthetic construct
  misc_feature 1..236: note = Description of Artificial Sequence: Synthetic polynucleotide
  source 1..236: mol_type = other DNA
tttgagtagtgtatttttttaaaggtaaagagagataagggaggaaatatagtatttaaggtgattagtygattggatattgttgatggtatatttttttygtttttaattaatygtataaaattygtaatatttygygttttygyggggtttttygygtttttggttyggttttttyggtygtttttagtaggygtttygtttttygygggaattttgggatttggtygagygtt

SEQ ID NO: 3562 - DNA, 251 bp, synthetic construct
  misc_feature 1..251: note = Description of Artificial Sequence: Synthetic polynucleotide
  source 1..251: mol_type = other DNA
gttttttagtttttygygtatttttttgygttygggtttygtygtttygtttagtgttggttaygggtygtgttattagtttgtgygttttygttattygygggtyggggtatttggygttttgtgtgggtggygggagyggggaygtttyggtgttyggggatygtagygygttggygtttaattttgtygtygttygttttggagtygggaggttttagtygtttaagtgtttygggagatttaggtat

SEQ ID NO: 3563 - DNA, 201 bp, synthetic construct
  misc_feature 1..201: note = Description of Artificial Sequence: Synthetic polynucleotide
  source 1..201: mol_type = other DNA
tttygttttygttttattttttattggygtaggtttaggttatygttgttaggatttttygttgtygtygtttttygttttttttatttagattttgagtygtttattttagtyggtgtaggtygyggggtygtttttgatggtttgggtattttttattttygtttygtttaygattatygyggttgtttgagttgttta

SEQ ID NO: 3564 - DNA, 206 bp, synthetic construct
  misc_feature 1..206: note = Description of Artificial Sequence: Synthetic polynucleotide
  source 1..206: mol_type = other DNA
gttttygagtgygtagygtgygtttttagtttttgttgygtttttaggtttggygygygattygagygtagygggtaaagttggaggaatttggyggyggyggagygggygtaggtttagttygataaagttygggggttygggtyggggtygttgtygtagttygtaygttgtttygtgttttygagaggttttttttttagygt

SEQ ID NO: 3565 - DNA, 201 bp, synthetic construct
  misc_feature 1..201: note = Description of Artificial Sequence: Synthetic polynucleotide
  source 1..201: mol_type = other DNA
ggtygtygtttatttygygtatttygttttttggaaatttagtagtyggggggygaatatygyggygtttttatgggaatttggtttygggtttagagygygggtagttggtagagtttggggggygyggyggyggtagtagtaggttggagggygygyggygggggttaaggggatttggtyggygttyggagtyggagt

SEQ ID NO: 3566 - DNA, 203 bp, synthetic construct
  misc_feature 1..203: note = Description of Artificial Sequence: Synthetic polynucleotide
  source 1..203: mol_type = other DNA
gttgtaattttgggtttgggattgyggggaygggaygggtgggaagyggttaaaggygtagyggtttttggttagagtygtagaggtttgagaygtgggtygygtttyggtttaggagatttygyggtygygttttaatttttagtttttygattgygattgygattygggaaaaygtttaygtttttggaaaggaagtttta

SEQ ID NO: 3567 - DNA, 216 bp, synthetic construct
  misc_feature 1..216: note = Description of Artificial Sequence: Synthetic polynucleotide
  source 1..216: mol_type = other DNA
ttggggggttgggagaaygaaaatattagttgygtttttaatatttaaggaaggaagtggtagyggggayggggagaggatgggaaggggatgttgattgygagttggggygggaygyggtgatgggaggggatygggtygggaatgygggaggygaggggagygaygggatttgtygtttyggyggtygggtagttaatygattygtttttttta

SEQ ID NO: 3568 - DNA, 335 bp, synthetic construct
  misc_feature 1..335: note = Description of Artificial Sequence: Synthetic polynucleotide
  source 1..335: mol_type = other DNA
agtgtyggagygttyggtggtygtygygtygygygtttggagggatgttaaygtggagtyggygtygagttygttyggygtgygtgygtgtgtgggagygygygagttttttgaygyggggattagttatgaatygggggtgtgtgtttgtttttagagatttggtaaggtgyggagttttttagaagtgyggttaagyggtagyggagayggygagttaggaattttttttygygtttttagttttttagygtggyggyggaattttyggagaaagtttgtaaatttttagygggygyggygaggaygtygggttatttagggggygggtgggc

SEQ ID NO: 3569 - DNA, 230 bp, synthetic construct
  misc_feature 1..230: note = Description of Artificial Sequence: Synthetic polynucleotide
  source 1..230: mol_type = other DNA
gagagaaagtgagaagggagagaaaagyggyggttgagtaaagygggagtyggygygggyggtggggtttgattyggaygtygygtattyggtttygtttygygtttagygtttygtttattttttggtygygtttgttttygygtttttttgtttttttttatttattagtagttttgttgataagygagaaaattgataagtgagaaaagtygtttgttagygttygg

SEQ ID NO: 3570 - DNA, 224 bp, synthetic construct
  misc_feature 1..224: note = Description of Artificial Sequence: Synthetic polynucleotide
  source 1..224: mol_type = other DNA
tagtatagggggtgagatggggtggtggttggtgaaygttggttattttattttatattattttattttgagagttgttataattatyggygttatttttygtgtattttgaggtttggttggygagtygttgttgggagttttttgtaaatattttttaaagtttgaaggygggttttaaaygtaggygtyggggattatgggagtttttaaatagttgygtt

SEQ ID NO: 3571 - DNA, 211 bp, synthetic construct
  misc_feature 1..211: note = Description of Artificial Sequence: Synthetic polynucleotide
  source 1..211: mol_type = other DNA
ggttaattttaggtatagtttattygagttaggygaggtttagaaaggtttgattygtttggtagttttaayggatttgttttygtagtygttgattagtygttgaygagyggatttttyggtygttatggygattgtgaaatgtagggtggagygtatgygttygaagttattygygygggtagtttttgygtgtttttttgygtgtttt

SEQ ID NO: 3572 - DNA, 205 bp, synthetic construct
  misc_feature 1..205: note = Description of Artificial Sequence: Synthetic polynucleotide
  source 1..205: mol_type = other DNA
ygtgtaattygattttttttgatttataagttttgagtgatagttttgatttggtttaatygygggagggaggggaaagagaaagaaagaaatttttagtygtaygttttttttggtatttaatygattttttggaaaaaggttttatttyggtttggtgtttygtgttgggtggagaagtttttygtttygatttggtatygtt

SEQ ID NO: 3573 - DNA, 398 bp, synthetic construct
  misc_feature 1..398: note = Description of Artificial Sequence: Synthetic polynucleotide
  source 1..398: mol_type = other DNA
tttygttygtttygygtttygygtttyggygtttygtygttygtygttygttygtttyggygtygtygttygygtttyggygtttygggtyggygaggggygygttygyggtygyggtygttgtatggygttgagatggygggggygtygygyggyggaggyggyggyggaggyggygygggygagttygggggygtygagygggyggtygggataagtygtyggygygggtttygggygtgygaygaggagttygtttgtttagagttggaggygttgtttygyggttataygttgyggttggagtaggyggttaygttgaaggygttggtygtttttagtttgttggygggygygttggygttggtygagttgttgggygygtyggggttygygtt

SEQ ID NO: 3574 - DNA, 290 bp, synthetic construct
  misc_feature 1..290: note = Description of Artificial Sequence: Synthetic polynucleotide
  source 1..290: mol_type = other DNA
atagygggygtttttagatattggggaaagtgttttaygatgtttygagtttttttagtttygttagyggggygagygtgagggtgtttygatygattagyggtttygggtgtagggtggygggttyggyggygygygttttttttttttttttggyggttygtaygtgtygttygygtygygtttttaygggttaygygygggtttygtagygtygyggtygagtygggttgttyggttygyggatatagygtyggtygtygtatttygtgyggggtygyggygygatg

SEQ ID NO: 3575 - DNA, 307 bp, synthetic construct
  misc_feature 1..307: note = Description of Artificial Sequence: Synthetic polynucleotide
  source 1..307: mol_type = other DNA
ygtgaaattgtttaattaagtgygtagttatagaggaagaggyggtttttttaatatggyggggtttttgttttttagttttygggttttgattttagttygygtttttattgttttatttttttygtttttggagtttttyggtgattttattatagtttttgttattttgtgatttgtaggtattgggagatttatagggaggayggyggaatatttggaggttgggaaatggtgagtgygtggagtgggtgtttygagaatggggaagaggttgtttgaattyggtyggaatyggttgyggtgg

SEQ ID NO: 3576 - DNA, 212 bp, synthetic construct
  misc_feature 1..212: note = Description of Artificial Sequence: Synthetic polynucleotide
  source 1..212: mol_type = other DNA
agtgttgttaggyggaggttygttagaaggtttygtagttgttgaggyggggtgggattgygttttaggggtygygttgaagttggygtygygattattgygtatygatttygtttattttttgttygttttygggagttttttttgttttaggayggttttttattttttaaattatgttygttttttatttyggatttatagttattttt

SEQ ID NO: 3577 - DNA, 375 bp, synthetic construct
  misc_feature 1..375: note = Description of Artificial Sequence: Synthetic polynucleotide
  source 1..375: mol_type = other DNA
tggtttttgagtagtatygtttagtgtagttttygttaggaaaagtagtagaatygatagttttagggggygagyggggtttatggtgtagggggtygggyggttygttgggtaaggygttygagaaagygtttggygggaggaggtgygyggttttttgttttaggyggttygggtgttygttttatgyggggygagygttyggtygattttygtyggggyggagtttgaggggtggttgatttatgtayggggattgttatttygtygttttygygttgtaaattgtgtaagagggagaggaatttttygttaagttgaaaagttgaatttgttttttaaatttttttttgtagtttagayggggaygttttg

SEQ ID NO: 3578 - DNA, 201 bp, synthetic construct
  misc_feature 1..201: note = Description of Artificial Sequence: Synthetic polynucleotide
  source 1..201: mol_type = other DNA
ggggttgttygtaatatgtagggaaatgagtatttygttttgttttttatttttttttagtttttygtggtgggtgtataggaaaaagaagggygaaaagygggggtaatagttagtygtygygygygtttttagygtygtttttagtaatagygttaggaggaaagtttgtygggtttagttattgygttttatgtygtc

SEQ ID NO: 3579 - DNA, 356 bp, synthetic construct
  misc_feature 1..356: note = Description of Artificial Sequence: Synthetic polynucleotide
  source 1..356: mol_type = other DNA
ttggagaygtygggayggaggagttaygyggagagaaggygagaagaaggyggaygggagyggaaygggttygggagygggtttgggagygggttttygtygagaagtttygygggagayggyggtttttaaagttattttgggtygygggagygygggatyggggttgygggygtygagagygygtygtttgtygttttygtgygtygtygtygtttttgygygaygtttttyggttaggtttgggaaagygttygtttygttttatatttttttaaagtttygggygtygygtttttttygtygtygttataygtgtttyggtygttttttygttttygygygtygtttygttc

SEQ ID NO: 3580 - DNA, 265 bp, synthetic construct
  misc_feature 1..265: note = Description of Artificial Sequence: Synthetic polynucleotide
  source 1..265: mol_type = other DNA
gtyggtttttttgtttgagtyggttgygtttygygtttttyggggttygtagtttgttagttygggyggttygtattygttttgggaattygttygaggtygygaatygttaggggttttygygttttttttttatttaggttttttgtttttttygtygyggtygttyggtttttygyggtagygatagagttttatttgtagaggattttaaaatgagattaagygaaagtggaattggtagattygagtggtgtttggaaat

SEQ ID NO: 3581 - DNA, 697 bp, synthetic construct
  misc_feature 1..697: note = Description of Artificial Sequence: Synthetic polynucleotide
  source 1..697: mol_type = other DNA
gattttagtygtaygttgtgygaggtttgtaatattygttttagtygttaygagatttatatygtgtataagyggtattattgygtttygygttaygattygtygtygygtygatyggtygygttttygggattttttgggtyggtygygttttyggttttttttttygtygygtttgtgygtaygygtagaygtygtaagttttaygagttgtaygyggtyggygtttygtttttttygtygttyggttaygttttygygttygagtygtygyggttyggaagyggaagyggaagyggtttyggtttygtttttgygygttygttyggtttygyggtygayggttttatygatttgagtaagaagtygyggygttygtttttyggagtttyggtatyggygttggtygattattaygagtgtayggtttgtygygtgagtttttatagtttygaggtttatttggygtataagaagtattygtgtttygttgygttatygttyggygygttyggtttgttygtygtygtttgtttttattgtttttygaayggttyggtgygyggggatttgttggagtattttygtttggygtayggtttgttgttyggygygtttttggtyggttygggggtygaggttyggaygtyggtygatygyggtttttygttygttttygttttygtygttttttygt

SEQ ID NO: 3582 - DNA, 226 bp, synthetic construct
  misc_feature 1..226: note = Description of Artificial Sequence: Synthetic polynucleotide
  source 1..226: mol_type = other DNA
tgggaggagygtagatatttttyggtgatagggagggttttttatttggttgttatttggaagtttatagtggtttyggygggtaggygggygggtagagygygggttygaaygtttttygygtttgyggyggygtaygtgyggyggyggyggyggygtyggyggygygggygggatttattgggtggtygygygygttattygygygttttttgygygtttttgt

SEQ ID NO: 3583 - DNA, 201 bp, synthetic construct
  misc_feature 1..201: note = Description of Artificial Sequence: Synthetic polynucleotide
  source 1..201: mol_type = other DNA
ttttttttatttttttaatttttagtaggatayggaatttyggygtttttygaaagttataaaagaggggtayggaaattttaagttygtygtgttaattyggagaaygtaaattygaggtagagygtgygtygtgyggggatgtgggtgtygaggatttygaagygttyggtttttttygygatttttattttttttaga

SEQ ID NO: 3584 - DNA, 201 bp, synthetic construct
  misc_feature 1..201: note = Description of Artificial Sequence: Synthetic polynucleotide
  source 1..201: mol_type = other DNA
tatttygttatttyggyggggtaagttyggattttattagggtaggttygggaggttatttagggtagaygattygaggtagagygttttaaaattttgtygtygtaygtttagttagagygtygagygygtttgtttttttttygttattttttagttttttattygtygattaaatttttgggggattatatttttaag

SEQ ID NO: 3585 - DNA, 215 bp, synthetic construct
  misc_feature 1..215: note = Description of Artificial Sequence: Synthetic polynucleotide
  source 1..215: mol_type = other DNA
ttgttttttagttagaaygtgaatgtattgttgaygtatattgttttgggagaagattagygtgatgtagtgtttttatgtattagygtygtttttttttygtygtttgtttygyggggttaaygtyggygttttttagygtygygtyggtyggygtygygtagtttygygttttyggtygttygtttttttttttttttttttttttttttttt

SEQ ID NO: 3586 - DNA, 252 bp, synthetic construct
  misc_feature 1..252: note = Description of Artificial Sequence: Synthetic polynucleotide
  source 1..252: mol_type = other DNA
tgaaygtgtgygtgtgygygygtgtggttgttttttttagttttagtttygaaygtaaatattttatygaggtatagggaagtygggagtagtygaggaaygyggagggygtygaattagagtttgyggggtttgatagttttttttgyggygtttaaggtgggygtaatgtttaataaaaaggtyggaaaatggggatygatttygaatattttttttttttatttagtttyggagttygagtagyggygg

SEQ ID NO: 3587 - DNA, 203 bp, synthetic construct
  misc_feature 1..203: note = Description of Artificial Sequence: Synthetic polynucleotide
  source 1..203: mol_type = other DNA
ygtttyggyggtygyggagggagygtaggyggygtygttgtaggggtygggygggttggyggyggyggyggyggyggttgtaggagygygggtaggttygygygtygttggtaggggtagtaaatggtagttttttttygtagtatttattygyggttgtatygtatyggggtattgtgggaaatttygtttattttttygtt

SEQ ID NO: 3588 - DNA, 201 bp, synthetic construct
  misc_feature 1..201: note = Description of Artificial Sequence: Synthetic polynucleotide
  source 1..201: mol_type = other DNA
yggyggtattyggygtagaggttttagygyggggagtygggtttagtttyggtttgttagygtygyggttttagtttattygaggtyggtttggggggttygtagggygygyggagygtygagtgygygtygggttgggtttygtatttyggtgtaggagygygggygyggygyggyggagygtttygtatggagtyggtt

SEQ ID NO: 3589 - DNA, 201 bp, synthetic construct
  misc_feature 1..201: note = Description of Artificial Sequence: Synthetic polynucleotide
  source 1..201: mol_type = other DNA
gttgaatatygttygggtttagtttttatttygyggtttggtgaagttggttttygtgtttgtttgggaagtttttgtttggggataatygttaggttttygagtygttttttttttatttttygttgygtyggtaattttattttttygtttttattaayggatyggtatttaaattaaagtttagttttttggggttta

SEQ ID NO: 3590 - DNA, 201 bp, synthetic construct
  misc_feature 1..201: note = Description of Artificial Sequence: Synthetic polynucleotide
  source 1..201: mol_type = other DNA
tttygtttttyggtagagtttttgttygygttaatttatttattaggttttgttygygttaygygygtttttggtaggtttggggyggggaaaggygaagygttgggtaygygagggtttgtgtattttagtttttaygaygtttttggttttttttaggttygtygttgtygtatttaatttttttttttygggggttat

SEQ ID NO: 3591 - DNA, 213 bp, synthetic construct
  misc_feature 1..213: note = Description of Artificial Sequence: Synthetic polynucleotide
  source 1..213: mol_type = other DNA
tagtttatttaatattatttatgtattttgtgtaaggaattgtgggatttygttttayggtaaataatatggaaattttaaaaatagygatttttttgtgygtgtttatttaygygtttyggggtgatttggyggggttgtygtygggtgatttatatttttgaatygygaagygatagggaaagygygggygagygtaggagaygyggtygg

SEQ ID NO: 3592 - DNA, 385 bp, synthetic construct
  misc_feature 1..385: note = Description of Artificial Sequence: Synthetic polynucleotide
  source 1..385: mol_type = other DNA
ttattttttgtttgtttaagtyggttggttttygtgattgattyggaataatagagtagatgtttgygtgggaggtaagttttatttaatatttgttttgyggygggaaggtttgggtgtttatagatagagttggagtttttyggtgggtggtatagataattagttggggttgttttatatgtaatttaattataggggaaataggtttaaatatygggtgataagtagygtaattgtttygggtgattttgtaattttttttttattaattttttttataaygtatatgattgttataagggttaattaaaaagagygtgagtggttttatgttatatgtagttggattagaaagtgttgagtatttgtttatgygtgtaag

SEQ ID NO: 3593 - DNA, 278 bp, synthetic construct
  misc_feature 1..278: note = Description of Artificial Sequence: Synthetic polynucleotide
  source 1..278: mol_type = other DNA
ggtattgyggtttagttttygttyggggattygygggtygattgtggttttttttggggaagtyggggygyggggaggygtttygggtattttagtygtayggggtaygttygttttyggyggggtttttygtttygttgtgggagtggtagtgggtgtyggggtggagaaagtaygygtggygyggagttttggggaygyggygttttattygttttggggagtttyggattttttttagtttttaggttygtatgtttttttttttttagtgtttt

SEQ ID NO: 3594 - DNA, 248 bp, synthetic construct
  misc_feature 1..248: note = Description of Artificial Sequence: Synthetic polynucleotide
  source 1..248: mol_type = other DNA
aygygagtygttagyggtgggatttatygaygatttttyggggygataggagtagtttygagagttagggygagygttygttttaggtggtyggatygttygtygygttygygtygygttttttgtaggtaaygggagaygttttygygtagygygagygttttagygyggtygttygttttttttttygagggataaattttttttaaattygattygagtttttggattaaattygtttgygtyga

SEQ ID NO: 3595 - DNA, 216 bp, synthetic construct
  misc_feature 1..216: note = Description of Artificial Sequence: Synthetic polynucleotide
  source 1..216: mol_type = other DNA
tataatataagggagagaaagtaaygttttggttttagaaatttttatygttaaggttagttttggttagaygtatagttaaagagtttttttagtttagyggatgaatygttygygagtggtattttttaaaattttggttttattttttaagatgtttttttattgygtaatttagaaagtattyggatygtygttatttattagyggyggyga

SEQ ID NO: 3596 - DNA, 201 bp, synthetic construct
  misc_feature 1..201: note = Description of Artificial Sequence: Synthetic polynucleotide
  source 1..201: mol_type = other DNA
tgaggtgttttttttattaattttaggtatyggtttttggtggaattgtttttagattgtttgagtttttagggttaagttttttttttattttttagtayggagttttatttagaattgtatttygaaagtttaaagtttatttatggtttttagagataggygaaggygaggttttttaygggaygttttggtaggtgt

SEQ ID NO: 3597 - DNA, 208 bp, synthetic construct
  misc_feature 1..208: note = Description of Artificial Sequence: Synthetic polynucleotide
  source 1..208: mol_type = other DNA
ygagtagttagggttagygagygattttagtagtagggaygyggtygtgygagagttygyggataggygagggggattttaggggagtagttgttgtttaygggttaygggygatgtayggagtggagaagtgaaygtggtttataggatttttgttyggaaggtggagagygttataggggaattttttygatttttgttygtttyg

SEQ ID NO: 3598 - DNA, 201 bp, synthetic construct
  misc_feature 1..201: note = Description of Artificial Sequence: Synthetic polynucleotide
  source 1..201: mol_type = other DNA
ttaggagttyggatttttgtttagttttttggyggagttaagttygagygtatagatttttygagttttagyggttagggggtattgtgtgagyggttgaygttattttttygttyggtygaaattaggyggygggattttatatagttgaggagagggagtygaggtygtgatttagggttggygaygattaaattaagt

SEQ ID NO: 3599 - DNA, 364 bp, synthetic construct
  misc_feature 1..364: note = Description of Artificial Sequence: Synthetic polynucleotide
  source 1..364: mol_type = other DNA
gtygygggtgaggtttgtggttaatttygygttgtygaggttttattttttygagtttagtttgattttaggtygtttttaggtyggtgtttagttgaggygggaaygttgtagtttggttgagygtgatttttaggttttgtgaggaaaagtygagygygttatatygaggygttagtygtttattttattataaggtaaaagatttatgttgttttagttattttaaagttgggagatatattgtattttttattagatttygaatgtttttagtgtttgtaattttttaagaagtttttagagtagatagtttttggatygtgggtattttttttyggggayggggattttgttgatygtt

SEQ ID NO: 3600 - DNA, 213 bp, synthetic construct
  misc_feature 1..213: note = Description of Artificial Sequence: Synthetic polynucleotide
  source 1..213: mol_type = other DNA
gtttagtttttttttagtatgtaaagttttttgttttttttyggagttggyggaggyggtaattttttattttygtygtygggggtygggtagtagygggygygygggttagygtttagtayggygggtagygtygygttgygtatygtygtygattatgagygaggatagtygyggagatagtygygtygagagygttaaggatttggagaa

SEQ ID NO: 3601 - DNA, 201 bp, synthetic construct
  misc_feature 1..201: note = Description of Artificial Sequence: Synthetic polynucleotide
  source 1..201: mol_type = other DNA
ttttttygttayggtaatttaattggaggtagaagtyggyggggyggtygagyggggyggggygggagygyggtygtygygagttayggtggggagygggygygggggattttggygggtttygggtagygyggttgtatttatttgtgttataattgyggygayggggggttgaggaatyggtttttttaaaagtaaatc

SEQ ID NO: 3602 - DNA, 201 bp, synthetic construct
  misc_feature 1..201: note = Description of Artificial Sequence: Synthetic polynucleotide
  source 1..201: mol_type = other DNA
ttttgggyggttgtagaggtyggtygttyggtttggtttattttttttaggaaattttatattggagaggtaagggygattttaaaatgtatygttgagtygttaagttgttatttttttttatttttttttgtttttttaaattgtatttaaaaaaaaaaaaaagttaattgtatagagtggttgggygygatgggtggg

SEQ ID NO: 3603 - DNA, 296 bp, synthetic construct
  misc_feature 1..296: note = Description of Artificial Sequence: Synthetic polynucleotide
  source 1..296: mol_type = other DNA
ttygggatygygtttyggtygttygagtttttygygttygtygttttttatttyggtygggggtttatttgggagttygttgttttyggttagtygttygygtgtgtttagggttagtagtaygtataagtgttagygtayggtygtygygtttatgtttaatgygggtttygttgggygtgygggygtgyggggygyggggattygatygatyggtygttttygtaggygttgttygttgttygtygtttygttatygttygggttttygagtygtttagttagttyggttgatg

SEQ ID NO: 3604 - DNA, 201 bp, synthetic construct
  misc_feature 1..201: note = Description of Artificial Sequence: Synthetic polynucleotide
  source 1..201: mol_type = other DNA
ttttgtttggyggtttttgygttyggggttgttgagttyggggttygttttgaggtygyggttgtggtttttggttttttyggttygygttattgtygygyggygttygttgtattttgttttttttgyggtttygtatgtttttggtggaatttagttyggyggaygaygaggaggatgagatggaagtttgttggaaat

SEQ ID NO: 3605 - DNA, 297 bp, synthetic construct
  misc_feature 1..297: note = Description of Artificial Sequence: Synthetic polynucleotide
  source 1..297: mol_type = other DNA
ggggagggaggygyggygygggaggaggaggggygtagtygyggagttagtggtttygtttggaygygttgttttttagatattttyggagttttagtygygyggatygygygttttygtygttttgtttttaaatttttgtygtagtttttttttaagttagygaatttattttttaaaattagaaattgaatttyggtaygggaaaggagttygyggaggagtaaaattatagtagagtaagaagagttttagagagtagttttttyggagtattaatttygtgtygggagtgta

SEQ ID NO: 3606 - DNA, 268 bp, synthetic construct
  misc_feature 1..268: note = Description of Artificial Sequence: Synthetic polynucleotide
  source 1..268: mol_type = other DNA
tygygttygggaggggyggttgtygttygyggggygttygyggtgttygggtttgggtagygaggaggtgaygtygttttygygggatgagttygggaggyggaggggyggaggaggtgttggyggyggtattgagyggyggyggygtagggygygygggtttttygygtygattttatygatttaaggggyggyggyggtggyggyggttgagygattttgggtygggygygtgatgaggaggggtyggygttagatttygttgtac

SEQ ID NO: 3607 - DNA, 201 bp, synthetic construct
  misc_feature 1..201: note = Description of Artificial Sequence: Synthetic polynucleotide
  source 1..201: mol_type = other DNA
ttgagtagtygaagggataattagatagttatagatagatagayggttagttygagtttygggtaggagagaggttgygaggagtagtttatgtttgtttygtttagttttygygttttygggttgtttttttaatttygattygygtaygttgygagttttyggygttgtygtttagtyggaggggtagtttygtttttt

SEQ ID NO: 3608 - DNA, 201 bp, synthetic construct
  misc_feature 1..201: note = Description of Artificial Sequence: Synthetic polynucleotide
  source 1..201: mol_type = other DNA
ygygattagtattttttygttaygaatttgagagataagaagygaaaatagggtgtgtgggggatggagagagtttyggggaggtagttgygttttygtaygttttaatttaaagaagagagggaaggaggaagygaatttattgtttagtaygagtygyggagyggtttaatttagagygggtagttgyggaygagttgg

SEQ ID NO: 3609 - DNA, 201 bp, synthetic construct
  misc_feature 1..201: note = Description of Artificial Sequence: Synthetic polynucleotide
  source 1..201: mol_type = other DNA
ttttgtgygagtaaagtygggagagygagttttaagtatttggtagyggtgtttttagtaggygtygaggaattyggttatttatttttggtgaattttgygtttattgaggtattygaggtayggatgtgttygtttagtattyggagaygaaggagagagagyggggatatgygttttagttttgttaggttttagggt

SEQ ID NO: 3610 - DNA, 201 bp, synthetic construct
  misc_feature 1..201: note = Description of Artificial Sequence: Synthetic polynucleotide
  source 1..201: mol_type = other DNA
tttttttttttygygtatttygtggttygattygagggygtygaatayggyggygtttattagtaggtaggtgaaggtgtagaygatgagggatagagttygtaygttttgtttttttatggtygttagtaaggagtyggygyggggggtatgtttygtaggtttatagtygygygygttttattgtagygttyggyggtc

SEQ ID NO: 3611 - DNA, 302 bp, synthetic construct
  misc_feature 1..302: note = Description of Artificial Sequence: Synthetic polynucleotide
  source 1..302: mol_type = other DNA
ygtttattygggygygygggtgygtagyggggttttygtygggygtyggtyggtgygygaagtttgttyggtttaatttttaaggygygggagyggggygyggttttaggayggtagggatygygatggagyggtttygggggyggtygggggayggygyggtggyggtyggttagttygttttttygggggyggygggygyggyggyggyggygggaggggtttygygggtttygyggagtagyggggyggaygygggygtatgagtygygygggggtyggggtttttyggygttygggyg

SEQ ID NO: 3612 - DNA, 201 bp, synthetic construct
  misc_feature 1..201: note = Description of Artificial Sequence: Synthetic polynucleotide
  source 1..201: mol_type = other DNA
tyggtggtygygttygtgaaatggggaygygggttttgttttyggattttttttagttttygatttttygtatttgtttygagatttaaygtgttyggttygtagygtgttgggtttgyggygttagggtggttygagtttygagattatttgygtttgyggatatagtygyggggtttggtatgaagggttttagggagg

SEQ ID NO: 3613 - DNA, 220 bp, synthetic construct
  misc_feature 1..220: note = Description of Artificial Sequence: Synthetic polynucleotide
  source 1..220: mol_type = other DNA
gyggggygggygattgtygggtttygggttagttttygtttttygtttygttttygatygttyggttttttygttyggygttttttygggttgygtttygyggtttttggyggyggyggyggygggygtagagygyggtatgggygttygggtygyggggtttggyggyggygggyggaygggygygyggttgygggygtaggtgyggggyggygggtyg

SEQ ID NO: 3614 - DNA, 347 bp, synthetic construct
  misc_feature 1..347: note = Description of Artificial Sequence: Synthetic polynucleotide
  source 1..347: mol_type = other DNA
tatygtttygggtgyggyggttttaagyggagatttgagygyggygggtygagttttttaatttgttggygttgttttttttttttyggyggtgygygggyggygttttaaaggggaggattttgyggygygggtaagaggyggygggagygygyggttygggagtgtggttgtagtgygtygggatattagggtttygygtttygtatttaagaggttttygygttttaatttttygygttygygygttygyggatttaggtygaggatygaaaggggtygttygagttttyggggtyggygtttagagagtttagtaaggtyggtygttttgtyggtgtgtygtc

SEQ ID NO: 3615 - DNA, 201 bp, synthetic construct
  misc_feature 1..201: note = Description of Artificial Sequence: Synthetic polynucleotide
  source 1..201: mol_type = other DNA
tggtattaggtttttttatgggtatyggagtaggyggataggggtggggtttygygagygatayggaagggttagtgtggyggagyggattttgtggaggyggggttattgtgtttttgagaagggttttygggggtggagtttattaaggttgygggggygtggttayggagyggagttaataaaagyggggygtgtayg

SEQ ID NO: 3616 - DNA, 201 bp, synthetic construct
  misc_feature 1..201: note = Description of Artificial Sequence: Synthetic polynucleotide
  source 1..201: mol_type = other DNA
ygttttggtatygggggyggyggygtagaggtygggaggaagaaattygggttttggtttaggtygggtttttatttttgygattygygagaggtttaggygggaaaggyggygagtggygttagyggtttygaaagtaaatttggttyggtgttattgttygagggtygtygggygygttttttaattttttygagtttg

SEQ ID NO: 3617 - DNA, 225 bp, synthetic construct
  misc_feature 1..225: note = Description of Artificial Sequence: Synthetic polynucleotide
  source 1..225: mol_type = other DNA
agtgygtaygttgtaggaattayggttaygtttygtygtttaagggttataagygtttttgtatgtggygygattgttagtgtaagaagtgtaatttgatygtygagaggtagygygtgatggtygygtaggtgggtgygggygtgygggagttygggtttagttttagtttttttttttttttttttttttagatggagtttygttyggttgtttaggttgtag

SEQ ID NO: 3618 - DNA, 318 bp, synthetic construct
  misc_feature 1..318: note = Description of Artificial Sequence: Synthetic polynucleotide
  source 1..318: mol_type = other DNA
gttgttaatttattygggagttyggggtatgaayggttayggttttttttatttgtatatgggyggttyggtgtygtagtygttaygggygtttttgtagygtaygtttaagtgygygygttgtygtaattatggygttttgttttggtttaagggttataagygttattgtygttttaaggattgtatttgygagaagtgtatttttattatygagyggtagygggttatggttgygtaggtggygttgygtyggtagtaggttaaygagagtttggagagttttattttygattygttgygygttttgttagggtt

SEQ ID NO: 3619 - DNA, 265 bp, synthetic construct
  misc_feature 1..265: note = Description of Artificial Sequence: Synthetic polynucleotide
  source 1..265: mol_type = other DNA
aggaaggggagygtagtttgtagattgaagttagtggygttgygttgaatgtaattgygygygttygtygggtgagttagygatttgagttaggygggggyggttygatttttttygtttagtttgggttagaggaagtygaaagyggttttagtaaggtgaggygttygaggttgtagaagatygagtagaattttgtagagttygggatgtgttgggttaggtygttgaggatttgattggttttttttttttttttttttat

SEQ ID NO: 3620 - DNA, 259 bp, synthetic construct
  misc_feature 1..259: note = Description of Artificial Sequence: Synthetic polynucleotide
  source 1..259: mol_type = other DNA
yggaggggaggtygyggagggtygggtggaggtttttatygttagttttaaggtttgtagtatttttttttggtttttgtttttagggtygatgtgttttygagygaagtygtygtgtttgggtagaaggygttttaggaggygygaggttttagtygyggygttgttttygtygttattgttgttgtttyggtttygyggygtttagtayggtttygattttttagttaggyggyggtygttttygatttygyggttt

SEQ ID NO: 3621 - DNA, 201 bp, synthetic construct
  misc_feature 1..201: note = Description of Artificial Sequence: Synthetic polynucleotide
  source 1..201: mol_type = other DNA
gayggggtatyggtattaattagyggttygtttyggggttttygyggttaaggygagaaygtaggattaggagtattgttgtttattttttatygtaattygtatatttygggattaygtaayggyggatggggygttygggagyggtttttgtaggggagagtaataggttttygygttttggaggtttggtttgygttt

SEQ ID NO: 3622 - DNA, 323 bp, synthetic construct
  misc_feature 1..323: note = Description of Artificial Sequence: Synthetic polynucleotide
  source 1..323: mol_type = other DNA
ttttygygattttatyggggaaatatygyggatagtygggttagtagygttyggagtttattttaggtttttaaatttgtagtattttttagagygygygygttyggagygggatttgtttgttttagtgtaygtygyggagygaattatygggttggygggggtggaggggtgtaggygtgggggttgygggtygttygggttttgggttttttttgtygtygtygtygtttttygttttyggttaggagtygygygtgaygyggttygtygtaggagtttygaaggygyggygtyggygagttttttttyggtaggygygt

SEQ ID NO: 3623 - DNA, 201 bp, synthetic construct
  misc_feature 1..201: note = Description of Artificial Sequence: Synthetic polynucleotide
  source 1..201: mol_type = other DNA
agtygttttygtatttttygttatagttttygtagtaatygttttagtagtygtagttttagtagtygttttatttyggtaagatgtaggaggyggyggtygtggyggyggyggyggyggyggtygyggtagtygyggtgggtagygtgggaygtttgttttagtttttattttaygggttgggttyggtygtygtygttg

SEQ ID NO: 3624 - DNA, 355 bp, synthetic construct
  misc_feature 1..355: note = Description of Artificial Sequence: Synthetic polynucleotide
  source 1..355: mol_type = other DNA
gygaatataattgttttagttataggygaggtttggttaaggtgtgggygtatttggggtaggttttgagaggtttagygttyggtggtgyggatagaggyggggtatygyggygttygtygtygttttttygtaggtgattatttttttgtaggtgttttygggttttaggtggttgygtgtttgygttatggttgatattttgggygagyggtatttggtgatttgtaagggygygayggtggaggtygaggyggygttgtagaataaggtggtggtattgtatttygyggyggttyggtgygygtygagtygygattttaygtygttgttttgygatttttatayggygttg

SEQ ID NO: 3625 - DNA, 201 bp, synthetic construct
  misc_feature 1..201: note = Description of Artificial Sequence: Synthetic polynucleotide
  source 1..201: mol_type = other DNA
ttygygyggagygattgtgaggggttttgttggaatttggtagygyggaggtttggagagaagttttatgttggtttttatttagtyggttygtttttttygagttttggaagttttatttagtygtgtatttaatggttttataaagttgattataagttttagygtatttttgaaggagttaaaagygaygtaggtgta

SEQ ID NO: 3626 - DNA, 290 bp, synthetic construct
  misc_feature 1..290: note = Description of Artificial Sequence: Synthetic polynucleotide
  source 1..290: mol_type = other DNA
gatattttgtggagtaggtggtttaggttgtygggtttatygtygggygttttgygtagygtttygtyggatattaagtagggagtygtygtyggggtygygygygtygtygaaattttgttttygtygtygtttatygataggttgtggagaaggttatygatygatgttatygagttatttttgaagyggttatatttggtgygtggaagtatgttttttygtgggttygttgtattygttygggygttgttggtgtyggtttyggygygggttgtygygtatagtag

SEQ ID NO: 3627 - DNA, 201 bp, synthetic construct
  misc_feature 1..201: note = Description of Artificial Sequence: Synthetic polynucleotide
  source 1..201: mol_type = other DNA
tagagattgtagttttygtygggttggatgygagttttttaggttagagtttagaagygygttgggatttgggtttggtttttgggtttgtgttttttttygtttggttttaattgttygtatttaagattataataaaaaggtttaggaagtaaattttttggaygyggaagggtyggttygygggttttygtygagtga

SEQ ID NO: 3628 - DNA, 201 bp, synthetic construct
  misc_feature 1..201: note = Description of Artificial Sequence: Synthetic polynucleotide
  source 1..201: mol_type = other DNA
agaggtyggttygtygygygggagatattttttttaaagtggaagygttgygtgggtagtagygygggtygggttttyggattttagtttttgttgttttygagattttygtttygygtygtatttttygagtttagygttttygggttgygttgggygtagtggttttyggttagggygtagtyggtttgggygttagag

SEQ ID NO: 3629 - DNA, 288 bp, synthetic construct
  misc_feature 1..288: note = Description of Artificial Sequence: Synthetic polynucleotide
  source 1..288: mol_type = other DNA
ygatgtagtttagaattygygatttagttyggtttattatagtttttagtagygatattygtagttttygattttttagatygagtgagtttaattaagtygttattygygtgttagtagttgggygtttygattttttagatygygtgagtttagtaaagyggttaggygygygtttgtagttyggygttagttyggatttygggagtygttttygagttygygtggayggtagagggyggttgtagttygggygtaggygtygttggtttgygggtttttttgggt

SEQ ID NO: 3630 - DNA, 212 bp, synthetic construct
  misc_feature 1..212: note = Description of Artificial Sequence: Synthetic polynucleotide
  source 1..212: mol_type = other DNA
ttatttttygttgygggaaggggttgtttggttgtttttgggggtttttagagttattttggtttygggggattggaggaggaggttatttattttgygtygtttttaattygtgtattattatttattaaatagagatagattttgggttttttaaagayggatgattgggggtggtgattggtttatttttaaatatttattaygtaagg

SEQ ID NO: 3631 - DNA, 201 bp, synthetic construct
  misc_feature 1..201: note = Description of Artificial Sequence: Synthetic polynucleotide
  source 1..201: mol_type = other DNA
agtagtagtaggagtagygaygtttagattttygggtgttgtyggggyggtygygttattygtgygtatagatttygtagttaggtygttygggtygtagygggggygtygygggygygggtygggattgagttttygtygaggttattagtaygygttygygtagtygyggagtttttygtattttygtttttttgtttc

SEQ ID NO: 3632 - DNA, 246 bp, synthetic construct
  misc_feature 1..246: note = Description of Artificial Sequence: Synthetic polynucleotide
  source 1..246: mol_type = other DNA
gyggggatattttygggggtttygggygyggtttyggggaagaggyggaagttgaaattgygygayggggatatttgttgaaaggtygtttagttygaaaygagygttagattttagtaataaaaggttaggygaggttatatygygttggagatagagyggttgtttyggagygtaggyggyggttygggygggaagaggygttgggyggtyggattygtagaggggygtgygyggagttgggyg

SEQ ID NO: 3633 - DNA, 201 bp, synthetic construct
  misc_feature 1..201: note = Description of Artificial Sequence: Synthetic polynucleotide
  source 1..201: mol_type = other DNA
ggygttgtatygtttttgyggttttagaggttygygggtgtttgggygygggtggygggygggtygggggtttgygggygtgtttgtgygagagttgtttygygagyggygtagagatattygggygagttgagagttttattttgttttatyggtggaatgggtatattyggaaggygtagttgttttatttttgggagg

SEQ ID NO: 3634 - DNA, 201 bp, synthetic construct
  misc_feature 1..201: note = Description of Artificial Sequence: Synthetic polynucleotide
  source 1..201: mol_type = other DNA
ggttgygygaygtttttygtygttgggggagattagtaaagttattygtttttggatttyggggtttgggtttttagatttygtttygyggygggagatgygtttgagttttttatagayggagygygttttagtttgaygtagagggatgaatagataagygtatygggygggaatttygattgtttgtgtatttggggt

SEQ ID NO: 3635 - DNA, 358 bp, synthetic construct
  misc_feature 1..358: note = Description of Artificial Sequence: Synthetic polynucleotide
  source 1..358: mol_type = other DNA
gatatttagyggttttagggtgaatttygatygtagtygtygtygtttygggtagagtttgygtttttgttttgygtttygggygttgaagtygggygggygatgttygyggygtgaaagygttygyggygggygtygatttttgttttagttttttgtttttttygtttygtttgtttygtgtttttgtgattttggttttggygtygtygtttaggygtttygtaatgtagttgtttttgygtttyggygggaggygttttgtttygygagygttyggggttyggagttyggtttgggggtttagtygagttygggyggggtyggggtygyggtggygatgtatygggttygttag

SEQ ID NO: 3636 - DNA, 201 bp, synthetic construct
  misc_feature 1..201: note = Description of Artificial Sequence: Synthetic polynucleotide
  source 1..201: mol_type = other DNA
yggtygggttttttggagagggagtgtaaggaggagtagtgttttttygaggaggttygggagatttttaaggaygyggagaggayggtgagtttagtttyggggygtttygygtygyggatattgtaggyggyggtgaattaggtygygtggggtygtttgygtttttttggttgyggttgtgggyggygaataygtagc

SEQ ID NO: 3637 - DNA, 201 bp, synthetic construct
  misc_feature 1..201: note = Description of Artificial Sequence: Synthetic polynucleotide
  source 1..201: mol_type = other DNA
gttygggaygygagagggggygygayggyggttgyggtyggttyggygtttatttggtygtttttgygagtagygtttygygtttygttygygyggagttygtatttttyggtygygtygtygtygtyggygaggagtygtattygggygtagygtygttygttygygatgayggtygttygggtyggggayggggaggyg

SEQ ID NO: 3638 - DNA, 201 bp, synthetic construct
  misc_feature 1..201: note = Description of Artificial Sequence: Synthetic polynucleotide
  source 1..201: mol_type = other DNA
agagagaattygaggttgtttttgtygttgaaatttgagygggagagtatttygaagtygtttgygtggagygagtagttttygygttatgggttagaggygttygggagaatttgygggttayggattatattygtaggggtttggyggagtaaggtgtygttygtygtttgygggtaggagtyggttttgggtttyggt

SEQ ID NO: 3639 - DNA, 277 bp, synthetic construct
  misc_feature 1..277: note = Description of Artificial Sequence: Synthetic polynucleotide
  source 1..277: mol_type = other DNA
tygtagagatttagttttgtttgtygattggtttttygaygtygtygtygtgtttgagtttygttgtttgttyggataagtagaatttyggtaggygtagygggygtygaggtttgggttttagtygtggygttygtttyggygtagtggggagtygygggygtyggagaagyggtygygttgtttygggttattgtatyggttgaaaaaattaaaagtaaaattaatatttagaaaygaagtttgygtgttttygggggtttygttttgttttttt

SEQ ID NO: 3640 - DNA, 201 bp, synthetic construct
  misc_feature 1..201: note = Description of Artificial Sequence: Synthetic polynucleotide
  source 1..201: mol_type = other DNA
agttagtggaatyggagggggatttyggaggaatttgtttttgatgtttyggttttttggttttttattagaattygtagaggattygttttggagttttygtgygttttggtagaggtyggggaygttagagtgtaygtagttttttgygygtygagtttaggtttygggygtagggaggatygggttgagagtagggtg

SEQ ID NO: 3641 - DNA, 247 bp, synthetic construct
  misc_feature 1..247: note = Description of Artificial Sequence: Synthetic polynucleotide
  source 1..247: mol_type = other DNA
gtaagggtygggagtttggttttttatgaagttgttttaggtygggattagttttagtttygayggtygttgyggtttygtttyggtagtttygtgagttygyggaggagtttygtattygatygtgtatagygatygagttggygyggttygtatgaagygaagygtyggttttagtagygtagtttgagtaggggattygygtggtaattagggttgygygygagttyggggygattgtggyggt

SEQ ID NO: 3642 - DNA, 201 bp, synthetic construct
  misc_feature 1..201: note = Description of Artificial Sequence: Synthetic polynucleotide
  source 1..201: mol_type = other DNA
ttttygygygtagttygygtagygtttagagtyggayggygtttttyggtggyggyggaggagttyggagggaygtagtygggtaaggtagggygtagggygggyggygygaggygtagggygyggygggtagaggttatttggttattttttttggygttyggggaaggtgyggygatggtyggggygygyggggyggyg

SEQ ID NO: 3643 - DNA, 201 bp, synthetic construct
  misc_feature 1..201: note = Description of Artificial Sequence: Synthetic polynucleotide
  source 1..201: mol_type = other DNA
ygttaggttygttttygttyggtygttygttygttyggtgggtygyggtggtygygggttgygttgygygggtygggtttggygggtygggggttgygygygttygygagggygttygaygygggttgaggggygttggygtgtgttygtaggyggttttgygygggggayggygygtttttggatatygtyggttttaag

SEQ ID NO: 3644 - DNA, 201 bp, synthetic construct
  misc_feature 1..201: note = Description of Artificial Sequence: Synthetic polynucleotide
  source 1..201: mol_type = other DNA
ttttygagtttygygattttttygtttatyggggaaggagattttagygtygttgttttgttttttttgaaygttgtttttgttygatttggagtygtygygggagygttttatgttgyggaaatattgtttttagygttgtyggtyggygtttttttttagttttttttttttggttyggyggttttggaattaaatttg

SEQ ID NO: 3645 - DNA, 356 bp, synthetic construct
  misc_feature 1..356: note = Description of Artificial Sequence: Synthetic polynucleotide
  source 1..356: mol_type = other DNA
aatayggagtaygaatataagtaggtatygtatatttgygagttattygggttttygggggaaggtaaaaagttttaataagttttaagtaagattaggaygtttttatagttttgttttgatagttaaggaaaaaatttgttaaaaattagaggygttgttgagtgttggygtgggaatgttagtttagttagagttttgttttgggttatttaaataaaaatagatatgttggtggtaaatgttagttgaataygtaggagagyggtgtttttygggttyggagaagggtttgtagttgtatttttttttttttttttttttggtttttttagtttttttattattaygattag

SEQ ID NO: 3646 - DNA, 201 bp, synthetic construct
  misc_feature 1..201: note = Description of Artificial Sequence: Synthetic polynucleotide
  source 1..201: mol_type = other DNA
ttaaygtttgtttttattttaagttttgttatagttgttatatttattattgttygygtttgtgtygtygygaggattgggaygtttataaggygygttgygtgtayggtygygtgggtagygtgtgtygttaygtattgtagttttgtygygatagyggttyggtgtatygygttttttygygtatygygygtgtyggtt

SEQ ID NO: 3647 - DNA, 281 bp, synthetic construct
  misc_feature 1..281: note = Description of Artificial Sequence: Synthetic polynucleotide
  source 1..281: mol_type = other DNA
agtttygtgygtyggtttttgtttygttagtttygttatggttttttatttattttygygggagygtttttgtttttttattttgtattttttttagagtygygygttagtttttygtttygtggaagygtttttttttygatttyggttgattttygttygtygtttttttygygggtgygygttyggtttttttttygttyggggygggtttgygtgggyggtgtttygggtyggygggyggagtttyggttttttagttttgygtttyggtggagttc

SEQ ID NO: 3648 - DNA, 222 bp, synthetic construct
  misc_feature 1..222: note = Description of Artificial Sequence: Synthetic polynucleotide
  source 1..222: mol_type = other DNA
gtttaggttatatattagattttattggggatgtgagaagggtgtagygggygtgaggtttygttttygtygttttttgttygtttttagattygyggttygtttggtygttttatttggtygatggygttggtggtgagtataggaaggttattatagttttaatttttgaggtaatggttgaagttyggyggggygaagtygttgtaygaggggtyggta

SEQ ID NO: 3649 - DNA, 237 bp, synthetic construct
  misc_feature 1..237: note = Description of Artificial Sequence: Synthetic polynucleotide
  source 1..237: mol_type = other DNA
ygggtttggattaggayggygaggygggtyggygygygygygaggtggtttttatttatatttagygygagttgyggttgygyggygtttttttgygttaygagttttygygygtttaygagtagttttgygagttygtygaggttaataggygttttaygtttattattatttattttayggatyggygtatyggtygtttttttatgtgtatgattatggtygttttygagtygc

SEQ ID NO: 3650 - DNA, 201 bp, synthetic construct
  misc_feature 1..201: note = Description of Artificial Sequence: Synthetic polynucleotide
  source 1..201: mol_type = other DNA
tttggttttttaatttagtagtgtttttgaatgaaygtgtgatagtttaatgaagtagtygagtattttgatttgaatgttggagtyggggtttatagggggttgtattagttagtataggttgggttatgttattgtgataaagagttttagattttaaatttygtttttgtgggttagttgaggtttttgttttaggtt

SEQ ID NO: 3651 - DNA, 364 bp, synthetic construct
  misc_feature 1..364: note = Description of Artificial Sequence: Synthetic polynucleotide
  source 1..364: mol_type = other DNA
gttttattagtttttyggtygagyggaaggygtyggygtttagttgggttaagttgttgtagttgaggtygaggaataygagtttggtygagtygttgaaygtgtttttttttagygagygtagygagttgtttttgaagtttaggtagattaggtygtygtagaagatgaagaagttttyggggattygttggatgyggttgtyggttattagtagtttgygtaygtttagggggaaagggtttggtaygttgggtagttygyggtygyggtagtttayggtgtgygggtyggtgtaggygtagttygyggggtaygygtgttygggygygagtagtagtagaaggttgtagagttygagygt

SEQ ID NO: 3652 - DNA, 201 bp, synthetic construct
  misc_feature 1..201: note = Description of Artificial Sequence: Synthetic polynucleotide
  source 1..201: mol_type = other DNA
gaaattaattygttagaaaaattttttgggagaggygggagyggtaggggtggtygagtggtygtygttaaaaygyggttttattttggtagttgattttygagatttggtagtaagaygtygygygtatygggygggttgtattygaygtttaagtttagttattaagtttaggagyggtttttttaaggygtgtttygg

SEQ ID NO: 3653 - DNA, 201 bp, synthetic construct
  misc_feature 1..201: note = Description of Artificial Sequence: Synthetic polynucleotide
  source 1..201: mol_type = other DNA
gygtttttttttggggtgggtagygtaggtttggtttgygggtggggggtggagagtgagaggtaygyggggtattagtttagtttttttttggggatttygtattygtagtttaaggaatyggtggagtaygaattttatttttgagttggygtaagygttttttttttatggagatttatttyggtttttttttgaggt

SEQ ID NO: 3654 - DNA, 201 bp, synthetic construct
  misc_feature 1..201: note = Description of Artificial Sequence: Synthetic polynucleotide
  source 1..201: mol_type = other DNA
aggaatyggygttgtyggtgtttgggggtyggggygygggygaagtygggtygyggaggatataataggtagagtygggggtgttyggtygygygtttttygygtattatgtagttttttgttatttttttygtttttaggttaaaattttgagtatgatggaagataataagtagttygygtttygtatygatggggygg

SEQ ID NO: 3655 - DNA, 222 bp, synthetic construct
  misc_feature 1..222: note = Description of Artificial Sequence: Synthetic polynucleotide
  source 1..222: mol_type = other DNA
tgygygygtgygtgtgtggygtgtgtttgggtgttttatgattgtttttygtgaggtygtgtgtgagtttttgygtgggtygtgagtgyggtagggagygyggtgttygggggtygtttgtyggtgtgtttgtgygtgtttgtgygttagtttttgtttttgygagtgygtatttttaggatygagtttgtttatatgagtttgtgtttgtgtgtgtgygtt

SEQ ID NO: 3656 - DNA, 201 bp, synthetic construct
  misc_feature 1..201: note = Description of Artificial Sequence: Synthetic polynucleotide
  source 1..201: mol_type = other DNA
gataataagatttgttattgaygttatygggttggtgatatttaggtatagtagttttagtaaaygaatatatttttatgagaattaagttttttgagagyggtaagttgttttgttttgtttatagttgataagaataygtttgtayggttatttagtatttagtattgttatttaatygttttattagtatgtatgaat

SEQ ID NO: 3657 - DNA, 265 bp, synthetic construct
  misc_feature 1..265: note = Description of Artificial Sequence: Synthetic polynucleotide
  source 1..265: mol_type = other DNA
aggygtataygaggagttyggtttagtatttttaaattagatttyggaggygtygttagggagyggttatygttgggygtygtygagygtgttyggggygyggtygtggygggttttttggggyggtagttttaggygygggygygtagtagtttygaaggygtygtttggtttagtygttyggttttygagygtygttgtaagtggggggygtttygyggygtygygtatattttattggggggtygtttygtyggygttygtt

SEQ ID NO: 3658 - DNA, 242 bp, synthetic construct
  misc_feature 1..242: note = Description of Artificial Sequence: Synthetic polynucleotide
  source 1..242: mol_type = other DNA
tygggttgttttygtygtttatyggagagggtygttygggtgtttggttttgttygaaagtttttgggtttttttttttttttgtaaaatttaaagtaatygaataaaaagagtttaggtygygygggygggttgygygttygygttttgtagygygtyggygggggttyggttygyggggttattgtattgagtygggtagtgtgtggtggtggtggtggtgtagygtygtyggygggggc

SEQ ID NO: 3659 - DNA, 201 bp, synthetic construct
  misc_feature 1..201: note = Description of Artificial Sequence: Synthetic polynucleotide
  source 1..201: mol_type = other DNA
ttttagggygtagggttaygagttttygtttttattttyggtttttggtattyggygtyggtttygtygtttttttttataygtatttttggtagggtttygyggggygttttaaagtttgggggtagtttttaggtgtttttgggaagggaaagaaaggttataaagtaaaagaaggagtaaagagaaggygagggagga

SEQ ID NO: 3660 - DNA, 261 bp, synthetic construct
  misc_feature 1..261: note = Description of Artificial Sequence: Synthetic polynucleotide
  source 1..261: mol_type = other DNA
tygtttatygatgagtygtygtygttygygttygggtgtaggtgygtygtygtygygtgtaggtygttygygtgtgtatgttygtgtgygtgttygtgggygtttagatgyggyggyggygayggttttagttgygtttygtggttattttygtgtagygygtggtgtaggttyggtttygygtygttatygttygtygttagtatttyggttaggtygtygtygtygtttttygggtaggtygtttgygygtatagttyg

SEQ ID NO: 3661 - DNA, 201 bp, synthetic construct
  misc_feature 1..201: note = Description of Artificial Sequence: Synthetic polynucleotide
  source 1..201: mol_type = other DNA
yggtgttttgggtygagtygtttggagattttagattagtatgtgggtgggaaagggygtttygttttgggttttttygtttttgygygtagagtagagaygygtagattygtttttatttygtttggtttttttggagtagtttyggyggyggtagygatgggttgggaggggtyggtaygttggtttgygygggttttt

SEQ ID NO: 3662 - DNA, 337 bp, synthetic construct
  misc_feature 1..337: note = Description of Artificial Sequence: Synthetic polynucleotide
  source 1..337: mol_type = other DNA
gaattggataataatgtggygtttgttattggttaggggaggtagayggygttttgattggtygggttygygttyggggagtttygtattttgtagtgttygaaagattygaaattttaaaagttttattgygtgtttttgggaggggagggggygygttaggaaaggagtggaaaaaagtgggygaggaggagygttgaaaattttttgataagtagttttygtgygttygagagygtgtgaattgtttttaattatygtgttyggtgygtttttttgygtagatttgtgtaatttttyggtttttggggygtyggttyggttgtatygtttttat

SEQ ID NO: 3663 - DNA, 201 bp, synthetic construct
  misc_feature 1..201: note = Description of Artificial Sequence: Synthetic polynucleotide
  source 1..201: mol_type = other DNA
tgaagttgttttttygggataggaagggttaaatggttgygygttaattyggtttygattggggtgttagggagtaagagtygtttgtttygggggatttygtttggggggtttttaggggtygttttggygtttyggttataatttgggyggttttgtgyggyggttttygtttgygtttttgygygttatttaaaattt

SEQ ID NO: 3664 - DNA, 201 bp, synthetic construct
  misc_feature 1..201: note = Description of Artificial Sequence: Synthetic polynucleotide
  source 1..201: mol_type = other DNA
tagtaggtagtgygggtatagtgttgtagattattatttygttaggttygggtagygtttattagayggataggygttygyggtygtttttatttyggygygtttatttygagttttttaygtygyggygggygggygtaatatatttttttatttttagtygtygaggattatatttttygtttagttttttygatttat

SEQ ID NO: 3665 - DNA, 201 bp, synthetic construct
  misc_feature 1..201: note = Description of Artificial Sequence: Synthetic polynucleotide
  source 1..201: mol_type = other DNA
ttttgaatygttatttgtttattattygggygttygttatttattaggygttgtattagaggygttatayggygggtatgttggygttgttttgggygttygttttgggtttygtgttgttgttttygttttgggtatygyggttyggygtygygttatygygagtttattattyggygttgttggtygtygyggygttgt

SEQ ID NO: 3666 - DNA, 201 bp, synthetic construct
  misc_feature 1..201: note = Description of Artificial Sequence: Synthetic polynucleotide
  source 1..201: mol_type = other DNA
gtttygtgygtttagttttgtygggygtyggygaygyggyggtygttgtygttgtygttatagtygtgttygtagtgttttaggygtaattgggtattygygtygygggttagtattggtaatttagtyggggttygagggaagyggagattttyggttttygaygtttttgggtatygtygttttttttttttttagggt

SEQ ID NO: 3667 - DNA, 386 bp, synthetic construct
  misc_feature 1..386: note = Description of Artificial Sequence: Synthetic polynucleotide
  source 1..386: mol_type = other DNA
tgtttgttgaaaaataatattgtgattatttttagyggygaagggtgtgtttgggaayggtttggggaggggatagaagagagaggggtgggatggayggyggtagaagtgggaggtataygaggagttattggaaayggygtttttgtggaggagtygggggggatggggagtagagggagggggttttgttgttttagygtttygaggtygtggagyggtagtagttgtagtyggagtagtattagtaatagtaatagtgagygggayggagttaggatygttyggagygtataggtttygaggtagtataaggtttgttatttttttatttgttggtagttgtagaagaagatttgttttttaagtgaaaygtatatgttatt

SEQ ID NO: 3668 - DNA, 201 bp, synthetic construct
  misc_feature 1..201: note = Description of Artificial Sequence: Synthetic polynucleotide
  source 1..201: mol_type = other DNA
aggttatataggggtygggtgtaggttttaygyggaaaggygygtagtgttyggggtttatgtyggtttagggygtataggttttyggggtttyggggttygygttgttygygtygtttgtgagygttygttaagggggagggatttgggygygggggygyggagttttygggagyggygygygtygyggggggygggggg

SEQ ID NO: 3669 - DNA, 201 bp, synthetic construct
  misc_feature 1..201: note = Description of Artificial Sequence: Synthetic polynucleotide
  source 1..201: mol_type = other DNA
tgttagggygtagggagggyggtattyggttttagttttygtaatttygygygtttttttygtygtgggatttgggttttygygtygtttttttgagtttygagygygyggygggygggagttaggttgggattggtggtgaggtagggagtgaggagygagyggagtygygtgygtyggygygtagtttygggtygtttt

SEQ ID NO: 3670 - DNA, 309 bp, synthetic construct
  misc_feature 1..309: note = Description of Artificial Sequence: Synthetic polynucleotide
  source 1..309: mol_type = other DNA
tttgggtygyggyggtttttatttygttatygtygtygtygtygtayggttgttygtygygaataagtatyggtattattaygygaygtagtaggtygggygyggygtgtagttyggyggatgttgttaggttaggygatttygtygtttttggagygygagygygttttagtttgtagygatgattttggaattagattttgatttgygtgggygtgaggygaagtaggttygttagttgttygygttygggygtagataggtatygttgttgtyggaagygtygttttaattttagygtttgygttt

SEQ ID NO: 3671 - DNA, 203 bp, synthetic construct
  misc_feature 1..203: note = Description of Artificial Sequence: Synthetic polynucleotide
  source 1..203: mol_type = other DNA
tattttgttttyggtyggtgattygttgtggtttttaggttaagtgtttttygtgttygggyggttgaygttgtttgaagtttaygyggygtgtyggygaygyggygtygtggtggttaaggttgggtatttttaygtygtttggaagttttyggggttagattagtgygayggyggttggttggttgayggtagtgtgygtt

SEQ ID NO: 3672 - DNA, 388 bp, synthetic construct
  misc_feature 1..388: note = Description of Artificial Sequence: Synthetic polynucleotide
  source 1..388: mol_type = other DNA
atygggaagtagttyggtgttttaagttttttgagatttttyggatttgygygtygttygttyggtagggggttyggtaggygygggyggygggtgggggygggaggttttgttygttyggtggttgtygyggtttttttygygttgttttttaygtttggtttattatgtaygaggtaggtaatttgttttttttttyggggatttatttyggagataagaaggtagtttgttttttgtaatggtttttgttggagtgyggyggggtttaggygygagygggggtaygggyggggagttggtagygaaggatgygttyggygtttttyggyggtygttyggagttygaggtyggygygggaggagygttgatttygygggtygagtt

SEQ ID NO: 3673 - DNA, 241 bp, synthetic construct
  misc_feature 1..241: note = Description of Artificial Sequence: Synthetic polynucleotide
  source 1..241: mol_type = other DNA
gagggyggygygtagyggygtttygygaggtttttaygtygggygatatggggtgtttgttgtttttgttgttttgggygtttttttaggtttggggaagygttgaaggtgggtggaaygagggygtttgagtgtattygygggagggyggagagagggagttgggtagggayggggagggtaaygtttgatggggattggtgagattygggaygtattggygygatttaggtagaaaatt

SEQ ID NO: 3674 - DNA, 232 bp, synthetic construct
  misc_feature 1..232: note = Description of Artificial Sequence: Synthetic polynucleotide
  source 1..232: mol_type = other DNA
gggttttttatttgtatttttttataaaattgtygttygtgtgtgtttttgygtttggttttttgtatttttaaggggtttttgaagatagggtygaatgygygygggggttttaggtattttgygttttayggygggtttygtagttyggttygagtyggttttggaagtttygttttggattagattggtatygaygtygtttttagtttgagygttgagagggaaaayg

SEQ ID NO: 3675 - DNA, 214 bp, synthetic construct
  misc_feature 1..214: note = Description of Artificial Sequence: Synthetic polynucleotide
  source 1..214: mol_type = other DNA
gaattttttttagtgtygtaattaggaaagttttaaaaagtaaggattttagatagataagagatttatttttttttttagtataagaaatatttygygtygygttagtygaaygttgttygtataaggttattygttttttttggtygggaygtattyggtgttttttagttttttattagaattggtttagggggygyggaaatagagaggt

SEQ ID NO: 3676 - DNA, 250 bp, synthetic construct
  misc_feature 1..250: note = Description of Artificial Sequence: Synthetic polynucleotide
  source 1..250: mol_type = other DNA
agtagggattagttggtygtyggtttttygggtaagatggggaatygggagatggaggagttgatttygttggtgaatygtttgtaggaygygttttyggygttgggatagagttgtttgttggagttgtygtagatygtygtggtgggyggttagagygtyggtaagagttyggtgttygagaatttygtgggtaggtaagygygtagggygyggagtaaggatgyggtagtggggygatttygttgyg

SEQ ID NO: 3677 - DNA, 201 bp, synthetic construct
  misc_feature 1..201: note = Description of Artificial Sequence: Synthetic polynucleotide
  source 1..201: mol_type = other DNA
ttaggattttgtagattyggtygyggtygggtygagtgtttttygtyggggttttaygtttayggtttaygtttgtaatattagggttgtayggygggttygtagttgggtttgygtttgggattyggggttttttgygtttttygtgtygtattttttgttttaattttaagyggaygggttttggggttttatyggtta

SEQ ID NO: 3678 - DNA, 467 bp, synthetic construct
  misc_feature 1..467: note = Description of Artificial Sequence: Synthetic polynucleotide
  source 1..467: mol_type = other DNA
tygtttttttttaygttttttttttygttttttttygygtttagtttygttttttttattttgtaaaataaagtyggggaaaatgtttgttygtgtagttyggagygygtagttygtttttgaataagaagtgagtataatggygtgtttgtaaaaaaaagttttaagttygttttttttaaaaaatattttgaatgttgtatgttttatgttttttagygtttygygggagagattyggttatagagtaggaggtgagatttttttttyggtatttttatttttttggtygtaygtttttttgttttagttttttttgggaggattgtaaatgtttttttttagtaagyggtygttttttattttygtttygygtttaaagtgttgggttataatttggatttggaggtaaatttttgttagattttttttaygtygttttttttttttttttygtyggtgttygg

SEQ ID NO: 3679 - DNA, 201 bp, synthetic construct
  misc_feature 1..201: note = Description of Artificial Sequence: Synthetic polynucleotide
  source 1..201: mol_type = other DNA
ttygaggggtttatagtttggtattaatttgtaggtgttygttgttgatttggtttttttttygatttgyggayggttttttttagygattttygatataygtttttttgttttygtyggagggtygggtttggggtygtyggagtttgygggaatttagygtttattygttgattttygagtygtttygttagttgtgyg

SEQ ID NO: 3680 - DNA, 232 bp, synthetic construct
  misc_feature 1..232: note = Description of Artificial Sequence: Synthetic polynucleotide
  source 1..232: mol_type = other DNA
ttggggtgtttttaggaagtgaaggaaaaggttttygaygatattgttattggaaaagtgttggttayggttttygttttattttttttatttaygggttyggagtttttaggagtagttagatygattatygtttttgtagttttatttgttttyggagagatatttataagttagtttayggagagtttggattygttygttttagtatttaygtttttttygygttygg

SEQ ID NO: 3681 - DNA, 222 bp, synthetic construct
  misc_feature 1..222: note = Description of Artificial Sequence: Synthetic polynucleotide
  source 1..222: mol_type = other DNA
ggttagggatagtaaaggagataygggtgggtgagaygtyggattttaygagggtttgttgtttttttggygygggygtggaggtattggttagagggtaygtttattagttygagattttygggatgaggttattttttgagtttatatttggatatttattttttygaatgyggtgattttatttatattatagyggttattagygggtttgagatygtg

SEQ ID NO: 3682 - DNA, 239 bp, synthetic construct
  misc_feature 1..239: note = Description of Artificial Sequence: Synthetic polynucleotide
  source 1..239: mol_type = other DNA
ggtttttaggyggagygygggygygaggtgygggtttyggggyggagygtaygttygggaggygggaagtgggtagtagygttttygtttggtttttgtgygtttygattygaygttttttygttygattaggtgtttygagagygtatagttgggagggttttttyggtygyggygagatttaygtttgyggtgtgttagggyggyggygayggtgaygggygtggggygyggygttg

SEQ ID NO: 3683 - DNA, 209 bp, synthetic construct
  misc_feature 1..209: note = Description of Artificial Sequence: Synthetic polynucleotide
  source 1..209: mol_type = other DNA
ygtttygggggtttttgtattttagtyggggaatgttgttattttgaggggggttgtttggttgyggggygtyggggttgggggtattgtttttttaggaygyggtttygtagtgtagagygtygtygtttgygtggggggatttggtagttttaggggttgttttgagttttttggygagtaggagtgagttgttgyggygagtgagt

SEQ ID NO: 3684 - DNA, 380 bp, synthetic construct
  misc_feature 1..380: note = Description of Artificial Sequence: Synthetic polynucleotide
  source 1..380: mol_type = other DNA
gaggtygggtttyggygattttygagggaggttygggaattattttygatttaggygttagattyggagtygtayggggtttttagtttagtttygygagyggttgttgatygtttttttygygttygttagggtttttgtttygygttagttatygygygttttttttttgtttatgtygtagttttygtggtttttgttttggattygggatgttaggttgagataygttttgtaaatttttggtagaaatgggygtaagggggtggatttygttttygtttttygggtttttttttttttttygtttatatgtttttttattattttttttttttttttttattgtattttgatgaaatggttttgtttgtttaaat

SEQ ID NO: 3685 - DNA, 394 bp, synthetic construct
  misc_feature 1..394: note = Description of Artificial Sequence: Synthetic polynucleotide
  source 1..394: mol_type = other DNA
ygggtyggtagggattaagagtttgaaagggaatttgttttttttttttygtagttyggttattaaggtaagaaattgtaggtagagaagttttygaattygatttaggaygtyggygtttgttaggattttttygtttgtttttygygtttygygygygtttatgttattattayggggagggtgtatgyggtaggtgtttggtygaggttttygggagygagtygtttttaygtgttttagtttgtttttttttygaagttagaygttggygttgtagttttgttgtttgaygttgttgtagaagttygygtttattygggttaggtttggggagggttttttggggyggtttttgagttttatttgttygaagtttttatggggggaggtc

SEQ ID NO: 3686 - DNA, 201 bp, synthetic construct
  misc_feature 1..201: note = Description of Artificial Sequence: Synthetic polynucleotide
  source 1..201: mol_type = other DNA
tttygttygggttttttaaatatgtygtagygtggttgtttattgttttttttgggtaagaggaggttttagatatttttaygggatttgaattttygagygttttgtayggagtagttatttygttagtattttaaagtgaagttgtttataayggataagttyggagattttatgagaggtyggggtggagaagtyggg

SEQ ID NO: 3687 - DNA, 557 bp, synthetic construct
  misc_feature 1..557: note = Description of Artificial Sequence: Synthetic polynucleotide
  source 1..557: mol_type = other DNA
gtygttatygtttagtttygttgtttaggtgggaggggttatttgtygyggggtttttaagttagtgtygtttgttttyggtttttatttattgatagtayggygttygagtgattttgtttagtttygttttgygtttttgtaaattaygttgttgygttaattataaatttggttaatatgtttttgtaattttattatttaaaaaygtttttaggtatttggtygttgttagattaggttygygggttyggaggaggtttttttatttgttttygttagtttyggggatygtgygyggttttygtgtggttttygtttaygaggtttttygggtaggaatygtygygygatttttgtttagyggtygygttttggttaygggygatttttgtygggaattttgttttyggttaagttgygttttygtatttyggtggtttttattygagttygygtttgttggttttttttttggtttttttgtttgatttygattttgttttygaattttatttttagatttttttygttttggaaygtygatttttttttyg

SEQ ID NO: 3688 - DNA, 212 bp, synthetic construct
  misc_feature 1..212: note = Description of Artificial Sequence: Synthetic polynucleotide
  source 1..212: mol_type = other DNA
agttgggtttttttttattttaaaatttttatttttagtttttaaaagttattttagttygttatattgaaattggtayggtttttaaagatttttttttygtagttgtggygtttttaagaaaataygagtayggattaggttttggatgagtgttyggttatygagaattagttattttttattttttaggattttttagttttttttag

SEQ ID NO: 3689 - DNA, 201 bp, synthetic construct
  misc_feature 1..201: note = Description of Artificial Sequence: Synthetic polynucleotide
  source 1..201: mol_type = other DNA
tttttaatggtttagtygatygtgtgtataaatttgygttttattygtyggggatygttgggagyggagataaatttaatttttagggtaattttggtttygttygttttattttattttgtgtttaaatagagttttttttgaagttgygaatatttttaggttttttgggtagggttggaggggtygaggagagttatt

SEQ ID NO: 3690 - DNA, 201 bp, synthetic construct
  misc_feature 1..201: note = Description of Artificial Sequence: Synthetic polynucleotide
  source 1..201: mol_type = other DNA
ttttggataataatgygygttttygtttttttagaaagttagggaygtttttagtygtygttagagttggttyggttttttagttttttttygtggtattygtaggygagataaagttygttttyggtgaggttgygygygtttaaagygtgygggatgtttagtayggaggtttttaagygggggatttttggttttttt

SEQ ID NO: 3691 - DNA, 294 bp, synthetic construct
  misc_feature 1..294: note = Description of Artificial Sequence: Synthetic polynucleotide
  source 1..294: mol_type = other DNA
ggtagatgaygattygtygagttygtygtttgttttttyggaggygttyggagttgttgygggtttyggtygtygttgttattgttgttgtygtygtygtygtgyggggttatttgaaggttggggygyggaagtttaatttygtgttgattgggttttaagttttttgygttttygtttygtttygagtgttygygaatttttyggaygtttaygtagattatttagttatattataattttgtttgyggagagaggagaggagaaaaaggggtygttttaaaaatttttaaa

SEQ ID NO: 3692 - DNA, 244 bp, synthetic construct
  misc_feature 1..244: note = Description of Artificial Sequence: Synthetic polynucleotide
  source 1..244: mol_type = other DNA
tagttttgagtyggttgtyggttaggtgttgggtatattygygtygtygtygtygttygtttttggtygygttagtygtagggttttyggygttygggggyggtagtaggttggagygtatygtgygygttttgttttttyggygttttygtygtttyggaggttygggtttttyggttttygtyggttttygttttatggtygygtgtygtygygttyggttttttygtygtttaygttygtt

SEQ ID NO: 3693 - DNA, 303 bp, synthetic construct
  misc_feature 1..303: note = Description of Artificial Sequence: Synthetic polynucleotide
  source 1..303: mol_type = other DNA
ggtttggggttatgggaataggattaaggttttttgagygtygggtttggtttttgtggtttygtaaattttttagtttgtgtgttayggygaygygtagyggttgagtyggagtttaygyggygygygtttttygygaggaatttttyggtttgtaggttgtttgttattttygtttttygaygygtttttttttggttygygttttyggagttttttttttttttggygaggatttttttyggygttygyggtttygattttygtygygttgygttygttttttyggtttyggttgtttyg

SEQ ID NO: 3694 - DNA, 286 bp, synthetic construct
  misc_feature 1..286: note = Description of Artificial Sequence: Synthetic polynucleotide
  source 1..286: mol_type = other DNA
aatagattttygagttgaaaaaataaaaataaattggggagttagagtttttgaaagtttyggtaggaaatttaatgggttttttgtttttttaaattttygttttygttttygttgatattttgtaaagtygyggyggtagyggyggggattaygttgyggtgtattatttttygttattttttygygttgggttggggtygagggggtttygtagagtyggtaatygaatyggttttggtttgttttttttattttttagttattattagaattagttttygyg

SEQ ID NO: 3695 - DNA, 261 bp, synthetic construct
  misc_feature 1..261: note = Description of Artificial Sequence: Synthetic polynucleotide
  source 1..261: mol_type = other DNA
tggttgtggaattagatttgttttgaatttagtggagygtatygttggggttyggaagttatygttygygggtatygggttggygttgttygagtggaatygatagtttgygagtttyggttgtaagtggtttttttttttygyggttgttgtttagtgtygggtgagggttgygagtgtggtaagttgtaaagagagttttagaggttygaagagygttgygtttttattygygttygttttttttttttttyggttttt

SEQ ID NO: 3696 - DNA, 201 bp, synthetic construct
  misc_feature 1..201: note = Description of Artificial Sequence: Synthetic polynucleotide
  source 1..201: mol_type = other DNA
gaaygygtagagagttttttggagtgttttgattttgttttygagagggtttttaattttygtatttttttagtggttgttttggtaggtgygygttttgyggggagttgygtttygggggttatygtygagygggagttgttttttggaattttgtttatygygaattgggtgtttattttttatttttgttttttagtg

SEQ ID NO: 3697 - DNA, 201 bp, synthetic construct
  misc_feature 1..201: note = Description of Artificial Sequence: Synthetic polynucleotide
  source 1..201: mol_type = other DNA
tygygttttagtatygagtgttttaagttttgygygtagygtygggtttggaaggyggygaatggttgtttagtygtygtttttattagtgatattyggtygttagttttygtttaggatgtgtatatttgttggtagtattggttygggtggtagttatygggttatttattttataggtataatygtatttaatttaat

SEQ ID NO: 3698 - DNA, 201 bp, synthetic construct
  misc_feature 1..201: note = Description of Artificial Sequence: Synthetic polynucleotide
  source 1..201: mol_type = other DNA
gygtttygggaagtgtatggttttaaggtttaaggygttaggatttaggtttttagagtttttaattagtgttattttttttygtagygygggtgttagtygygagttygtagtttttygatattygtttttttttggggttttyggggatttttttagaggttgtaaaggtgttagaagtttaaggtaggaggtagtttg

SEQ ID NO: 3699 - DNA, 201 bp, synthetic construct
  misc_feature 1..201: note = Description of Artificial Sequence: Synthetic polynucleotide
  source 1..201: mol_type = other DNA
tyggygtygtygttgtygttygggtttygygattygggtygggttgtgggygygyggtaggygggttgyggyggyggygggayggggyggtygygggttgygtggggtttgtgygygygtgtgygygggygtyggttgtgygygtygygggyggatagggttyggtyggyggyggtaaagttgggattygygggtygggyg

SEQ ID NO: 3700 - DNA, 201 bp, synthetic construct
  misc_feature 1..201: note = Description of Artificial Sequence: Synthetic polynucleotide
  source 1..201: mol_type = other DNA
tgtttyggttgatttygttttgtagttagtttgaggttaggyggtygttttttgtaggttataaattttyggygtaaaagtagggttttgaaygygatatygtattagagygtttagttaagygagttgtttttatttttattgtgtygggyggygtaaattgygggygtaggtagaggagtygyggttttgygtygggyg

SEQ ID NO: 3701 - DNA, 201 bp, synthetic construct
  misc_feature 1..201: note = Description of Artificial Sequence: Synthetic polynucleotide
  source 1..201: mol_type = other DNA
ttgyggaggggtyggtgggttagagttaggttaggtagttgttgagtttttttttttttttttggygggagtgtgtgtgtaaggggttagggggyggagtyggagaaagggttgggggtgttygtgtttagygttttttyggaygyggttttataatttagttgygagaatagatggaygtagyggyggtttatttygggg

SEQ ID NO: 3702 - DNA, 201 bp, synthetic construct
  misc_feature 1..201: note = Description of Artificial Sequence: Synthetic polynucleotide
  source 1..201: mol_type = other DNA
ygyggtttttygtgggttggtygggttaatgagygygyggttgtaggggyggygggyggggagggggygtygagttttgyggatggaggygygggtagygyggygygtttatttygygygggygttgttggyggggggyggygtagttattggattyggatyggggtygygattyggggtggygggtggygtgggyggygt

SEQ ID NO: 3703 - DNA, 201 bp, synthetic construct
  misc_feature 1..201: note = Description of Artificial Sequence: Synthetic polynucleotide
  source 1..201: mol_type = other DNA
ttygtygatttttagaggtatyggttgygttttttggtggtttggaayggygyggagggtaagtttgttgtgatttgttaygatygtatygygtagtagtygtagyggygygagggggttyggttggggttggagtataagttygaggtygtygtgttttygtttagttgggtyggtyggttttyggtygyggggtttygc

SEQ ID NO: 3704 - DNA, 344 bp, synthetic construct
  misc_feature 1..344: note = Description of Artificial Sequence: Synthetic polynucleotide
  source 1..344: mol_type = other DNA
gtyggttagagggtttaygtaagtttygaaattyggggggaygttttttttatttttatttttgygttygttyggggttgggygygtyggggygtaygtaygtyggtttgttggygatttggygtatttgttygygygttttggttttagttgtygtaggttttttttgtatttatttttagtttttaaagttagtgtagttagtatygtttatttggagttttaatttttttttgygattttygtatatttattgtattttatttattattttygggtygygtaggttygggtttgygaagataygyggtttattttyggttatttygtttatttggttaaag

SEQ ID NO: 3705 - DNA, 201 bp, synthetic construct
  misc_feature 1..201: note = Description of Artificial Sequence: Synthetic polynucleotide
  source 1..201: mol_type = other DNA
attttttttygyggygttttttygygtagtttttagattgtttagtyggtgttygygggygttygttttttgygagttttaggttygygygagttgtttgygggaggggtyggggatayggatagaygttgttttattagggattyggaggatttggtgggtaagagtatgatttagygattttygtttygggtaagygtt

SEQ ID NO: 3706 - DNA, 218 bp, synthetic construct
  misc_feature 1..218: note = Description of Artificial Sequence: Synthetic polynucleotide
  source 1..218: mol_type = other DNA
attatttttttttttgtttaaaggattttttttttttttttgattttaygaatttatttttttaataggtttttaaagtatgggyggatgtgttttttttygtttatygttaggagtygagtttyggtaggtgagyggtgtaaaataygtatttagttgtttttagtttttttygttttygttgagttggttgtttttatttygtattayggtattyg

SEQ ID NO: 3707 - DNA, 234 bp, synthetic construct
  misc_feature 1..234: note = Description of Artificial Sequence: Synthetic polynucleotide
  source 1..234: mol_type = other DNA
gygygtttygtgygttttygtttttygygygttttyggtttattttygtttttggagagttgtygtttgygttygggygygyggttggttgttttttyggyggyggyggyggyggttttattagyggagttttygtttatgattggtttygttygggaagttggagaygggygatgaataattgatgtgtgyggtgyggtagtyggayggyggyggyggtggygggtagtagyg

SEQ ID NO: 3708 - DNA, 201 bp, synthetic construct
  misc_feature 1..201: note = Description of Artificial Sequence: Synthetic polynucleotide
  source 1..201: mol_type = other DNA
ygggggtattygggtaggggtgttagatatagtattgtatttggtaatttttyggggygtttagtgtggtttttttattygggagtttggaagggtttttygtagttygtaggagaygtagygtttttygtttagggggagtaggaggatagttggtygttttygggagttttaggygygaagyggttttttttygtttta

SEQ ID NO: 3709 - DNA, 201 bp, synthetic construct
  misc_feature 1..201: note = Description of Artificial Sequence: Synthetic polynucleotide
  source 1..201: mol_type = other DNA
agttatagtagtygtatttttygtagygygtyggygtttagtgtagygtttttagtagtagygttagygyggtygttygtaygttttttttygtygtygtygttygtatggttgygttttttttaggtgygygtygygtagtttttygaygttyggtgttyggyggtttaggtgtttyggygtgygttttyggttttgatt

SEQ ID NO: 3710 - DNA, 235 bp, synthetic construct
  misc_feature 1..235: note = Description of Artificial Sequence: Synthetic polynucleotide
  source 1..235: mol_type = other DNA
tttygyggtttgggggaygggagaatggggggtttayggtygttttgggtttttatygygtatygygttygtagyggagtttyggagttatggttttgagygagttggygttggttygttggttgtaggagagtygtygttygyggaagtttattttgtttatygtgtttttggygttgttgttggataatatgttgtttattgtygtgggtaygtgyggatagggtatttttgt

SEQ ID NO: 3711 - DNA, 201 bp, synthetic construct
  misc_feature 1..201: note = Description of Artificial Sequence: Synthetic polynucleotide
  source 1..201: mol_type = other DNA
attygtttattttttatttttggtttatttatygttatygatatttgggttatygtttttaaggtaygtgttaygtygyggaattgtagygygtygttttygtygtattttttattgttttyggtttgtttygggtgggygtttggtaaggtttgggyggaggttttttyggttygygggttagygygttttgttgggaaa

SEQ ID NO: 3712 - DNA, 241 bp, synthetic construct
  misc_feature 1..241: note = Description of Artificial Sequence: Synthetic polynucleotide
  source 1..241: mol_type = other DNA
gttaataaygggygggtttttatagttygaagttaaagygttaaaattygagggaaggygaggagggggyggtggyggaggyggttgyggggtyggggttyggttgagttttygtttgtttaattttatttgttattgtaygygtttaatygtygtatatttttygtatttaatttggatgatattttgattttattattagtattyggygtyggattgaygtagtttygagtyggggatt

SEQ ID NO: 3713 - DNA, 201 bp, synthetic construct
  misc_feature 1..201: note = Description of Artificial Sequence: Synthetic polynucleotide
  source 1..201: mol_type = other DNA
ggggtatttgtatyggggttgggygggygtatttagagttaggygggtaggaatttttgygtagttattyggtgtttgtatgtttttggygyggaagggaygttttattagtttyggygttttttttttttagatttttttttygtttttttttattgtttgtttgttgtattattttttatttagattatttagatygtt

SEQ ID NO: 3714 - DNA, 201 bp, synthetic construct
  misc_feature 1..201: note = Description of Artificial Sequence: Synthetic polynucleotide
  source 1..201: mol_type = other DNA
ggtyggygygygtgggtttyggygaggyggygttgtaggagttttgygggtagttggagygttatttgggygyggyggtttayggttgtggyggygttatygtgygygaygtttttttygyggttaagggtygygyggtygattgygagagttygygygagtttygggagygggttttgygygtttgatgggtygaggygg

SEQ ID NO: 3715 - DNA, 217 bp, synthetic construct
  misc_feature 1..217: note = Description of Artificial Sequence: Synthetic polynucleotide
  source 1..217: mol_type = other DNA
tyggyggygagygttgtattattttaygygggygtygagtyggggtygggygtygygatyggagggattttttgtttyggygagttagtttyggagttttygygtagygttygygtygtygttgagtttttttagttttttatttttaaaaaagttttttttygtgtgtgtgygtgygtgygygygygygygtygttttggtataagttagttttga

SEQ ID NO: 3716 - DNA, 201 bp, synthetic construct
  misc_feature 1..201: note = Description of Artificial Sequence: Synthetic polynucleotide
  source 1..201: mol_type = other DNA
tagggtttygatttttygtggggtaygygygatttyggygtagatgttagttygttgtttttygggttgagggagygaggattttagaygattttagggtygttgtttaggtttagtttygygttttttatttygttatttygttttgyggttttagtttggagatttayggattttattgygattttttgygtagtgtag

SEQ ID NO: 3717 - DNA, 201 bp, synthetic construct
  misc_feature 1..201: note = Description of Artificial Sequence: Synthetic polynucleotide
  source 1..201: mol_type = other DNA
taaatgggttaaataggttygtaaggttttygygggttttttggttyggaagttgagtygygggtgtttggtttgaagtttygygttttatagtggttygygggtttyggyggtttttgttttaygttttttaaggtattaggtaggtggttttagggtttttgtttaygatattttttgggtggggtaggattatttttt

SEQ ID NO: 3718 - DNA, 201 bp, synthetic construct
  misc_feature 1..201: note = Description of Artificial Sequence: Synthetic polynucleotide
  source 1..201: mol_type = other DNA
tgtagttygttyggyggygttttygggygagggtttggtgttggggagygagygyggagygaggtgtttttttaaataygttttgtagtgtgayggyggtygttyggttggaagagttatttttattttgyggtaggagttygttygtygttatygttygtttyggtttttatggttaygygtttgttttyggtttygggt

SEQ ID NO: 3719 - DNA, 317 bp, synthetic construct
  misc_feature 1..317: note = Description of Artificial Sequence: Synthetic polynucleotide
  source 1..317: mol_type = other DNA
ygygttttgttattaggygttgtagttgttggtygagttttgtgttygtggggttttggagtaygatagttgttaggattttatttattatttgygggatygtgttagatttyggtttygygatttaggtgagtgtygttatygtygtttggagggatttaagggttttgggttgggatttggggtygtatyggggtttgaggtagaatagygaygyggattgggagagggyggggggyggttatygagttaggagagtgattaagaattagygtattgtggtttgatgttgtaattaggyggggattygggyggtg

SEQ ID NO: 3720 - DNA, 221 bp, synthetic construct
  misc_feature 1..221: note = Description of Artificial Sequence: Synthetic polynucleotide
  source 1..221: mol_type = other DNA
tttgtattgtggagtaygttatgattgtttayggtggtygtaggtgtagaygttagtyggaatyggaatyggaatyggagtaygggttgtygttttygatygaatygygggyggygyggayggygtygygygagggataaggtgygygaggygtaygtatttttatttttattgtygggagttgatttgtttttttygygtggttattygtygttgtaaat

SEQ ID NO: 3721 - DNA, 201 bp, synthetic construct
  misc_feature 1..201: note = Description of Artificial Sequence: Synthetic polynucleotide
  source 1..201: mol_type = other DNA
tygagagttttgyggygttygtttttttgttggyggaygtgttttttgagtygttttygygtaggtaagaggttgtygtttttagygagggagagagtagyggygattttatttagttatyggaygtygtttygtagtgttttgygggtgygaattttaattygatatattaggtgttttgaggggatggtggtygtttat

SEQ ID NO: 3722 - DNA, 201 bp, synthetic construct
  misc_feature 1..201: note = Description of Artificial Sequence: Synthetic polynucleotide
  source 1..201: mol_type = other DNA
gtaggggagagygagtatgtttttgtttygggygtygtgyggtygtagtagtagygyggttttttttagtgygagtygtgtttggaatgtttygggtaagygaagggttagtaagygaggygaaayggatattataaagtagagagtggtgtgagttttttygttttttgaaaagatggtaagttttygtttygggaaggt

SEQ ID NO: 3723 - DNA, 201 bp, synthetic construct
  misc_feature 1..201: note = Description of Artificial Sequence: Synthetic polynucleotide
  source 1..201: mol_type = other DNA
gagttttaygtygtygtygtygygttagyggtggggggygggttgggggyggggyggtyggggttgttttttygggygtatatgygagygtagtattyggygttgtygagttatttttttygtygttygttagtaagtttggyggttttaagttaggygygttttaggatttaggtttatttgtttttatttagtttyggt

SEQ ID NO: 3724 - DNA, 201 bp, synthetic construct
  misc_feature 1..201: note = Description of Artificial Sequence: Synthetic polynucleotide
  source 1..201: mol_type = other DNA
gggtatagttayggtaatttttagtttgttaatgttaaggygggygygtaaggtygtttaaatttagatttttttttttatttattttaaaaaataataaygtgttagttattttygtagatatygtyggttggtgtttgtttaggagaygttagggttagagygttatttttagtatygaaatggtagagagaaagygta

SEQ ID NO: 3725 - DNA, 230 bp, synthetic construct
  misc_feature 1..230: note = Description of Artificial Sequence: Synthetic polynucleotide
  source 1..230: mol_type = other DNA
tyggtgttttttttyggtygttttatttagtaatttttygtgttttgtttttygattggaaatgttttayggaagygttttggatagggttttygttaggygataagagttyggtgttgagatgtgttaygtttttatttttttattaattatggatggaaataaataaggaagagttaattttgttgagtttttttttyggtaaygagaggygttttgtagtygggagg

SEQ ID NO: 3726 - DNA, 201 bp, synthetic construct
  misc_feature 1..201: note = Description of Artificial Sequence: Synthetic polynucleotide
  source 1..201: mol_type = other DNA
gttttttygagttggtygtttttgtagatttttaygtttagttgttatagygtygtttygattttttygttaagtatattttgtattgtaaggttaagtayggtygtyggtttgggatttagtgttatygggaggaaaagagagagatttggggttggggtatggatgatggggggaagggyggtygtttttgttattgtt

SEQ ID NO: 3727 - DNA, 201 bp, synthetic construct
  misc_feature 1..201: note = Description of Artificial Sequence: Synthetic polynucleotide
  source 1..201: mol_type = other DNA
tygtagaygtyggaggygttatggtygttaagttyggygagttgatgggtatttgttttagttattaggyggtgatgtygtatttygtgtgtttggtygaygagttttygtagttygtgyggttygttaagttgtttaagggtyggggtyggttgyggyggtygygttagtttygttttaagaygtagtyggtgattttyg

SEQ ID NO: 3728 - DNA, 201 bp, synthetic construct
  misc_feature 1..201: note = Description of Artificial Sequence: Synthetic polynucleotide
  source 1..201: mol_type = other DNA
gtagttttaggaagtygtagtygtygtygtygtttaggtagagtagtagygygygygtggygttggtgygtaggttgaagttgagttygtygttgttygtygygttygtttagygygygtagygagtttattgttyggggtygtygtygaattttaggtygttygygygygtygttagygttagtagtagtagtaatagta

SEQ ID NO: 3729 - DNA, 201 bp, synthetic construct
  misc_feature 1..201: note = Description of Artificial Sequence: Synthetic polynucleotide
  source 1..201: mol_type = other DNA
aagtttttattttttggattygggtttggygttttygttttyggygygtttttattyggyggaygyggtygygtataaggtttagtayggttygygttttygtagttyggtygyggttgaatatttttagygygaagygggtgggygttagtagtttyggggayggyggtttttaggtttgaaagttggyggttyggggtt

SEQ ID NO: 3730 - DNA, 201 bp, synthetic construct
  misc_feature 1..201: note = Description of Artificial Sequence: Synthetic polynucleotide
  source 1..201: mol_type = other DNA
ggttttttagtttgggttaggtyggggygygtgtttygggttttttgtggttgtatygygygttttgtgtttaygggygaaggygttggaattyggygttyggagttygagtttttgaaggygggaggyggygttygattttaggggttgygttgggttgtyggagttaagagtgtttgygtttttagtttygygttagaa

SEQ ID NO: 3731 - DNA, 201 bp, synthetic construct
  misc_feature 1..201: note = Description of Artificial Sequence: Synthetic polynucleotide
  source 1..201: mol_type = other DNA
ttagagtgtgattgagygggttggttyggyggtygttgtttttygttttygttttttygygtttggtygygttatttattgtygygggtgttygygtgygygtygtygatgyggtygtyggggagygtttggaggtggaagtygatgtttaygttgtagtagagtygtygtagtygtttgatgtttagtaggtagtygtyg

SEQ ID NO: 3732 - DNA, 201 bp, synthetic construct
  misc_feature 1..201: note = Description of Artificial Sequence: Synthetic polynucleotide
  source 1..201: mol_type = other DNA
tatttagaaaatggaaagttgagtggtygatgaatyggaattgggagtagttttttatgaattagagaaaatgtaagttaaaaggagatattattttttaygtattagattggtaaatattaggaaatattaagttttgttgaggaggaggggtttagggagtttttatattatgtgggtgggattgtaatttggtataat

SEQ ID NO: 3733 - DNA, 201 bp, synthetic construct
  misc_feature 1..201: note = Description of Artificial Sequence: Synthetic polynucleotide
  source 1..201: mol_type = other DNA
ttttygggayggaygttttaggygyggygtygagtggaggygagggggttgyggagggggaaggggttaygygggttayggggtttaatttttgatttttygygaygttaagaatgtaggagggtagagttgagggagattttaggtggaatttttaggtggggaaggttgagttgtyggggttgygggtatygggaaggt

SEQ ID NO: 3734 - DNA, 201 bp, synthetic construct
  misc_feature 1..201: note = Description of Artificial Sequence: Synthetic polynucleotide
  source 1..201: mol_type = other DNA
tygtygtygtttgttygggayggtttygtgaagaaggayggaggtagattgygtgttygtagygggatttttttggtttttgggatygtygtggttttygyggggtttgttaygttttttttygygtttttagtgttygtattttttagttyggtygtyggygtagttattttatttttygtyggttyggtattttygggg

SEQ ID NO: 3735 - DNA, 268 bp, synthetic construct
  misc_feature 1..268: note = Description of Artificial Sequence: Synthetic polynucleotide
  source 1..268: mol_type = other DNA
gyggttagatttyggttttgtaagttggyggtygyggyggtttgygaygtttttygtyggggggtagttttgtygtgggtyggggtygygattgtyggggygttaggggyggttagyggtygtttggttggygtgtyggyggygttyggggagggygggtyggggggygyggygtttatgaggtygttgtagygtttgatttgtttttgtaggtatttgyggtggtttatttttygtttygatttgttyggtttgtttagygttagtt

SEQ ID NO: 3736 - DNA, 614 bp, synthetic construct
  misc_feature 1..614: note = Description of Artificial Sequence: Synthetic polynucleotide
  source 1..614: mol_type = other DNA
agagttattttgttygttgttttggattttgaaatttgggagatttatattaaaggagggaatyggtttttttattttttaagygygtygtgttttttatygtttttttttttggttygattggttttggttttttttaygtttttagtttttaaattggygttygttttatggttygtgtaggaygttaaaagtayggtaaattttagggygatttttagtagaygttttygaygtatgatgtygagtygttatyggttttygtygttttttgtygygttyggggttyggtttgyggtygtygttgygttttgaagygtatygygtygtyggggtttygttatttygtygttygtttttygggtygggtttttttygttttttttaggygttgtttttattttaggyggtttttgttagttgtaatatagagataaattttygaggyggggagatttttagggtatygggatgttgaagtttygyggtttttatttttaagtttaattygtgygtygtttgygygtggygtagttaatttgggtaagggaagatygtttggtttatagttggttggaaagtttaggttttyggyggtagtagtttyggtygat

SEQ ID NO: 3737 - DNA, 201 bp, synthetic construct
  misc_feature 1..201: note = Description of Artificial Sequence: Synthetic polynucleotide
  source 1..201: mol_type = other DNA
gggtattagtttygagtttaggttttattttygggyggttygggaygaattttttttataggttagtgtgtgtgtagggtaagtgtagggggttgaggggygttggyggggaggtagtagaggtggtttggattattttggygyggygygyggtgagygygaggatttygttagtgggagtygttgagttaaagtgtattt

SEQ ID NO: 3738 - DNA, 201 bp, synthetic construct
  misc_feature 1..201: note = Description of Artificial Sequence: Synthetic polynucleotide
  source 1..201: mol_type = other DNA
ttygyggygayggtgaygygttttggttttgataagtttggttttttttattttatygggtggygtygttgttgattttaygtttagtygtttttattttygtttgaaattttttygatagggtttygtttygggggtttagtttttagygygtatatattygygtggtgtyggtttagttttttgtaaaggaagtagggt

SEQ ID NO: 3739 - DNA, 201 bp, synthetic construct
  misc_feature 1..201: note = Description of Artificial Sequence: Synthetic polynucleotide
  source 1..201: mol_type = other DNA
ttgtagttagtyggyggtttaggtaagagataaggtgtgagtaaaggtttttgatggtygggtggtttgayggttaggtgygagtggggaggatagtttaygyggtttgagtagttatttttggttatagttttagttttygtttttgttttyggtttttgttttggtttgtttgygygttatttygttatttygtagtgt

SEQ ID NO: 3740 - DNA, 201 bp, synthetic construct
  misc_feature 1..201: note = Description of Artificial Sequence: Synthetic polynucleotide
  source 1..201: mol_type = other DNA
ygttyggtygtygtttttagttaattygggttttttttayggygattaattagtgygaagttggttgggygggaagtygygagaggtttttattgyggygygggtggyggttaggagttgttaggatagtttttyggtgttttagtttaayggtttygtttatttatygttaagagaaatttygttttgyggtyggttttt

SEQ ID NO: 3741 - DNA, 201 bp, synthetic construct
  misc_feature 1..201: note = Description of Artificial Sequence: Synthetic polynucleotide
  source 1..201: mol_type = other DNA
ygggtattgygaattgtygggygatgttgtygttgtygtygtgatayggagagtaatagttttttagtaatattttttttygatataggtatatatttttygataggtaygtatatttattttatagtgttyggttyggttgyggtgagtgaggggtygggaagaggygtatygtttagygagygtygygygtyggggttt

SEQ ID NO: 3742 - DNA, 261 bp, synthetic construct
  misc_feature 1..261: note = Description of Artificial Sequence: Synthetic polynucleotide
  source 1..261: mol_type = other DNA
ggatyggyggtgatatyggagttygtygtgygttttyggtygttttyggtgggtgtyggtttttgtatttgatgygttygggatgttttttttattttggygygttygtygttagttygtatagygtttygtatattttygtaygygtttgaaatgygtayggtttygtyggttygyggaattattyggaygtayggagygtttygtatygattygttygtygttttttygagaygttygtatygtgtttgggtygggygc

SEQ ID NO: 3743 - DNA, 201 bp, synthetic construct
  misc_feature 1..201: note = Description of Artificial Sequence: Synthetic polynucleotide
  source 1..201: mol_type = other DNA
yggttagggtaatagttagggtaaagggagagagaagtygtttyggggygagaaggagaaaagttagagggttgaataggtgaygttgagtttgttggagygtgtgtgttttattaygtaagggygyggagttyggtygttttatttttygttatttgygygttygggggtaygttttttgygatagtttggaatttagat

SEQ ID NO: 3744 - DNA, 201 bp, synthetic construct
  misc_feature 1..201: note = Description of Artificial Sequence: Synthetic polynucleotide
  source 1..201: mol_type = other DNA
gggtatyggtgtygaygtygygagggtagygttygyggygggaatattaatgtattttaaagggtayggtygtygtygtagtaggtaattagttggatygyggyggagygygyggaggtggttgttggttgtaaggattgygtttagttttygtttygtttttygaggttttygygtgggtyggygggtagtgygtgggtt

SEQ ID NO: 3745 - DNA, 201 bp, synthetic construct
  misc_feature 1..201: note = Description of Artificial Sequence: Synthetic polynucleotide
  source 1..201: mol_type = other DNA
ttttttgtttyggtttygtgttttygttggggattgtttgyggtgagtttgtygtaygtaygttagggtygaggtagtgatgyggggtagygtgggaggaygggttgyggagttygygttattttgtttgtggggagygttgtgtttgtttttttgttagygygtttagttgtttyggtygtygttaygygggattgtttg

SEQ ID NO: 3746 - DNA, 201 bp, synthetic construct
  misc_feature 1..201: note = Description of Artificial Sequence: Synthetic polynucleotide
  source 1..201: mol_type = other DNA
ggaaaatagggtattyggagtgtaggagattttttagggtygttttttttttygggggtgttttgaggaatygyggyggggattygtygttggtagtttgygggttttggtgttagygygtatgggygggttgtgyggaygtggttggttttttaaaggttttagatttygttygggtygtttagttttttaaagttgtgt

SEQ ID NO: 3747 - DNA, 219 bp, synthetic construct
  misc_feature 1..219: note = Description of Artificial Sequence: Synthetic polynucleotide
  source 1..219: mol_type = other DNA
tttygggttaggaagttgttaggtaggggagggttagygttagttgtggaygtttygggatagttttttattttagtttttgtttttgttttyggygyggygtaaaygtaaaagttttygtggtygtagttttagtttyggtggtygttygattttygtygggatttyggttgtatttattggagaagyggyggtttygattttygaggaggyggyggc

SEQ ID NO: 3748 - DNA, 268 bp, synthetic construct
  misc_feature 1..268: note = Description of Artificial Sequence: Synthetic polynucleotide
  source 1..268: mol_type = other DNA
tttattattgtttttttttttygttttttatttttttgtagygttaagtyggttttttaatttggtttgttgaaygtaaatygttgagagtttgttgtatygttttttggggtttttggttgtygagtttygttaaggtaaagaygttagtaagygaggaagygtagyggaagaaaaataagygggygygygaggggagttttaggagggttgtygagtggttggtaggyggttttygtttttttygggtggtttygtyggyggttga

SEQ ID NO: 3749 - DNA, 201 bp, synthetic construct
  misc_feature 1..201: note = Description of Artificial Sequence: Synthetic polynucleotide
  source 1..201: mol_type = other DNA
tttttyggttttaggattggggagtgtgtygyggggtygagggtggggaatagttagagggagaygygaattaggtygttggyggagggtttagggggagygtagaggygayggtttttatgtyggyggttaatatgatggagaatyggtygttgttygttttgtaggtgttygagtygtagggtgygttygagggtagtt

SEQ ID NO: 3750 - DNA, 517 bp, synthetic construct
  misc_feature 1..517: note = Description of Artificial Sequence: Synthetic polynucleotide
  source 1..517: mol_type = other DNA
tagagygygggttttygggttttatttygggaaaagtttgggtttgttttgygttgttgygtgttgygtttttgggatttgttgattgttttagagggaaygtttygyggtagtgttagttttttggggattaggaagggygatttttgtttgggagttagtgtttgggtygtygggttygggtaagygttgggggtttggttygagaagatgyggataggtggtttagggygtygyggattttygttttttgygggtatygggagtttagggtygaggygygtygtttygaggggtttttttttttaataatgygttyggaatggagttygygttttgatagygygggttagttygaaatygtttagaattygtttygatgagtgggtgagtygttttgggagtttgtygygtttyggtagyggagggtttgagtggaaaaatttttattggatgtattttttaatggttggtttgtttyggttttygttygagtttttttyggtagtaggygttg

SEQ ID NO: 3751 - DNA, 226 bp, synthetic construct
  misc_feature 1..226: note = Description of Artificial Sequence: Synthetic polynucleotide
  source 1..226: mol_type = other DNA
ygygtttttttagtygyggttttttttttygtygtttttttttgtttttttagtttttttttttaygtgtggatgaygttaaaatttygygaaaaagtygygtggtggtttttygagyggaggygygatttygtygtttagyggttttttttygggggygtttggagggggagaagggyggaggyggtyggtttttttttttttygggaggtaggatttttygayg

SEQ ID NO: 3752 - DNA, 201 bp, synthetic construct
  misc_feature 1..201: note = Description of Artificial Sequence: Synthetic polynucleotide
  source 1..201: mol_type = other DNA
ttttygggaggygagtygygggttgttgggygyggaggttggagtygygagaggttyggttgttgaagyggttattgttttttagagttaggtttygygtygygygttttygtygtygtyggtattgtgtatttatttatttttyggagattggggtaggggaaaaaagttttgaggygtttttatttttgttttyggggt

SEQ ID NO: 3753 - DNA, 212 bp, synthetic construct
  misc_feature 1..212: note = Description of Artificial Sequence: Synthetic polynucleotide
  source 1..212: mol_type = other DNA
tttygggygtttggtatttttttttatyggggtttyggyggygygyggygtttgttyggaggggggttygggtatggtgttgyggtagttggattygtygygagtttttygygtttygtygtygtttgygtygyggagttggtttagttgtaaataaatagtagttttttygtttttttyggttatygttatttttttygttttattgygta

SEQ ID NO: 3754 - DNA, 388 bp, synthetic construct
  misc_feature 1..388: note = Description of Artificial Sequence: Synthetic polynucleotide
  source 1..388: mol_type = other DNA
ttttttyggttatttgtgttgttttygttttggttgtttttgtttygagggaagatgttygagtattttttttattttatttggtyggygaagtatagttyggtgaygatgtgtagagttttttggtatagattgtttatttygttttttttgtggaaatttatygtttggtttttttttygtttttttttttttttttagttagtygttttttttttttttygtatttttaatttttttggygttttaagttatagttygttygyggtgattttggttggagattgygtygttgagagtyggtaatttttaggagttttaygttggttttatggygggagyggagggygtaggggaaggagaggygygygaggaggttgyggttgtc

SEQ ID NO: 3755 - DNA, 201 bp, synthetic construct
  misc_feature 1..201: note = Description of Artificial Sequence: Synthetic polynucleotide
  source 1..201: mol_type = other DNA
tttttggatgttaaattyggtttagggagtttaggagtygttgtagttttagtttttttttttttttttttygatgattygggtaatgttaattttttttygggattgaaagttttaaatttaaggtgttaagttgatgggyggtttttgtttttatttttygatttygggygygtgttttgaaagataggagagaaaaaa

SEQ ID NO: 3756 - DNA, 201 bp, synthetic construct
  misc_feature 1..201: note = Description of Artificial Sequence: Synthetic polynucleotide
  source 1..201: mol_type = other DNA
tygtggtattttygttagagtttaagtagttttttaggygtggggtttggtggaygttggtttggagygttyggagggyggggtgggggtgggggggaygygttgtygtttggggtgttttygygtatttttgttgggygaattttggtttttyggtgttggttgttatttgagtaattgatgggtttttaggggaagtaa

SEQ ID NO: 3757 - DNA, 212 bp, synthetic construct
  misc_feature 1..212: note = Description of Artificial Sequence: Synthetic polynucleotide
  source 1..212: mol_type = other DNA
ttygtygttttttttttatttygttttttatygtygtttttagttttttttygggatgagagagagtygygttgyggagtaattttagtggatgggttygygggggttgagygggyggaggaygygggaatttygtgatatygattagttgaygttgttygygtgaaattagagtygggtattagggttttatttttattgtttttgtattt

SEQ ID NO: 3758 - DNA, 250 bp, synthetic construct
  misc_feature 1..250: note = Description of Artificial Sequence: Synthetic polynucleotide
  source 1..250: mol_type = other DNA
taggagggtgggtgttagtttttttttttatttttygagtttttttttyggygtttaygtgggyggagtagygygagggtgtgygtggtaggggtygyggyggygtgtgtygtgygtggggtggggtgygggttgggyggtttygttttygggtttygygtygtyggggygyggtttttagttttattttttttgttatttgggyggagatttgggggattgtgatttattttgyggaagatayggaggg

SEQ ID NO: 3759 - DNA, 488 bp, synthetic construct
  misc_feature 1..488: note = Description of Artificial Sequence: Synthetic polynucleotide
  source 1..488: mol_type = other DNA
ataygtttttygttagtttgggygtygggtttygaattttyggtttgtaaatttgygtattttttttygtygygttygttagataatttggygaatagttygttygttygtatttygtttttttyggttttttttttaaattttaaaygtatygtygtgttttaaagaaggtgtttaygtygtttttagatttyggagygttttttttttattttygggattttttaggtygtttatttttttygtttttygtttagatttgagagggatygaaaatatattttygattygggtagttagggtygaaattgttaagaggagaaaaggtaaagyggaaggagggtggttataaatagatttttttgtttttttttaaaaggatattgtygttttaaaagtttttttttygggtttttatttttygtattttygtattttgggggagygtatttaattgaggtaaygtagtttttttttagtgtttgtag

SEQ ID NO: 3760 - DNA, 201 bp, synthetic construct
  misc_feature 1..201: note = Description of Artificial Sequence: Synthetic polynucleotide
  source 1..201: mol_type = other DNA
ggttgaggagaagggagggagagtagagggaggggggaattyggtygggggaggaggagagaggygaggaggyggttttggtagygygyggyggyggyggyggtagyggtagtagtagyggyggtgyggagagtttggattgggagtttaaagttyggttgggtagygggagaggaggagtygtaggagttgtagttttgt

SEQ ID NO: 3761 - DNA, 364 bp, synthetic construct
  misc_feature 1..364: note = Description of Artificial Sequence: Synthetic polynucleotide
  source 1..364: mol_type = other DNA
ttttataattaaggagtatggtggagttgggttaattttaggtatagtttagtygagttaggygaggtttagagagatttgattygtttggtagttttaayggatttgttttygtagtygttgyggatttttyggtygttatggygattgtgaaatgtggggtggggygtatgygttggaagttattygygygggtagtttttgagtgtttttttaygtgttttttagygygagtagtattttygtttttgygttttttagagygtgtagttttyggtgagggtagttttaygtatagttttttatattttttttagygtttgtagttttyggtgygygtaggttttaagtttatatgygtagt

SEQ ID NO: 3762 - DNA, 220 bp, synthetic construct
  misc_feature 1..220: note = Description of Artificial Sequence: Synthetic polynucleotide
  source 1..220: mol_type = other DNA
gtttttatttygagygygtagttttaygtagtttttttatattttttttagygtttgtagtatttttagtgygtatagttttgttagtygttttttygggygtygtttttgtattatttyggtttataattttgyggygattgtttgaagaatttttygtggttttattttttttttygggtttagttttagttgtgatattttaattaaaagattatac

SEQ ID NO: 3763 - DNA, 201 bp, synthetic construct
  misc_feature 1..201: note = Description of Artificial Sequence: Synthetic polynucleotide
  source 1..201: mol_type = other DNA
tygtttttttygtttygagygattttttgttttagttttgtaggtttygtattgtagatgtttgttggtttttttgygttyggyggttttygyggtgtttygtaagttttygtgattttttagtattagtyggttgtgygttttttgtttttaygggtyggttagtygtagatatttatttagtttygygagtttagtygt

SEQ ID NO: 3764 - DNA, 201 bp, synthetic construct
  misc_feature 1..201: note = Description of Artificial Sequence: Synthetic polynucleotide
  source 1..201: mol_type = other DNA
ggggtatygygttggtatttgtagggagygattggtttggaagggtagagggtagaygggggtttgggtggggtagyggttattttaggygyggagaattygttgtttttatttttttttygyggatttttattttgyggtttgtgtgttyggtttttttygygtggyggggaagtgygggtggttgttygggtttttaga

SEQ ID NO: 3765 - DNA, 201 bp, synthetic construct
  misc_feature 1..201: note = Description of Artificial Sequence: Synthetic polynucleotide
  source 1..201: mol_type = other DNA
gtgtyggttttygaaygtatttygaggyggggtgagggttggtagtygtttttgtattygtygttgygagtygygttttttaaatttaggtatgggatttyggaaaatygattygttgttttgagtgtttattaygtgaggaattggagtggtygagttygttaaggygtyggggatatttgagtagatgagaattggagt

SEQ ID NO: 3766 - DNA, 358 bp, synthetic construct
  misc_feature 1..358: note = Description of Artificial Sequence: Synthetic polynucleotide
  source 1..358: mol_type = other DNA
gygtagygtttgagtttgygtttygttaagtgtattaagtaygagatttagagygttatggagatygtgttgttttggggtttggtygygtattgtayggyggttgygttggtygtattgtttttttataatatgagtagygtyggyggygatygtttgggtygyggtaagtyggttygttgyggttttatttttttygtgggtygygtgtatygttggatggtggatagtygygtggygttgygtatttaygagtaygtygttatttatttgatagtttgtatggagagtttttttygggatatttattygygggtygtggttttyggggtgtttyggagttgtagtggttttgggt

SEQ ID NO: 3767 - DNA, 201 bp, synthetic construct
  misc_feature 1..201: note = Description of Artificial Sequence: Synthetic polynucleotide
  source 1..201: mol_type = other DNA
ggagttttygggygygttttgggygtattggggaggttttygggygggtaggyggaygttttggggyggygggyggyggttgtyggggttygtyggggttyggtygttygttgtttatygataggtattaggaattgatttygtygttgttttttgttyggtttagttatygattagttgtygygattatggagaagygtt

SEQ ID NO: 3768 - DNA, 328 bp, synthetic construct
  misc_feature 1..328: note = Description of Artificial Sequence: Synthetic polynucleotide
  source 1..328: mol_type = other DNA
ygtagggagggagggggtatygtttgtttttttgttygaaaggtggaggtaaagagggatttyggattttagagaggtttataattttttataagtaaggyggggggyggaatttagagaggtaaagtgattygtttttaaatygtaatattaggaggatagtagggttagatggaatttttyggtttatagttttygatttygggtaagtgttttattygggygtayggtttgtttttagattagaattaggygygttygtagttaaggaagtttggygggagattttttygaggttttyggtttttaggttagyggggttaaggag

SEQ ID NO: 3769 - DNA, 201 bp, synthetic construct
  misc_feature 1..201: note = Description of Artificial Sequence: Synthetic polynucleotide
  source 1..201: mol_type = other DNA
ygttyggtgaagtyggtgtatttattatattttttgttgtttttagtagggaagtyggyggtgaggygggggagtaggtatggtggtttyggggtttatgyggggtttattgtttatttagaatagyggttattgttgtttattagggygtatttatygttggagttttygyggygattgtttatttttaatatatatttt

SEQ ID NO: 3770 - DNA, 319 bp, synthetic construct
  misc_feature 1..319: note = Description of Artificial Sequence: Synthetic polynucleotide
  source 1..319: mol_type = other DNA
tggagtyggyggtygygttygygtygttgttgtttggttygttggyggyggggtygggggttgtyggagttgattttatgtttttttttaatgtagagatygttggagatggygagtttygagattttttttattttttgtttttagagtaattttatggtattaaaaaaaaaaaaaaaaaaaaaaaaaaaaaaaaaaaaaaaaaaagaaggagaaggygatyggygaaagtaggagggaaaaagtaggyggyggygggygggtaagtaaaagygygagggagygygyggagtgtttgggtggaygtgtgtgtgygttc

SEQ ID NO: 3771 - DNA, 201 bp, synthetic construct
  misc_feature 1..201: note = Description of Artificial Sequence: Synthetic polynucleotide
  source 1..201: mol_type = other DNA
atygygggaggagagygtaaggaggtttttygtaaagttggaggttaggtyggagygatgtttygggagyggagtttttttagtttygggtttttagtygyggatagttggtagtgttaaagatttygttattatttgyggttygtagttgygattyggtygtagagtygggtatygaggaaggygtaaagttgagtttgg

SEQ ID NO: 3772 - DNA, 370 bp, synthetic construct
  misc_feature 1..370: note = Description of Artificial Sequence: Synthetic polynucleotide
  source 1..370: mol_type = other DNA
agggyggttyggggtgggggygttttatttttgttttttatggygtgtaygaagtttttttggtatagttggttgygaagttttttttttaggttgaagtygyggaygttgaygattttttttaygttygataagttttygttttygtygtatygttggyggttaatygggygttgygaggatttaaattagagagttygggatattattgtgggggttggaggtygttttttaatttgggtttagtattaataggtgtagtagtygagygttttttgtattttattattgtaatttaagtaattttgygtaattgttaaagatgttgaaaagtaggataaggagaggggttygtatttygagggtttag

SEQ ID NO: 3773 - DNA, 201 bp, synthetic construct
  misc_feature 1..201: note = Description of Artificial Sequence: Synthetic polynucleotide
  source 1..201: mol_type = other DNA
gttatgttggaatttggaggggaggggggatgttggagaggtatayggtgatggatatggaaggattygggaggtgtggagtggtgggttyggttygtygygggaaggatatagagggatataggttgttttggagaggygttttyggatatttggaggggygtatagtgttgggatttggyggygtttggggyggagggg

SEQ ID NO: 3774 - DNA, 201 bp, synthetic construct
  misc_feature 1..201: note = Description of Artificial Sequence: Synthetic polynucleotide
  source 1..201: mol_type = other DNA
gtttttygtttttaygtygtagttygggttagyggggttygtygyggtggygttygyggatgttgtygtattggtygttgyggtayggayggygtagtttygggygyggttyggtataggygtyggyggttttygttagttagtagttyggygaggygttggtttatttatggttttygggyggyggtttttgygtttagt

SEQ ID NO: 3775 - DNA, 201 bp, synthetic construct
  misc_feature 1..201: note = Description of Artificial Sequence: Synthetic polynucleotide
  source 1..201: mol_type = other DNA
attygttygttygtgggtgagttgggaggggygyggygagggagggtgggttyggggygggggyggygyggggygygtttgyggttatgygatattgtttygttygygtttygtttttttttttgggttttttgggttttttgggttgtaggattygtygaygyggygygttggtygtaygggggttgggygtygttgtat

SEQ ID NO: 3776 - DNA, 263 bp, synthetic construct
  misc_feature 1..263: note = Description of Artificial Sequence: Synthetic polynucleotide
  source 1..263: mol_type = other DNA
tgggttattygtgtygtatgtyggygtagttgttygttgtggtaaggggggggyggtygggtttyggagygggtygggagggygyggggygygtatttygyggtaggtgagyggygyggttgtaggtgagtagtagtttyggttygygygtttagtttttttygtygygttygttyggtttataygtttttygygygygygtygttttygtttygygygygttyggtygttygttygttygtgggattttygygaggtygygc

SEQ ID NO: 3777 - DNA, 201 bp, synthetic construct
  misc_feature 1..201: note = Description of Artificial Sequence: Synthetic polynucleotide
  source 1..201: mol_type = other DNA
gttttgttttttttgtttttaaygaattggtaagtaaaatattagttgtttattttgaaatttgttttaattattttygtattttttgaagttygttgggygygttttgggttgtttttttttgagtagtygggtttagagttaaggygygatgattgtygygtaagttagggtttaygyggtyggggtttttttttygtt

SEQ ID NO: 3778 - DNA, 201 bp, synthetic construct
  misc_feature 1..201: note = Description of Artificial Sequence: Synthetic polynucleotide
  source 1..201: mol_type = other DNA
ttttttatttyggtatttttttttggtgaygttaaggggttttttattttttattygtttttttatttattttttttttttttttaggttygtttttttgyggttayggagaggggygggggtygaygagggygggtggttyggggtygagygygygtggggaggtgttggygaygygggttygggagygyggtttyggta

SEQ ID NO: 3779 - DNA, 201 bp, synthetic construct
  misc_feature 1..201: note = Description of Artificial Sequence: Synthetic polynucleotide
  source 1..201: mol_type = other DNA
ttatttagttttgggggtygttygaaattggggaagggataaggttgaagtttygtygtttggttttaggggyggaaagttygatttaagggaagttggtygygttttygygayggtgtttttggtayggaggattgaggygtagttyggttgtttttttttgtttgtttttttygygttgtttygtygtttttgattttt

SEQ ID NO: 3780 - DNA, 201 bp, synthetic construct
  misc_feature 1..201: note = Description of Artificial Sequence: Synthetic polynucleotide
  source 1..201: mol_type = other DNA
ygyggggtygggyggggatyggtygggggygtygygygttyggtygggttgattgtygggggygattttygyggggtaaggygggggygygggagtagygygtagttgyggggttattttatttgagygttttgaggttagggtyggggtttgaggatayggygttgggtttygggggaygygggtttaygtyggygttyg

SEQ ID NO: 3781 - DNA, 215 bp, synthetic construct
  misc_feature 1..215: note = Description of Artificial Sequence: Synthetic polynucleotide
  source 1..215: mol_type = other DNA
ttatatttatygtttygggygygtygttygygygyggtttygtttygggtyggtatttttyggttyggttgttttyggttttygtttyggtttyggttttygtttygtagggttyggtttygygatggtggtygyggyggygagygyggtagggagggygtgtgtatgygygtgagagygygtagygtgtgtatgtgygtgtgygygggagggtt

SEQ ID NO: 3782 - DNA, 201 bp, synthetic construct
  misc_feature 1..201: note = Description of Artificial Sequence: Synthetic polynucleotide
  source 1..201: mol_type = other DNA
ygygagtgttttttaatggtagygygggygtttttaatygygaggggttgygttattatyggygtttgttggagyggttgygggagttgggygtgtagttygtggttattttgtattattgggatttgttttagygtttgtaggaygtttayggyggttgggttaatygygttttggtygattattttagggattaygygg

SEQ ID NO: 3783 - DNA, 201 bp, synthetic construct
  misc_feature 1..201: note = Description of Artificial Sequence: Synthetic polynucleotide
  source 1..201: mol_type = other DNA
gtgttagtagtttyggggtygttygtaygtaaygttttygggtygggttaggttggttagggtagggyggtygtttttygaggaattgygggyggggyggyggggttaagttgagygttygttttgttttyggygtttygyggttgygggyggagygggttttgyggagtttttyggtygtttttttygtagttttygttt

SEQ ID NO: 3784 - DNA, 201 bp, synthetic construct
  misc_feature 1..201: note = Description of Artificial Sequence: Synthetic polynucleotide
  source 1..201: mol_type = other DNA
ttaggttgtttgtagygtygttttgtttttttattttagagygtaggtgagtggttatttttttaggggatygyggttgagagygtttatttttttttttygtatttggaaattgagtttggyggtagggttgggttatttagagtttgtatatttyggaagggaaagtgattttagaagggagagaggaagtgttgagtt

SEQ ID NO: 3785 - DNA, 217 bp, synthetic construct
  misc_feature 1..217: note = Description of Artificial Sequence: Synthetic polynucleotide
  source 1..217: mol_type = other DNA
tgtagttggtgttgtttttgggaygatgtagaygttttatatttaggygygggtgttaggtygtygggtattagtttatttttagggtttgtgagttgygygtattttttyggtygygtattttttgggaggttgtagttagagygtttttgaagggagggyggtagaagatattttttttyggtttatgtaaatygttgggggaattttagttaat

SEQ ID NO: 3786 - DNA, 317 bp, synthetic construct
  misc_feature 1..317: note = Description of Artificial Sequence: Synthetic polynucleotide
  source 1..317: mol_type = other DNA
aagygagygattttttgagttygggtggttyggygggtaagggyggygygggagattygtagggygygggygyggattyggggaattagggttatygttgygggyggatgggggttatygaggyggttygtttttaggygtatatttygtatatttttttgttaagtgaaggggttaaaatgtatagatgggggagtttatttaggaatagaggygygagaygtatagttatttttgggttgggagtaygagttagtagattttyggagygygttaaayggataatatgttyggtgttgtaaatagaggtttttgtt

SEQ ID NO: 3787 - DNA, 201 bp, synthetic construct
  misc_feature 1..201: note = Description of Artificial Sequence: Synthetic polynucleotide
  source 1..201: mol_type = other DNA
tatttttgtgggggggagggtgtagygaaggttgttagggatttygygatygygttttaataygtattggagygagtgtgygagtgattatgagtgtgagygggtgygagygttyggyggggttgatygttaygttggyggggtyggyggggttaggtagtttttttygygttttttttttttygtttygtgttttttttt

SEQ ID NO: 3788 - DNA, 201 bp, synthetic construct
  misc_feature 1..201: note = Description of Artificial Sequence: Synthetic polynucleotide
  source 1..201: mol_type = other DNA
ayggtgttaagggatttagtttggyggatattttttattaggagatygtaggtaagygygggygygttgtaggggtaggttgtagttttyggttgtygtaygttttattggtygttyggygtttttttttttttttttgttgttgagttggtgtttattttttgttatygttatgggatttygygttttygtgttgggygg

SEQ ID NO: 3789 - DNA, 201 bp, synthetic construct
  misc_feature 1..201: note = Description of Artificial Sequence: Synthetic polynucleotide
  source 1..201: mol_type = other DNA
gygtygtagtttttygggtatyggyggyggtgattaatttgtaattttagygtttagagttgttatggtgttygygggyggyggyggyggygatagtgggygatyggtaggattagtgttaggygyggygtttagggygggyggggaygygggttttttatttayggyggtttagtttaggtagygygttyggttyggttg

SEQ ID NO: 3790 - DNA, 201 bp, synthetic construct
  misc_feature 1..201: note = Description of Artificial Sequence: Synthetic polynucleotide
  source 1..201: mol_type = other DNA
gyggtgtgtaygggagttygtygggtataygyggggtatatttaagtgtattgttaggaggtygggagtttagygtgygagygtgaggttagattgtgtayggtatygaggattagttttatttttgagtatgaaagggtgaaatygtttattttaagttttatttyggagttattaaataatgaatgtattagttatatt

SEQ ID NO: 3791 - DNA, 201 bp, synthetic construct
  misc_feature 1..201: note = Description of Artificial Sequence: Synthetic polynucleotide
  source 1..201: mol_type = other DNA
gggttggtygyggattyggayggtygggagygggygyggyggtygtagagayggttttttttygygyggttttagygtagattttagatttggagtygtgygggyggagaygygyggggttttttttygtttygtygtygttgggtttttagygttttyggattygygggaggataggaattattyggagtgaagttgygt

SEQ ID NO: 3792 - DNA, 221 bp, synthetic construct
  misc_feature 1..221: note = Description of Artificial Sequence: Synthetic polynucleotide
  source 1..221: mol_type = other DNA
tygagatataaagatygaggttgagatygttaggggttgagggtgaggtygygtttyggggtygttggagygygggygttatgygagattgtttyggttgygygtygttttagaggagttygagygttttttttagtygyggygygttggttttggtygggattgtagttaggtgggygtygygygtgtgagygtygygygtgtgagygtagatttggatt

SEQ ID NO: 3793 - DNA, 311 bp, synthetic construct
  misc_feature 1..311: note = Description of Artificial Sequence: Synthetic polynucleotide
  source 1..311: mol_type = other DNA
gattattgtygaatagtygttggagattygtagagaagggygggttttgygttyggggygtttyggaggtaagttyggagagttygggtygggyggagggygggagygtaygagtgtgtgtgtgtgtgtgtgtgttygyggtgtgttygyggttyggtgtataygygygygggttgtaaagttaggagttgygggagygtttttttgtttyggtttggtttyggagtattgygggtygyggaggtgtgggggtttttgtygttgygtttagggtagyggyggaaaaggtgtgtgyggatgyggggyggggt

SEQ ID NO: 3794 - DNA, 308 bp, synthetic construct
  misc_feature 1..308: note = Description of Artificial Sequence: Synthetic polynucleotide
  source 1..308: mol_type = other DNA
ttgagtygtagaaggtttttttygygtttttttttagtagggatttttggayggggagatygaygggtttgtgggygttttttygggatatatttyggttygttttgtttgggttgggtttatttaygttttgggtggggtttaggaattgygtgygggygtagygggtgagtatgttgatgatgattatttggttttatttttttaygtygattagtaggttatagagttttyggtagtttttgtgaattaggtygatgygtttygggtagatttttttaaaggttattattatattgttygttatt

SEQ ID NO: 3795 - DNA, 201 bp, synthetic construct
  misc_feature 1..201: note = Description of Artificial Sequence: Synthetic polynucleotide
  source 1..201: mol_type = other DNA
aatgtgatatagatattagtttttygtgtttttggtttttagggttttttttatygygttttagtatttgtagtttttttatttttatagygttygtygtygttaaggtaatagagggatgttyggtgatagattyggygtyggttttyggygtygtaagagaagygttygygygggygttttggattygtagagttttyg

SEQ ID NO: 3796 - DNA, 201 bp, synthetic construct
  misc_feature 1..201: note = Description of Artificial Sequence: Synthetic polynucleotide
  source 1..201: mol_type = other DNA
ttattttatttgagygtggttaaattgttgttatttagtggggagtaaaaaaaaataatttgtattatygaaaygagttagtaattggttgggaggygggyggtagttgggtttygygtgttttyggyggtyggggtttttttyggggagaggtatatataygtatagtyggatygygtttygttagggtyggagttattt

SEQ ID NO: 3797 - DNA, 201 bp, synthetic construct
  misc_feature 1..201: note = Description of Artificial Sequence: Synthetic polynucleotide
  source 1..201: mol_type = other DNA
ggtgggagtygygaggagygtttagtggygyggtttgtygggtatggtggtyggttyggygatygttgattygtygggttygggggttttggaagygaggygygtttttygatttygagattttgtagggttgtaatagayggtggggaggtaaaaaaaaaaaaggaaaaggaaaaaatggtgttaaagttattaagtttt

SEQ ID NO: 3798 - DNA, 630 bp, synthetic construct
  misc_feature 1..630: note = Description of Artificial Sequence: Synthetic polynucleotide
  source 1..630: mol_type = other DNA
tyggttagtttattttygygtttygtaaatttttttaatygggtaataaagtgagtagyggtggtygtygygatttttttaatttygtatttyggaggttygagggggttttgggatygagyggtttygtagyggygatagaaatatatattttaygaaaaagaaaaaaaaaaaaaygagtygygygaattygttaagttagatgtgygyggtttgaagyggaggaggttttgaygttagttttatttygygtagttyggtttggtygtagattygtyggttattygtyggyggtttaggtygggaggggttaggatagtttyggtygygyggtggayggaggggttattttttygggygttagtaaataaattttattygagttaatatygtttagygaayggtgtttttttttagttattygagaaygagaggtatttttaattagaaattaattaatgagtagttgttttttttygttttattgtaattattygttttaattataaatgagatttatgaaaggataygttgaagatgtaattaatagttaaaattagttyggygttgygtaggyggtyggttyggtttygygttggygygttttgtttygagtggtaggaaggggtt

SEQ ID NO: 3799 - DNA, 201 bp, synthetic construct
  misc_feature 1..201: note = Description of Artificial Sequence: Synthetic polynucleotide
  source 1..201: mol_type = other DNA
aaatgggattagagygyggagggagtttggttaggaggttttttaggatttagtygygaygttgaaaagtatgaagggtyggaattaggtatttatttagygagygttattaattygaagttatagygttaattttttgattyggtygtttttataygtagygtygggattagaggygyggtygtygttygtttygttttt

SEQ ID NO: 3800 - DNA, 239 bp, synthetic construct
  misc_feature 1..239: note = Description of Artificial Sequence: Synthetic polynucleotide
  source 1..239: mol_type = other DNA
gaagaaatygggtaaatagttgtttttaggttygtgttaygagttttggygggatttttttttttttttgtattttttatttttygattttttttgtgtgygtygygtttygttgtagtttygttggagagatggggayggtttggtagaaggtggyggygataggggttygggayggtttggggagaggagggtgggggygyggttgttgtggggtgttttygggyggggtttayggg

SEQ ID NO: 3801 - DNA, 201 bp, synthetic construct
  misc_feature 1..201: note = Description of Artificial Sequence: Synthetic polynucleotide
  source 1..201: mol_type = other DNA
tgtttagtttttyggaggagtattatgttttgatattttygttttatygttttaaagttggtttggggtttygtagggagtggtttgtatggggagggttygygtgttgtgtttttgggaggggtaagagagtgggggygtagggggygggttaggtttttgggygyggygygggttygggggattygygyggttgaygtt

SEQ ID NO: 3802 - DNA, 221 bp, synthetic construct
  misc_feature 1..221: note = Description of Artificial Sequence: Synthetic polynucleotide
  source 1..221: mol_type = other DNA
ggtagttggygygttygttttggtygtagttyggtttggggattygttgygtgttttggtattagtgygtggtgaggaaagyggtggtggygaatagtagygttagtaggtttagggttayggttaggagygttyggtygyggyggttagtttttatgtygttygygtygtygggaygggattgtatygtyggggagtttygygygygaagttggtagttg

SEQ ID NO: 3803 - DNA, 201 bp, synthetic construct
  misc_feature 1..201: note = Description of Artificial Sequence: Synthetic polynucleotide
  source 1..201: mol_type = other DNA
tagttttaygtyggttygtttttygtttayggttyggtttttttttygtttggttyggygttttttygtttygagttttttattttttggatttygggttygygggggygyggagaagaggatttaggaaaggtttgggaatttgatgggtttgtggttggggggaggggtagttttttygttattttatttttttttygt

SEQ ID NO: 3804 - DNA, 246 bp, synthetic construct
  misc_feature 1..246: note = Description of Artificial Sequence: Synthetic polynucleotide
  source 1..246: mol_type = other DNA
tgggtttttttaggatttattttatgtagtttttatatggtttttagagttttgatttygtggttggagtgtttgtttttttttaagtattggtagtataygggtattttgtattgtaygtagtatatgttgtggttttttagttygtggtttgtgtaggtggagattttgygtgggtttagttttyggtttataygattttgggtygggggtattaggyggtgtttggttaggggttttyggggc

SEQ ID NO: 3805 - DNA, 223 bp, synthetic construct
  misc_feature 1..223: note = Description of Artificial Sequence: Synthetic polynucleotide
  source 1..223: mol_type = other DNA
tgatattgggggtaggtgatataggagttgyggggtatyggggttagggtyggtgataagtgggtggtyggtggyggtatagtygggggaaataygyggaygtygttgggggatttttggtayggggtagtgggggygttggygaatttttygtaggagttatagtygttgttygtttygttgtataggtttattttgtttaggtttagatagttatagtygg

SEQ ID NO: 3806 - DNA, 201 bp, synthetic construct
  misc_feature 1..201: note = Description of Artificial Sequence: Synthetic polynucleotide
  source 1..201: mol_type = other DNA
gggtttttygttagygtttgygtttggtttttagttttgagtttygygtttatttatygygggygagtgttgygtagtayggaggaygttttttttttttygttgttggtagttttygtaggygttttattygggtttaggtttttgtayggtagtggggttttttttttttttygtgaattygttgaygtygtgttttgg

SEQ ID NO: 3807 - DNA, 244 bp, synthetic construct
  misc_feature 1..244: note = Description of Artificial Sequence: Synthetic polynucleotide
  source 1..244: mol_type = other DNA
tgygtttattygttgtataaygygtttygtttyggtttttagtttatttttygygtygygttagtttygaatttggattttygygggygtttgggyggggygggattttaggtttatttagtaagttaattggttgaggttttyggttggggattaattatyggttttgagaaagttyggtagtggttattatatttggttttygttaatttttttaaggtagyggtygttggagtagyggggt

SEQ ID NO: 3808 - DNA, 201 bp, synthetic construct
  misc_feature 1..201: note = Description of Artificial Sequence: Synthetic polynucleotide
  source 1..201: mol_type = other DNA
tttttatttttggttgtttggyggggtttgaaagggtaggtggttttggyggygygtttygygagggatgtggtagaagggygtgygtttggygtygaggyggagggattttygatgtygtgtggtagyggggtttgttatygtagtttttygygggtattgtttttaggtttagagttagtttttagygagtygggtaaa

SEQ ID NO: 3809 - DNA, 457 bp, synthetic construct
  misc_feature 1..457: note = Description of Artificial Sequence: Synthetic polynucleotide
  source 1..457: mol_type = other DNA
tttttttaaatataygtttttttgttygyggttygttattttygttygggtttygggttgtgtagtttttttttaggtttgttygggtttatgtttttttygaagyggygggagtyggtgtagttttaatttttattgygtgttttaggtygttaattagttttgttygygtgtygttggttyggaggttgtygygttagtttttgygtgygtttgagygygttggagtatttgygaggttagggttgtygayggygagaggatattttgaggaatayggtgttttagtttygttttygtttttygttygagttggaggttggggygygttgagtygtagygtttggataagtgygygggtyggagtygtttaggtttgtattygggggttygyggtygaygtatgygtaygygyggtggygggtttgtaggttygaaggttyggttttttttttaa

SEQ ID NO: 3810 - DNA, 244 bp, synthetic construct
  misc_feature 1..244: note = Description of Artificial Sequence: Synthetic polynucleotide
  source 1..244: mol_type = other DNA
gagyggtgattggaatttaygttygggagaggttyggagtttyggtygygggyggygggggatttttgtaggaaggggtaggaaggtaagtagttyggygygttttggyggtttygagggatttgggttygggtttgyggtygygtygtttgggttttttttgggttgggagygygtygggttttygttttgtaygttgttatygygggagaygtttyggtttygtygygygtagaggggaygc

SEQ ID NO: 3811 - DNA, 206 bp, synthetic construct
  misc_feature 1..206: note = Description of Artificial Sequence: Synthetic polynucleotide
  source 1..206: mol_type = other DNA
gtttygaygttgygggygatagggtttggttttagtagtygtygtygtygtygtygtygttattyggaggatttagtaaaagtttggatttgggggagggygyggygttgagygggattattattagggttggaaggagatttygagaatttttgtaggtaaygygygtttttaattttttttttttatgtttygtygttgygttt

SEQ ID NO: 3812 - DNA, 203 bp, synthetic construct
  misc_feature 1..203: note = Description of Artificial Sequence: Synthetic polynucleotide
  source 1..203: mol_type = other DNA
ggaagtagtggggggygttygaagagtagggtagttayggttatygtggtygtyggatyggttatgtgttaaagtttttggggttyggygtttygttgggygygtagygyggggagtagaygygtygtgggtggggtagygyggtgttgttggygttyggttttygyggggtgtagttttgygygtttttatgttgttttttt

SEQ ID NO: 3813 - DNA, 266 bp, synthetic construct
  misc_feature 1..266: note = Description of Artificial Sequence: Synthetic polynucleotide
  source 1..266: mol_type = other DNA
ttaggttatttygattttggtttttaggttygggataaygtgttagttttaagagagygttgtttatagtttygggtgggttgggtttaattgtayggggyggggygttaatagtttaggatttgggttgtaggttggtttttgtattaattagyggggyggtttygggttttagtttttttatttygtttaygaagggaggygattgygagygtttggggtttttgayggatttygtttygggggtggggyggggagtggttayg

SEQ ID NO: 3814 - DNA, 242 bp, synthetic construct
  misc_feature 1..242: note = Description of Artificial Sequence: Synthetic polynucleotide
  source 1..242: mol_type = other DNA
gtttagtagagatttggagttagaagtttagagatagtygagtgygtygtgyggttttyggaygttygttgtttagttygattttygttaattgtgtaggyggttgattygtagyggtagyggtagtagygaggattygagygttggttgtagygatattatggattttttttttatggtygygtaggtaayggggygttttttttaygygtttygggtygttaagtttggggaggttyggg

SEQ ID NO: 3815 - DNA, 201 bp, synthetic construct
  misc_feature 1..201: note = Description of Artificial Sequence: Synthetic polynucleotide
  source 1..201: mol_type = other DNA
agtttagattygygygaaygtggatgggtatatagtttygtttttttttattttgttttttygaggygttagtaatttgttttttgtyggtgatttygggygttttttttgtygtygtttgaggaaggttttgagattygttttgtgatygtgattygttaagygtygaygygtygyggtygtttgttttgttttgttttg

SEQ ID NO: 3816 - DNA, 201 bp, synthetic construct
  misc_feature 1..201: note = Description of Artificial Sequence: Synthetic polynucleotide
  source 1..201: mol_type = other DNA
ttttgtttyggtttttgyggggatggatgttttaygtagtaagygagtaagygagttttggagatyggggttttgggtgtgyggtyggtttagtgttaygyggtgagataggtatggttattaatttaygttaaggyggttgtgtatttggtatagaaaatattgttgttgaatgttgtttttatagttattygttagygt

SEQ ID NO: 3817 - DNA, 312 bp, synthetic construct
  misc_feature 1..312: note = Description of Artificial Sequence: Synthetic polynucleotide
  source 1..312: mol_type = other DNA
ttttttaatattyggtttgtaygtttggygggggygtaatagtgttttayggttygggagttygtttttggtttttgagtaaggtattttttttatttgtygtgtgtttagttgaatttagtatatttttttygtatttttygtttttttttttttttttttgaatttgtttttttgttttgygggtttttaatttttttygaatttygggygttyggttyggtttaggygagygttygyggttggggaygygggtggggaygyggyggtttgggygttgtaggatgygtttggtygyggaggagaygatta

SEQ ID NO: 3818 - DNA, 203 bp, synthetic construct
  misc_feature 1..203: note = Description of Artificial Sequence: Synthetic polynucleotide
  source 1..203: mol_type = other DNA
ygttggttttggttgtttgtggggtttttttaggtttyggggggtttgyggyggtttgggaggtagattttygygggtaggtgtggtygtgtttygatygygygaggatygaagttggyggaagtttttgtgyggtgttttttagttyggaggaggttggtttgaagtttttaggygttgtygaagtttttttttgttagygt

SEQ ID NO: 3819 - DNA, 201 bp, synthetic construct
  misc_feature 1..201: note = Description of Artificial Sequence: Synthetic polynucleotide
  source 1..201: mol_type = other DNA
ygtatgygygygygtaattagattttygtygtygtttttagygttttttttyggggtagggatttatttaataggttggggtttttggagtgygyggggtygygtggggaagyggggattttattttttttaygygtygtttagtattgggtaagggyggggtattttttgggttttygtttttygtygttygtttyggga

SEQ ID NO: 3820 - DNA, 283 bp, synthetic construct
  misc_feature 1..283: note = Description of Artificial Sequence: Synthetic polynucleotide
  source 1..283: mol_type = other DNA
agyggyggyggygggttttaggagtygtagattttggttagtggtattgygggttattttgagttttygaggttttagggggatagygttygggygttttygttgygygtygttttygyggagtygagyggyggtggttgyggaagygattggggttgygyggatattagygttttagagttygygaggagtttggggttttygggttggagtaagagtygagtatyggygtagtttgygggattggtatttatygggttttttaatttttagattttgttat

SEQ ID NO: 3821 - DNA, 201 bp, synthetic construct
  misc_feature 1..201: note = Description of Artificial Sequence: Synthetic polynucleotide
  source 1..201: mol_type = other DNA
gttttyggggygttttgttttgygttatygygygttygttygttygttygtttaatttatttgttgaagattaggtagtttaggtggttgattttgtggtyggagyggtggyggttgtagtttttttataggtttttgaaggtygtgatggttaggatgaagagtatyggygttagtgttaggtygggttggaaggygttt

SEQ ID NO: 3822 - DNA, 247 bp, synthetic construct
  misc_feature 1..247: note = Description of Artificial Sequence: Synthetic polynucleotide
  source 1..247: mol_type = other DNA
ttgagygygtgatatggtttgtygtttttgattaagaygggtayggttattyggygyggygagggtaggggygttatttttatatttttttyggttygggygygttttattttgtagyggtggttttggaattagattttgatttgygtgggygtgaggyggatgaggttggttaggtgttygygttygggygtygataggtatygttgttgtygaaagygtygttttagttygtaggtttgygttt

SEQ ID NO: 3823 - DNA, 427 bp, synthetic construct
  misc_feature 1..427: note = Description of Artificial Sequence: Synthetic polynucleotide
  source 1..427: mol_type = other DNA
ggggygtttttttaggggattgggggtggggaggagggygtaygggtyggggagggggttatyggatttggatttygggatatttygggggtttggggggygggtygygygtttatttgygttttygtygtygaaggagtttatgtaygggaagtagatggygagygtttygaaggaggyggatagattgaggyggttttgygagygttttatgttygygtyggygtygggygtttyggtygyggyggyggyggyggyggygggyggtttgggtagtttggtygttttatttttgaygyggagtayggygygyggygtggtggyggyggttyggggtygggtygaggtttygttgyggggttggygggygyggyggggtyggygggygggttaggagttggyggygygyggagttygaggygygttg

SEQ ID NO: 3824 - DNA, 246 bp, synthetic construct
  misc_feature 1..246: note = Description of Artificial Sequence: Synthetic polynucleotide
  source 1..246: mol_type = other DNA
yggtttatagtygggatgygttttygtyggggttatygyggyggygaaygtttyggatttygtatttyggtgattttttgggatgaatygaagtyggattygtattttggtygtaataagygygttttaygtygttaygtattagyggtgattttygagttttttgtygttttggttttttygtaggygggtttygaggttttygtagggagtttagggttayggttaygtgtagtygttttygag

SEQ ID NO: 3825 - DNA, 384 bp, synthetic construct
  misc_feature 1..384: note = Description of Artificial Sequence: Synthetic polynucleotide
  source 1..384: mol_type = other DNA
tgygygtyggtttggtttgtttgygggttttagagtttyggygttygttgtttttttygtttttttttttttttttatttttttttttttttagtygygaygygtagggggygggttttatttttttttygttttygtttyggttttaagtygyggaggygttyggtgggatttygttgttgtttaattaggggggatygggtgagtttttttttttggagtygggttttattagygtygtaggtttataggtygggggtgggggttttggatygaggggyggygyggggyggygyggggyggygygygyggttttggagygttagtatttgtttttygatttttyggtygtygttttyggtygtttyggggatttygttatta

SEQ ID NO: 3826 - DNA, 415 bp, synthetic construct
  misc_feature 1..415: note = Description of Artificial Sequence: Synthetic polynucleotide
  source 1..415: mol_type = other DNA
tgggtagttttaggtygtygaattyggygtttagygggggtagttygyggaaggygygagtygagttagaygtygyggggaaaggttygggyggtggttgygggggygttaatttygggagtaggaggtygggttttagtygtygggttttgygygtttgttttttgyggygyggtyggtatttgtagttggggtggtygygtaagtgttgtaygygtagtygttyggttttttttaygaagggtygttttttygtygygtttagttttttttaygttttgtttgygggtygtgggygttagtgagtggaaygtygtygggygggtgggygtygagtttttygtgygttygggaygtttygygagggtttggygtagttttygtatttygyggttygggatttttgtttttttyg

SEQ ID NO: 3827 - DNA, 543 bp, synthetic construct
  misc_feature 1..543: note = Description of Artificial Sequence: Synthetic polynucleotide
  source 1..543: mol_type = other DNA
tgygttttaygttttggagygtgaagtygggygttaaaaagttgttgtygggtygtagttttagatttagttgttggttaaaggygtgtaggyggaggygygtggtttygtgtttyggggygygttttagtttyggtattattagtttttygtttttttyggaggggygttygagtgygttygatayggttagtagygtygyggygagtagtagtagygtgggtattggtttaaagtttygagatttyggagttygtttygygttttttatgtygttgtttagtttgygtttttygaatttttygggtatagttygttgtattggagttttaggagatatygttygtagtagygtayggagygagggatttttagttygggtygggagagtaaagtttygttggtttgttttggattgttaaaattaataatttttattattygttggaagggygygtagagtyggttatagtygaagttttyggagttattaaaaggaggygttgtagttttgtyggygygygggaagttttttttttagyg

SEQ ID NO: 3828 - DNA, 227 bp, synthetic construct
  misc_feature 1..227: note = Description of Artificial Sequence: Synthetic polynucleotide
  source 1..227: mol_type = other DNA
ttaggagygatggttgtaatgtttttttttttgttttgtttttyggtgtygggagttttgtttttygtygttatttttggttagttttgygtaagaaygtygttttgtttggtagttaggtygagaygtagtttgaatgtgagtaggaattyggagaagggaagggagagaattagaaagaaggttygggagggattygggaagtagtgggaggtttgygttttgga

SEQ ID NO: 3829 - DNA, 323 bp, synthetic construct
  misc_feature 1..323: note = Description of Artificial Sequence: Synthetic polynucleotide
  source 1..323: mol_type = other DNA
tygtyggaagagttttgtagagtgagtttttagggttatttygttgttttttttttygttttygtagtygttgtagttagygtgggagtygggtaggtygygtggggygttggatttatygagaggttagygtygtygtygggggagggygtgtttygtaygtgtgtgttygygygtgttygygttygygtgtgttagygygygtgttttggtygtgygygtygagtygggtygtattaattttttyggygtygaygggtttagtttatggtgtgggygtygggtttagggaggtttyggttttygttaatygyggagtaggg

SEQ ID NO: 3830 - DNA, 279 bp, synthetic construct
  misc_feature 1..279: note = Description of Artificial Sequence: Synthetic polynucleotide
  source 1..279: mol_type = other DNA
ggtaygagygttagtagttygtaaaataggtagagtaygtttttygtgagggttataygygttttggtygggttyggggttaygtaggtggtgtattgygygttygttagggttaygaagagygtaaygaaygttagtagtayggygtttayggtgagygttygygtygtttgtatttyggtgtttagagttagtatygagtygtatattttgtattgtatgtgttyggtgttttgtattaygtaygatatttatagttttttttaggtggtttgygtc

SEQ ID NO: 3831 - DNA, 261 bp, synthetic construct
  misc_feature 1..261: note = Description of Artificial Sequence: Synthetic polynucleotide
  source 1..261: mol_type = other DNA
ttyggygygygtttttyggygtataygttttttattttygygtygygygggtygyggatttgtaggttgygygttttttgyggagtttgtttyggttttayggataggtttygtagtgagtaggtaagggtygtttygtygyggttgtttttttaygtttyggtygttttttttttttttagaattttygtttagtygggatttyggatttttttttttggtttggyggttttygttagtygygatttttatygayggaga

SEQ ID NO: 3832 - DNA, 364 bp, synthetic construct
  misc_feature 1..364: note = Description of Artificial Sequence: Synthetic polynucleotide
  source 1..364: mol_type = other DNA
gttygggttttgggyggygagggygtagygagggttgtygttttttygggtagtttyggggggygyggygttgggtygygggttygggggttgtygtgttygatygtatgygtygatttgtygttgggygttygtttttttttgttggggttgggygyggtttyggagtttggyggyggtggtgagggygtayggttagttgtagyggygttgtgtttgtygtggatttaggatattttaggtttggtggyggggttaggtggyggyggttttttgygttygggygatggygatagygataggtttttaatttygtttygggttygggtyggtygggtttygygtygggttaygygygygtata

SEQ ID NO: 3833 - DNA, 242 bp, synthetic construct
  misc_feature 1..242: note = Description of Artificial Sequence: Synthetic polynucleotide
  source 1..242: mol_type = other DNA
ggygttttttgagtttagagaagtgggttaagataagggaagaaaattttttatagaagaggagattttygtttttagtgttggggattttyggtattygygtttttgtgtttttggtggtttyggygttttttyggagygygyggtatgtttgtttttataygtttagtatttttgtttttagagtaaatttattttttagggtataygtagaggggtagttaggtatygtttttattttg

SEQ ID NO: 3834 - DNA, 285 bp, synthetic construct
  misc_feature 1..285: note = Description of Artificial Sequence: Synthetic polynucleotide
  source 1..285: mol_type = other DNA
ayggtygttyggggtygtattttygttyggtggyggygttygaagaygttagtygygttaygtattgtttgygtttygygttttagtygtygygtattaaygtygtygttttygtygggagttaagttygtygggtyggttyggttttaggtgggtagttyggtttgtagttggttggaggtggyggtygttgtagttttggtagygggtatatttttaagtataygtatttaaygttttttttttgagttaygaggatggagtagttatttyggttygggattg

SEQ ID NO: 3835 - DNA, 222 bp, synthetic construct
  misc_feature 1..222: note = Description of Artificial Sequence: Synthetic polynucleotide
  source 1..222: mol_type = other DNA
ggtattgattttttagttttttgtttgttttttygttttttttttttatttyggatatttttaggataattagggttgaagttttygggagaagtagtttygagttygtgggataagggggyggttyggtttygtttaggatttttttyggatttttttttyggttgtttyggttggttgtagggygygttatttygyggggaggyggyggtagyggtggyg

SEQ ID NO: 3836 - DNA, 201 bp, synthetic construct
  misc_feature 1..201: note = Description of Artificial Sequence: Synthetic polynucleotide
  source 1..201: mol_type = other DNA
gyggyggyggyggyggyggygggggttggggygygggggtyggattatgagtygttgagtygggtaaattttaggttatygagttagyggattttyggagygtagttttgygtygyggagtaggttttaattaggyggygaggyggttataygtatygagttagygattttygggygaygygyggggttagggagygttac

SEQ ID NO: 3837 - DNA, 298 bp, synthetic construct
  misc_feature 1..298: note = Description of Artificial Sequence: Synthetic polynucleotide
  source 1..298: mol_type = other DNA
gggattattttttayggtgttatygtatttatttygygtttttttttygttttttggagtttatygggattaggtggyggygggtgtttttttgggggtgygyggttatgtaattggtggatttttttaaatygttttggaggggggagygyggygttgggggygggagagygtttttggttgtgagttgtttttgtygtttygtttygygtttttttgtygtttygtttygggtttttygygttttttttttyggttyggtygagygygttgtttygaygtygttatttagagtygg

SEQ ID NO: 3838 - DNA, 272 bp, synthetic construct
  misc_feature 1..272: note = Description of Artificial Sequence: Synthetic polynucleotide
  source 1..272: mol_type = other DNA
tgatagggatygggtttagatttgttaaatgttgyggaggtagaatttgatagtgygggagggtaggygtttgggaggtaggagttggtggagatgatagygtggaattygtgagttttaygtaaygtttttttgtygtttagggtgggtttttagaagtatagaaatggtygggttgygggatattatagygaggaattagyggagtataggggttttaggagygtygggatatgttaggtygggtagatagtttygggtyggagtgagtg

SEQ ID NO: 3839 - DNA, 201 bp, synthetic construct
  misc_feature 1..201: note = Description of Artificial Sequence: Synthetic polynucleotide
  source 1..201: mol_type = other DNA
gagtatgagggagagtgttattttttagttgaaggttattgtgttttgtatttttggtttgggtaagtgaggagtttgttagtttttggtaggaagtgtaygtgatyggyggttggttaggggtatagagaygtattttatatagaaatttaggttggyggggtgggyggtyggggagttagttttgtagatgttattaag

SEQ ID NO: 3840 - DNA, 251 bp, synthetic construct
  misc_feature 1..251: note = Description of Artificial Sequence: Synthetic polynucleotide
  source 1..251: mol_type = other DNA
gtaggttgaaggyggagttggagatattyggggagtaggttyggagygttttygaggtyggggtyggygagggagaggtagggagttygaggaagggaggyggggygggtagggatygagttaggagagagygggygggggttttgggagyggttttygagagtggggtttgtggggagtagggyggtttyggggatagaggaagtygyggtggaggtttagggtagaygygggyggaygygaggagygta

SEQ ID NO: 3841 - DNA, 249 bp, synthetic construct
  misc_feature 1..249: note = Description of Artificial Sequence: Synthetic polynucleotide
  source 1..249: mol_type = other DNA
attygttttyggagtttygttyggyggtatttgttttggttaygygttttagtttygttaggtttttyggygggttygaattygtagtygggaaggtataygygagtaggagggygtattttatggttaggtgyggaygyggyggttgygggtggttagaygyggtaggyggagygtaygggyggygygtatttttttygyggtttyggagttyggygttttaggtgyggttttaggtgagagtygtyg

SEQ ID NO: 3842 - DNA, 249 bp, synthetic construct
  misc_feature 1..249: note = Description of Artificial Sequence: Synthetic polynucleotide
  source 1..249: mol_type = other DNA
gttttyggtagaygtagggggaygttygggyggygyggggygygggtttyggagtggttgygggaaggaygygyggtattgtttgtgyggggattygggaygggtyggggtattataggygygggaatttaygtgtggattttgygttygygggygyggtgattttygyggggatttgttggtgtttygagatttattgagttgygggggttttggagatttttaggtttgaaaagttagttttagaga

SEQ ID NO: 3843 - DNA, 201 bp, synthetic construct
  misc_feature 1..201: note = Description of Artificial Sequence: Synthetic polynucleotide
  source 1..201: mol_type = other DNA
ttgttygyggygtygggygygtyggtygtygggtggtggtggtggtyggyggygtggtggtggtggtggtggtagtgygggttygygtygttttgygyggyggtygyggygattayggyggatattayggyggyggyggggtttattttttygtygttgtygtttaaggaggygtyggtatyggtttyggtygtygyggtt

SEQ ID NO: 3844 - DNA, 201 bp, synthetic construct
  misc_feature 1..201: note = Description of Artificial Sequence: Synthetic polynucleotide
  source 1..201: mol_type = other DNA
ayggtatttayggtyggggggttygggggattyggygggyggyggayggygtatattygygattyggttygggagtygttgttttttttagtttggttttygtttttaygatttaggggyggttgygygttgttttttggygtygtatygggtttaggygygyggyggggttggggygygyggggyggtygtttgggttat

SEQ ID NO: 3845 - DNA, 251 bp, synthetic construct
  misc_feature 1..251: note = Description of Artificial Sequence: Synthetic polynucleotide
  source 1..251: mol_type = other DNA
yggygtygggtagygygtagagttagtygygtgtgtagggtygggtgtygttgygtgygggygyggggygygggttyggggygggtgtagggygygggatyggggtagygtaggagtaggtaggggttygyggttygygtgggttttaggygygggatggyggygtttagtagygygggttygygtagggygygtagygttgggggtaatagygtggggttyggtyggtagtggggygygggttgygyggt

SEQ ID NO: 3846 - DNA, 201 bp, synthetic construct
  misc_feature 1..201: note = Description of Artificial Sequence: Synthetic polynucleotide
  source 1..201: mol_type = other DNA
tayggtggattttgtgggtygttgagttttttgattttyggtttgttttattttgttttgttagtgggttttgygttygygttaataattygaatgggtaygtttttgygttttagaaygttgttygtttttttatatttagattgaggtggaatttaygttatataaatygggtygtaaggtttagtttagyggggtttt

SEQ ID NO: 3847 - DNA, 201 bp, synthetic construct
  misc_feature 1..201: note = Description of Artificial Sequence: Synthetic polynucleotide
  source 1..201: mol_type = other DNA
tggygyggggygtaggtgtaygtaggttggtygygggygygyggggttyggygggagtttyggggtggttttygygtggggtygggggygttygygygggyggggygaggtyggggagggtagttgttygtttttttyggtattgggagttttyggttggtattgygggaggagttttygggtgattygygggttttgaaa

SEQ ID NO: 3848 - DNA, 201 bp, synthetic construct
  misc_feature 1..201: note = Description of Artificial Sequence: Synthetic polynucleotide
  source 1..201: mol_type = other DNA
tgaggaattggatattaggygttggtygttttttatttttagtygttgggtgtttagagtttatttttagygattagagtagaattgtagagaagaygttygygttygggtttygtttggggagttagggygygyggggagygttygggtygygyggttattgatygttggttgtaygggggygtygtgyggattyggttt

SEQ ID NO: 3849 - DNA, 337 bp, synthetic construct
  misc_feature 1..337: note = Description of Artificial Sequence: Synthetic polynucleotide
  source 1..337: mol_type = other DNA
tttagggttttygggatyggtgttygttagtgggtataggaygtygggtgttygaagggttgtttggagatgtaattgattttggygggtattagaatgaygagtggtagtagtaggagyggggtgaygaataagattaygaaggatttgaatttggagatatagtttagygtygaggttatygygygggagggagattggygggygagaygagtgaggggtagttagaggygtygygggtttaagaaggggttatagttttyggggattggggagggggyggtgataatttygtttygtaygggggygttttttygyggttttggggyggggttat

SEQ ID NO: 3850 - DNA, 201 bp, synthetic construct
  misc_feature 1..201: note = Description of Artificial Sequence: Synthetic polynucleotide
  source 1..201: mol_type = other DNA
ggttygtgtagagtygtttattttttttygtagygtygggttgttttaaattgtttttggattttatttgtgagtygygtggttgggttgggttgggttgygygggatttgttagyggttttygttattttgttygtaggygtttatyggttgttttttgggtygtygttggtygtygttataygtgggaygtygagggta

SEQ ID NO: 3851 - DNA, 201 bp, synthetic construct
  misc_feature 1..201: note = Description of Artificial Sequence: Synthetic polynucleotide
  source 1..201: mol_type = other DNA
atatggygtatgatagggaattggtagggttatagtttyggattattyggggtagggtagggaaattayggtagattgygtagygtattttgttygggtgyggtgagggttgygtttygtttggttttygttataatttatagaaagttttygyggagtattggtgtttttgaatttattaggygatttygtygtaaagaa

SEQ ID NO: 3852 - DNA, 201 bp, synthetic construct
  misc_feature 1..201: note = Description of Artificial Sequence: Synthetic polynucleotide
  source 1..201: mol_type = other DNA
tygattttgtttygggtaatygatgggaaatttttygagagygyggtttttttggggattyggygtttttgaygtttttaggygttttttygggtygttgyggttttttttygtygttygttagygtttaaggtygygttttttttattttygtttttttttttttttyggyggttttyggatttggatagagttgtagga

SEQ ID NO: 3853 - DNA, 1216 bp, synthetic construct
  misc_feature 1..1216: note = Description of Artificial Sequence: Synthetic polynucleotide
  source 1..1216: mol_type = other DNA
taaggtggggatcgggacgcgatcggggatggggaagggggttgtaggaggtttcgtttgcgttgtcgtttttgttgggtatagcgttttttattattcgcggcgatttcggttttcgtaaggtggggcggcgagtaggagtcggggttaggttaggggttcgagttttcgttcgaggggcggggaaggcgggtgacgtgagtcgggtcgggcgggcggagttgggatcggtttcgggaggcgggggcgagcgcgcggagaggtagacgcgaggagggaggcggttgagtagcgcgggcggttttgcggcgggcgcggtgggcgcgggcggcggggtttcgggattttcgcgcgtttttttcgcgcggcgtcgtcgtcgcgcgtttttacgtttcgcgttttacggcgttttcgtttcgcgcgtttttcgtgttcgttttttgttagttttcgggtcgcggtcgtttgtagagcgagcgtttagacggagttttcgggtaatttgagtggcgtcgatcggcggcggagtttttggtagagtttttcgattcggtagcgcggaggggattcgcgttcgttcgcgtcgcgttattttaaattttaagtagcgtcgttttatcggcgcggagtttcggttggaggtaagagtcgcgcgtcgggagatacgtatcgtgagcggtagcgtcgtcggttttttttttcgtcgtttcggagggcgaagtcgcggttttttagttttttgttgcgtcgcgatagcgtcggaatacgtttcgtttcgttgtcgttttcgttgtgtcgtcggcggagggggtcgcgagtttcgcgtttcggtcggaggatgtgcgttttcgcgggtcgtttagtttgagttatgcgttttaacggcggcggcgcgtcggtcggtatggagtttcgcgcggtcgcgttttgattcgttgtgcgtttcgcggtcggcgggcggcgggaggcggcggatcgagagtcggagatcggcgtcgcgggacggaagcgagcgggcgcgggcgtcgcgtagatggtttgggcgagttaggtttgaggtttcgtttttcgaaacgtgattatgtggatttaatagtttttaggatttaggtgagcgattcggtcggcgtcgggtgcgtgtgggcgcgtgggtgttaggttgggcggaagcggcgtttttttttatgttgtaaattaagggattttttttcgtttt

SEQ ID NO: 3854 - DNA, 365 bp, synthetic construct
  misc_feature 1..365: note = Description of Artificial Sequence: Synthetic polynucleotide
  source 1..365: mol_type = other DNA
ggcgttcgacgtttatttcgggtttggcgttttttttcggttattacgcggcgtcgtttttcgggattttttagttttcggagtttcgcgcgtttagagtcgttcggagcgcgggcggggttagtttgggtagtcgcgggtcgttgttgcgtcggaagttttcgtcgttagggagttttttgggcgttaggttttgggtttttgggcgaagtcgacgttagaatatgtttggtttcgtatttagtttatcgtatttttagcgcgcgtgggtggggggcgtcggttgaggtggggagggtatagtttagttttaggttatagtgtttcgggcggggtagcgcggtgcggggtgaacgttatcggtt

SEQ ID NO: 3855 - DNA, 201 bp, synthetic construct
  misc_feature 1..201: note = Description of Artificial Sequence: Synthetic polynucleotide
  source 1..201: mol_type = other DNA
tggcgtgacggtttgtggggtttgcggggtgcgttgttttcggatttgcggggggaggcggttgagttggcggcgttcgcgggtttagtggtgagtgcggcgtttttacgtttagttcgacgttttcggagcggtcgtcgcgtaggggtgggcgcgggtttttaggagggagggcggttgtgaacgcgttttgtttttcgc

SEQ ID NO: 3856 - DNA, 201 bp, synthetic construct
  misc_feature 1..201: note = Description of Artificial Sequence: Synthetic polynucleotide
  source 1..201: mol_type = other DNA
attacgtcgttcgtgtttattatttacggtacggaggacgaggtgatcgatttttcgtacgggttggcgttttacgagcgttgttttaaggcggtggagtcgttgtgggtggagggcgtcgggtataacgatatcgagttttatagttagtatttggagcgtttgcgtcgttttattttttaggagttgtttagttagcgc

SEQ ID NO: 3857 - DNA, 201 bp, synthetic construct
  misc_feature 1..201: note = Description of Artificial Sequence: Synthetic polynucleotide
  source 1..201: mol_type = other DNA
gggcgcggcgggcgaggggttcgggttgagttgcgggtcggttcggatggcgggcggcgcgggttggtcgggcgttttcgcggttttgttgcgtttcgtgcgtcgtttgcgcgaggtgttcgaggtgtgcggtcgcgatttcgacggttttttgcgcgtggagcgcgtcgcggcgttcggattgcgtttcggttagggcga

SEQ ID NO: 3858 - DNA, 201 bp, synthetic construct
  misc_feature 1..201: note = Description of Artificial Sequence: Synthetic polynucleotide
  source 1..201: mol_type = other DNA
ggcgtttttttttcgtttttggtttaggttcggttcgcgggtgtagttttttttagggttttttttttttttcgggtcgcgcgttcgtttcgtatcgcggcggtttttcggtagtgtttgtttttattggacgtatagtgatcgtgacgggtacggggcgcgagtttttattattataatgggtgtgtatggcgcggggcg

SEQ ID NO: 3859 - DNA, 201 bp, synthetic construct
  misc_feature 1..201: note = Description of Artificial Sequence: Synthetic polynucleotide
  source 1..201: mol_type = other DNA
tttttttttaattgatttaattttttaattttagtttttcgtttttggtatcggtttttttttaagtttttagattttaattttggttttcgattcgtttcgttatagtttgggaagcgggagaagtagcgcgcgtttttttgcggatttttttttagggaagattgtggtgttagttgtttagggggattagggggttat

SEQ ID NO: 3860 - DNA, 201 bp, synthetic construct
  misc_feature 1..201: note = Description of Artificial Sequence: Synthetic polynucleotide
  source 1..201: mol_type = other DNA
agtttaggggtagggggtttagggtagttagatttttttaggtttaggaagagtagtttttagcgttcggttgttaggtaattcggttttcggttttttacggcggttttttcggtgtgttttattaagagcgatagggttggtgattcgaggggcgcgtgcgcggtcgttagtttgggatttgtacggattttttttttt

SEQ ID NO: 3861 - DNA, 213 bp, synthetic construct
  misc_feature 1..213: note = Description of Artificial Sequence: Synthetic polynucleotide
  source 1..213: mol_type = other DNA
gttttttgtttgaattaaagtggttaggtatttagtttgtaagatgaataaatgaaggaaagaaggaacgaatgaataagggtttattttgtagagcgttcgcgttttagcgcgtattaggtatattagtgttaaaggtgttgggggtcgggtttagcgttcggcgcggttggaatgggggcggcgaggagttttttttagttagtcgtaggg

SEQ ID NO: 3862 - DNA, 201 bp, synthetic construct
  misc_feature 1..201: note = Description of Artificial Sequence: Synthetic polynucleotide
  source 1..201: mol_type = other DNA
gggaggcggtaggtagggggcgttgcggggcgaggtaagtgtagttcgtcgttgtttgtttgcgagtttggggttgcgcgtcgttttttatttagttgcgcgattcgagcgtcgcgtttatcgcgtttcgtgggttttcgcgtttcgaagggtcgggattcggtttgagttttttttggttttcggtgtaagtcgttgggt

SEQ ID NO: 3863 - DNA, 201 bp, synthetic construct
  misc_feature 1..201: note = Description of Artificial Sequence: Synthetic polynucleotide
  source 1..201: mol_type = other DNA
cggggtattcggtcgtgtcgtcgtcgtcgttttagttgtcgtttttgttttcgttttcgcgatcgttgttagagcgtattattcgcgaggaggtggagggcgaaagtttggatttgtgtttgtagtagttttataaatagttaagtagttgggtttggttggtggtgggttcgcggtttttatcgcgtcggtttcggacgc

SEQ ID NO: 3864 - DNA, 201 bp, synthetic construct
  misc_feature 1..201: note = Description of Artificial Sequence: Synthetic polynucleotide
  source 1..201: mol_type = other DNA
aaggggggtttggttcgttagcgtaggggattcgagttgggtaggatatgtgagatagttatagttttttagagattacgataagatttaattagtcgcgcgtggttttcggcgtcggagcgggttagtttagttcggtttagttcggtttcgcgtagagttttcgtcgttttcgcgtatagagtcgggtgttttttgcgg

SEQ ID NO: 3865 - DNA, 324 bp, synthetic construct
  misc_feature 1..324: note = Description of Artificial Sequence: Synthetic polynucleotide
  source 1..324: mol_type = other DNA
ggtgggggtttgggagacggtcgaagggggttcgggtagaagtttcgcggtcgggtcggcggagggaagggggcggtcgcgttcgggattcggtttttttcggttttatttatttgtttcgaagagtggttttagttttgcgtttttttttgcgattttatatatagggatagttttaggtatagttttagtagtaggagtatggcggggcgagggcgcgggacgttcggggattcggcgggatacgttttgtagcgtttagggttttagttattgcgggacgttttcggggtcgtttatttcgcggttttagttcggatttcg

SEQ ID NO: 3866 - DNA, 201 bp, synthetic construct
  misc_feature 1..201: note = Description of Artificial Sequence: Synthetic polynucleotide
  source 1..201: mol_type = other DNA
tcgcggtgttgtcgcgttaagcgaaggaggaggagggttcggcgattttggggacgaacgttttggacgtttcgttcgcgtttttttttcgcgttcgtcgcgcgtttgtttgttcggtttttttttcgtttttttttcggtcgttcgggttaaaatttaaggttaggtttttgagggttcgggttttttagtcgttttttt

SEQ ID NO: 3867 - DNA, 330 bp, synthetic construct
  misc_feature 1..330: note = Description of Artificial Sequence: Synthetic polynucleotide
  source 1..330: mol_type = other DNA
ggattttggcgtttttttaggttgttgcgcgcgggttggggatcgtgtatcgttttgcgcgttagacgatgtattttttggaacggtagttgaggtaatgcggggtgtgaagtggcggcgggtagaggggttcgtaggggttgggattcgcgtgtttttttttgtttcggtgcggagtacgatgtgttcgggcgggggcgaggacgttcgggaggggttgggttgcgtacgttcgcggggtcgtcgtagatgggcggtttggaggcgttgtagtttttgggaaatgggagttttcgttttgttttttttgttgtttggttgggttgggtt

SEQ ID NO: 3868 - DNA, 293 bp, synthetic construct
  misc_feature 1..293: note = Description of Artificial Sequence: Synthetic polynucleotide
  source 1..293: mol_type = other DNA
tttagtattttagtttttaagtttttttgagtcggggttgcgttttcgttgtttttttcggtcgtcgttttttggcgttagagggatttcgcggttcgtacgggtttgttttcggtttcgttcggagggtgtgcgggttttcgtttcgttggtttcgtttgtttattacggcgcgtttaaatttacgcggttcgcggttttttgcgtgttttgtcgatttcgggtcgtaggaggggttagtttcgtcggtttttacgcggggtttgcgtcggtagcgttacgggttggaacgc

SEQ ID NO: 3869 - DNA, 201 bp, synthetic construct
  misc_feature 1..201: note = Description of Artificial Sequence: Synthetic polynucleotide
  source 1..201: mol_type = other DNA
cgttttcgtttcggtttttcgtcggtttggcgggcggcgacgtggggaggggtcgtttagaagtcggggtcgttcgggtcggggaattttttcgcgtcgacgtttattttttacgggtcgtattcgtcgaggggtcgaaaggggttttagtggaggacgcggtgggagttgggtttcgttttagttgtcgacgtcggcggt

SEQ ID NO: 3870 - DNA, 201 bp, synthetic construct
  misc_feature 1..201: note = Description of Artificial Sequence: Synthetic polynucleotide
  source 1..201: mol_type = other DNA
tatttcgttaaagtcggataaagcgtggttagagtgcggtttagttttttagtttgcggttcggggaggagggtagcgcgggcgcgggttgggggtggcgcggggcggcgtttaggatttcggtgtaggcgagagtgcggcggatttgttttaagaggagagcgaggcggatttgttttaagaggagagcgtggggcgtcg

SEQ ID NO: 3871 - DNA, 226 bp, synthetic construct
  misc_feature 1..226: note = Description of Artificial Sequence: Synthetic polynucleotide
  source 1..226: mol_type = other DNA
atggcgatgtttttatttttttcggtaggtttttttaattaaaaagttggaaacgggaattcgtaaataacgatttagggttttaaattatttgtaaagacgcgatggggaggggaatatttgcgcgttttaaaattttaatttcgaggtttttagtcgcgtttgattcgggagtcgggtgcgtttttagtgttcgcgtacgaattcggcgttttggtagtttcga

SEQ ID NO: 3872 - DNA, 363 bp, synthetic construct
  misc_feature 1..363: note = Description of Artificial Sequence: Synthetic polynucleotide
  source 1..363: mol_type = other DNA
ttgtaagggattatagttataatttattaggtaattatatttatcgtattgtagaagttatgaatttggcgggcgtgggggggaaggggaagaagttcggcgagattagaggggaaattcgaaaaagtaagtttttgcggtagtagttaggaaatattcgttaggaattggttgcgattttaattttagcggttcgaagttttagtttttttatttttatcgcggtagagtcgttttcgtagatatttttcgaggagaatcgcggtttcgagggcgttaggtgagtcgcgtcgtttcgagttttcgggttacggtaggtcgatttaggcgttttcggttcgttcgtgttttcgcgttcgggtg

SEQ ID NO: 3873 - DNA, 201 bp, synthetic construct
  misc_feature 1..201: note = Description of Artificial Sequence: Synthetic polynucleotide
  source 1..201: mol_type = other DNA
cggttcggtgggggtttcggcgagcgggagggcggttggggatttcggtcgcgtcgggcgcggggttcgggattcgggagatcgcgcggcgtcgaagttacgcgttagttttattgtttcgcgcgtttcgttttaggtttcgggtttttttttcgtatttcgtaaagtcgagattttttcgtagttttttatttcgagagg

SEQ ID NO: 3874 - DNA, 201 bp, synthetic construct
  misc_feature 1..201: note = Description of Artificial Sequence: Synthetic polynucleotide
  source 1..201: mol_type = other DNA
tcgcgttttttcgttagtcgtcggttaggagtttttcggtttttgagtaggacgcgttaaagggagttgggaggtttagtagtttttagcgtcgttttttcgggtgacgtgacgttttttttggagcgcgggttcgttttcgttaagtttttatcgtaggtttttatagtcgagttacgggaagatgtaacgtcgggcgag

SEQ ID NO: 3875 - DNA, 267 bp, synthetic construct
  misc_feature 1..267: note = Description of Artificial Sequence: Synthetic polynucleotide
  source 1..267: mol_type = other DNA
cgcggggtgggggcgcgggagtcgttttttgttcgtttcgcgcgtatgttttcgtcgtatttgtttcgtttagtgttttatatttcggggagtcgggtggcgttgggttcgtcgaggtcggggtttttttatgggagggaggtggttgcggcggaatttttagatgcgtttttttttgtattcgttttttgggaaggatttttttaaattttggttattttttgtttgttagtttgttttttggtagcgaagttttagtagtttatt

SEQ ID NO: 3876 - DNA, 707 bp, synthetic construct
  misc_feature 1..707: note = Description of Artificial Sequence: Synthetic polynucleotide
  source 1..707: mol_type = other DNA
gcggtggcgtcggcggttgtagggggacgagttagcgtcgcggcgttgggagttagttgagttcggtcggcgagcggaggcggtagcgtaggtagagcggcggcggtagcgggagttcgagcgttgcgcgtttattatggtcgtttagggagagttcggttatttggcggcgtagtcggatttcggttttaatagcgagcgtagtatcgattttttagtgttcggtttcgaggacgatttggtcgtcggggcgattttgtatagttcggagtggagcgaggagcgttttcgcgtggataggaagaaatttgaggttatgttataaggtaggtatttttcgtgttttcggatttttcgattgagtttttaattttttttcggatatttttatcgcgcgtttcggcgttcgttattttagtttacggtcggtcggtttagttttaggttcgttttttcgcggagtcggaggatatttagggattggagatttcgcgggattttttatttttttacgttttttagatttttaggcgttgggggttttgtgcgaatttgattggttttagaaaagtcgaaggtcgagtttgtattggcgcgtttaagttgcgttttggattttggagatgttaattttagttcggatatttgggttgtgttattcggattattcgggtcgtatagagtatgcgtgattttttttatttttt

SEQ ID NO: 3877 - DNA, 201 bp, synthetic construct
  misc_feature 1..201: note = Description of Artificial Sequence: Synthetic polynucleotide
  source 1..201: mol_type = other DNA
ggatttaggattttgtgttcgcgtttttggagtcgttggagttcggatttttgtaattgttggtattttgggggtttggtttagcgttttgttgtttattcgttttttttcgttgtttcggaattaaagttttcggtttttttcgttttcgcgcgtttatttatcgtcgtcggggagcggttcggttcgtatttagtatta

SEQ ID NO: 3878 - DNA, 201 bp, synthetic construct
  misc_feature 1..201: note = Description of Artificial Sequence: Synthetic polynucleotide
  source 1..201: mol_type = other DNA
taggtttcgcgtttgattttttagtttgcgtagcgggtattcggtcgggaagaatttttttagtaggcggtttagtattacgtttacgcgttcgcgttcgcgttcgcgttcgtggtcgcgcgggttttagttttacgtagcgtttatagatcgtgagttcgtagggtagtgttatcggtttgtgtagtagtttcgggtagt

SEQ ID NO: 3879 - DNA, 201 bp, synthetic construct
  misc_feature 1..201: note = Description of Artificial Sequence: Synthetic polynucleotide
  source 1..201: mol_type = other DNA
tattgggatttttatatacgagttggtatatattagttatatacggttaattttagagggttggttttttgttttgggacgtttttaggttttcgggtcgcggtgcggagaatttaggtgggtgttcggtaagttatttattaggggttgttttttcgcgattttcgttataagcgtagggattcgggggtcgcgttggtt

SEQ ID NO: 3880 - DNA, 201 bp, synthetic construct
  misc_feature 1..201: note = Description of Artificial Sequence: Synthetic polynucleotide
  source 1..201: mol_type = other DNA
gaaaattgtaaaatttgggagttattttgttttatttttttgttgtttggggatatttttcgcgagtttgttcggtttcgaagaaggagtagaggggattcgtaatttagtttttagagtttcgttaggaaaggcgcgagagatttattggtttcggtaattttgtttcggcgttcggacggagttcgatgtttgcgtagt

SEQ ID NO: 3881 - DNA, 203 bp, synthetic construct
  misc_feature 1..203: note = Description of Artificial Sequence: Synthetic polynucleotide
  source 1..203: mol_type = other DNA
agtttagagtgcgtcgagtatcgtttcggtaggtggaggggttgcgggaaataaaataatttgggtaggaatttgattggtagtaggtttatttttggttcgcggtagggaatttaatggagatgaagaatggtggggaagggggggcggtgtttttttgggagtttaacgtacgtttttttattttgttattttttggagat

SEQ ID NO: 3882 - DNA, 201 bp, synthetic construct
  misc_feature 1..201: note = Description of Artificial Sequence: Synthetic polynucleotide
  source 1..201: mol_type = other DNA
cgcgcgttttttcgcgcgtttttcggattcgcgtttgtttattttttcggttttgttgcggtcgaggttttaagtcggttatttcgtgtttaggtaatcgcgggggcggcggcggcggcgtgaggagcgggcggttgttgtttcggggttttttggttcgagtttttagttttcgattttcggcgtttcggcgttcgatta

SEQ ID NO: 3883 - DNA, 201 bp, synthetic construct
  misc_feature 1..201: note = Description of Artificial Sequence: Synthetic polynucleotide
  source 1..201: mol_type = other DNA
gggtttttagtttggtttttaggcgcggtggcggcggtgggatacgcgttaggcgtttagagaaggatatgggataatggtttagttcgaggacgttagacgtcgtcgttcgattcggggaaggaagtttttgtagtcggttcgggaattcgaggcggggagggaggttagttttggaggtgcgttgtcgttttaaaataa

SEQ ID NO: 3884 - DNA, 208 bp, synthetic construct
  misc_feature 1..208: note = Description of Artificial Sequence: Synthetic polynucleotide
  source 1..208: mol_type = other DNA
gcgtcgcgtcgtcgttcggtttttcgaagtcgttttttgtcggcgcgtcggtcgtttgcgttacggcgggcgttatttatttcgggtagagttttttgttcgtgtagcgcgttttgggtttttagcgttgatttacgttcgtagtaggtgaggaaggcgtagtttggggaggaaagtaagcgttaagaagggttagtggggcgttttc

SEQ ID NO: 3885 - DNA, 201 bp, synthetic construct
  misc_feature 1..201: note = Description of Artificial Sequence: Synthetic polynucleotide
  source 1..201: mol_type = other DNA
gtaggggggttttatttattaagttatgttttattagggcgttaggcgggcgaagtaaaggtagggatggcgggcggggcggcggcggaggtggaatgggcgttttttttttttatttggttttatttatttatttagattagaaaagcgagtcggtttggagggagttcgttcggggattcgagcgcgtatttattagtg

SEQ ID NO: 3886 - DNA, 201 bp, synthetic construct
  misc_feature 1..201: note = Description of Artificial Sequence: Synthetic polynucleotide
  source 1..201: mol_type = other DNA
gcgtttcgtttttcgtttcggcggttttcgtagtttcgtcgtcgttcgcgttcgcgttttggagtcgcgttataaagggttcgcgcgtagtcgtcgtcgtcgtcgtcgtgcgaggagttaggatggttttggtttacgtcggttatttcgtgtttttagtgtttggttttgtgcgaaatagaggtatcgtttttttttttc

SEQ ID NO: 3887 - DNA, 595 bp, synthetic construct
  misc_feature 1..595: note = Description of Artificial Sequence: Synthetic polynucleotide
  source 1..595: mol_type = other DNA
aggaggttaggaaagtttattatatgcgttggtttcggttgtcgtacggtatttttatggttatcgggatgatgagcgtatttattttgggttcgtggattgaggacgaggaggaagaggaggaggaagaagaagaagaggaagaggaggaggaggaggaggaggacgcgtttaggttgagatggttcgcgtggatattgttatttattttaagattgttgttttcgtcgtcgtcgtcgtcgtcgttgttgtcgtcgtcgtcgtcgttattatttgttatagttagtaacgggtagtcggcgtaggggttcgggggagtttttttcgtcgttagcgttattttaaatatttattaatagttatattgttgttattgttgtcgtcgtcgtcgtcgtcgtggagcgcgggaggggggcggggaggcgtttgggttcggggcgttgtgcgcgatttggcggggtgcgtcgagatatatatagcgagtcgtcgtcgttcgttcgggggggagggggatggagtgcgcgggtagtttttttttttcggttcgcgtttcgttcgtttcgggttgcgttggtttcgagcgtcgagagttagg

SEQ ID NO: 3888 - DNA, 201 bp, synthetic construct
  misc_feature 1..201: note = Description of Artificial Sequence: Synthetic polynucleotide
  source 1..201: mol_type = other DNA
tatcgtcggcgtcgaggcggcgtttatgtttaatcgtcgtcgttatcgtcgtcgtttgtttttgcgttcgttttcgcgtttgttgttttttcgtcgtcgtcgtcgtcgtcgttattatagattcgtagatatatagttaagatttttgatttttaatattaatttttttttttggggaggggaggggacggagggaagggg

SEQ ID NO: 3889 - DNA, 269 bp, synthetic construct
  misc_feature 1..269: note = Description of Artificial Sequence: Synthetic polynucleotide
  source 1..269: mol_type = other DNA
ggtgtgatgttttcggtggataatgtttttcgttttttgtttcggggtttagatagttggtgtttaagcgtttataatgtagagttttttgtatttttttcgggtcgttatttgtttatttgttttatttaggatatttttttaaataatttttaagtggaaaaattacggttttttaggagatttattcgggaacgaacgtgcgtggggtagtttaaatttttgagtttagatttcgtttttcgcggttagatggtgcggtcggtggg

SEQ ID NO: 3890 - DNA, 201 bp, synthetic construct
  misc_feature 1..201: note = Description of Artificial Sequence: Synthetic polynucleotide
  source 1..201: mol_type = other DNA
ttagtttgttatcgtacggcggtcgggatcgtagtttttgggtgcgtagtgcgtttttcgttgcgtttttttagagcgcgggtttcgtgtttgtgttcggcgcgacgcgatttttttgttagtcgggtttcgcgtgtttttcgcgtttttcgtagttttcgcgtagttcgtagcgttttttagtttcgtttcgcggtcgcg

SEQ ID NO: 3891 - DNA, 267 bp, synthetic construct
  misc_feature 1..267: note = Description of Artificial Sequence: Synthetic polynucleotide
  source 1..267: mol_type = other DNA
gtaggagtttcggcggtttgtaggggcggtggcgcggcgttgggcgcgcggtcgttagatggtagcgtagtttcggttcggttcgcgggaggcggttacgcgcgggggacgcggggcgcggcgcgttgagcgcgggtgtcgaggttggagggcgcggtcgggttttcgagtttttttttcgcggtatttttgtttttatttttaaatgttttgtaagttaggagttttcgtaggaatcgttgtatttttatttttttttaaatttta

SEQ ID NO: 3892 - DNA, 287 bp, synthetic construct
  misc_feature 1..287: note = Description of Artificial Sequence: Synthetic polynucleotide
  source 1..287: mol_type = other DNA
ggcggtgtgtagagtggggtttgggttttttgtttttaagggtagttgggtgggtttcgtgtttttttcgagtggatttggtttcggttttaaatttagtcgagggtcggttcgtttttggggattcgcggatgtcgcgagggggcgtcgcgttattgaaggttgggacgggggcggtgcgcggggcggcgtcggagttcgggatgtcggttttagagacgtcgcgtttcgtttcgaggaggtcgtcggtcgggtaagcggagttcggagttcgcggagtttggatc

SEQ ID NO: 3893 - DNA, 201 bp, synthetic construct
  misc_feature 1..201: note = Description of Artificial Sequence: Synthetic polynucleotide
  source 1..201: mol_type = other DNA
ggtttgtttcgagcgcggcgggggcgtcgggggcgtcggtttttattttgtagggtatcggcggcgggaggaggggtcggcgtttacgggttttcgttttcgcggcgtcgcggattaggagttggaattgttgcgggagtgtttgggagtcgtcgtgtttgttcggttgcgtaaggtggttttcgcgttggtgttaggtcg

SEQ ID NO: 3894 - DNA, 201 bp, synthetic construct
  misc_feature 1..201: note = Description of Artificial Sequence: Synthetic polynucleotide
  source 1..201: mol_type = other DNA
gcgtttgttcgcgttttgtttaggtggtttcggcggtttcggcgattttttgcgagcgttgttgtttttgaaggcgttgtagggtttgcgcgtggagtggcgcgggcgggattcgcgcgggtcgggtcgggtatagcgtagcgcgggggttatcgtcgtcgacgggtcgtgcgcgttgcgcgagtttagcgtagattttcg

SEQ ID NO: 3895 - DNA, 286 bp, synthetic construct
  misc_feature 1..286: note = Description of Artificial Sequence: Synthetic polynucleotide
  source 1..286: mol_type = other DNA
tttagggggcgttttcgagtcgcgtttcgcgttcgtttttaggagggttttcgcgagtcggttgtatatttcgaggcggtttcggttgtataatttggagcgagttgtttcgtttttttattttgggggcgaagaagggtcggggagtgggggaaagcgggaggcgtcgcggtttgggaggttttcgcgggttttagcgtcggtcgtattgcggtttttttcgcgcgtcgtcgtcgtcgtcggttttttttcgtttcgttttcgcggttttcggcgtttttcgcgc

SEQ ID NO: 3896 - DNA, 244 bp, synthetic construct
  misc_feature 1..244: note = Description of Artificial Sequence: Synthetic polynucleotide
  source 1..244: mol_type = other DNA
tagtagattttggcgtggggtatttgagattttcgttattgaaaaggcgttatagaaatgtaaggaattatgattttaataaaattgttttatttaggagcgagtttttgcgttgtttttgtcgtcggagttcgggtttgttacggtaaagtttgtaattagagaaaaatattagttttgttgagggttagaatatattattggttaatgtgtgtggttttttttttaaataatgttaagtatt

SEQ ID NO: 3897 - DNA, 201 bp, synthetic construct
  misc_feature 1..201: note = Description of Artificial Sequence: Synthetic polynucleotide
  source 1..201: mol_type = other DNA
gtgggtcggggatttcgttgttttgtttttttagcgggaaattgattgtttgagttttggaggataaatagagatattggggggttaacgggggcggtcgcgggcggggttttaggtttttatttatcgggttgttgagcgcgtacgtagttattcgagggaagattttcgtcgttcggggtttcggagaggggttagaat

SEQ ID NO: 3898 - DNA, 372 bp, synthetic construct
  misc_feature 1..372: note = Description of Artificial Sequence: Synthetic polynucleotide
  source 1..372: mol_type = other DNA
gtggtattagcgaatgtggtggatttcggtaggtttggggtaggggaattttcggtaatattttttagtatcgaaggtaggatttttcggttattttcgtcggttggaatttttttaagtattgttttgagtttatttttaaatgaaagggggaaaaatttaaattagattagaatttgaaatagttgaaatagttatcgatttttagtttgtttttaagtttggtagagattgtgaaagttttaattttttcgcgatgttagttacggttcgcggcggttacggagttattttagtatttcgcgatggatagtgattttcggcgtggcgcgagttttttgcggtttttacgcgggtttgggcggcgggttt

SEQ ID NO: 3899 - DNA, 201 bp, synthetic construct
  misc_feature 1..201: note = Description of Artificial Sequence: Synthetic polynucleotide
  source 1..201: mol_type = other DNA
agttagttttataatttgcgatcgatttttttttgtttagttcggttttagttttttttagttataagatggtaatagcgtcgatagtcgggtttcgcggcgttttgttttttttttgttttggtttggagttttttttgggtagttttgtatttatagcgttgcgttttttttagattgtgtagggagtacgggagggtt

SEQ ID NO: 3900 - DNA, 247 bp, synthetic construct
  misc_feature 1..247: note = Description of Artificial Sequence: Synthetic polynucleotide
  source 1..247: mol_type = other DNA
gttttcggggggttttggcgttttagttgtggattttttaatattcgtaggttatagagttatagaggttggatttttagtagtagaggatatagaagaacgaagacgagacgtagagttttaattgtagttagagataaaggtttcgttatatttcggaagtcgttttgtttttttttgtttcgtgtttgattggacggtttttagtttagcgtttttgattggataatttttaaggttttgtttt

SEQ ID NO: 3901 - DNA, 201 bp, synthetic construct
  misc_feature 1..201: note = Description of Artificial Sequence: Synthetic polynucleotide
  source 1..201: mol_type = other DNA
gatttggcgcggtttttgtttttcgttgtcgtcgaagttttaattttcgtttgtttgttttgtgttttttgtacgtagaagtttagtttgtgtggttttgcgatttgcgggtattgggagatttatagttaagacgttagggttttttggaagtttagaaatggtgagagtgtcggttcgatatttcgagagagggaacgg

SEQ ID NO: 3902 - DNA, 201 bp, synthetic construct
  misc_feature 1..201: note = Description of Artificial Sequence: Synthetic polynucleotide
  source 1..201: mol_type = other DNA
ggcgttttagttgtggattttttaatgtttgtaggttagagggttatagaggttgggtttttaagagtaggggatataaagtagggaagacgagattaagcgttttagttgtagcgagagataaaggtttcgttaaatttcggaagtcgttttgttcgttttagttgcgtgtttgattggacggtttttagtttagggttt

SEQ ID NO: 3903 - DNA, 235 bp, synthetic construct
  misc_feature 1..235: note = Description of Artificial Sequence: Synthetic polynucleotide
  source 1..235: mol_type = other DNA
tttggtcggattgcgcgtttagggtttttcgcgtttgttagttttcgttttgcgggtattttttttagtatcgggagcgcgcggttgttcgttttcgtcgcgatcgtggcgttagtttttcgttttttttgtttcgttttgagtatttgttttgcgtttttcgttgtaattttttatttttcgtttggattgcgggtttgggtgcggggtgttgtaggtttgtaggggacggggt

SEQ ID NO: 3904 - DNA, 201 bp, synthetic construct
  misc_feature 1..201: note = Description of Artificial Sequence: Synthetic polynucleotide
  source 1..201: mol_type = other DNA
atttcgcgttttttagttcggagtttatttgtataattggattttttttttttgtttttttttttttttttgaaatttgtttgaaaatttaagtgaaaatcgcgacgatttgtatatttaaaagtaagtgttaagtaagtgttttgcggtggtttcggcgcgtttcggggtgagcgcgtaaagtcgggagcgaggtgtcgc

SEQ ID NO: 3905 - DNA, 201 bp, synthetic construct
  misc_feature 1..201: note = Description of Artificial Sequence: Synthetic polynucleotide
  source 1..201: mol_type = other DNA
gggcgcggttttgggagcgggggaaggtgaggggaaatgggatatgatggtattaataatcgttattaaagacggtgggagtaataaaggaatgcgttttcgagacgtcgtttagtttcggggtgttttttggcgcggtcgcggtgtaggaacgcgagtttcgtcgtcgagtttttcgtcgtttgcgttcgttggcgcggc

SEQ ID NO: 3906 - DNA, 201 bp, synthetic construct
  misc_feature 1..201: note = Description of Artificial Sequence: Synthetic polynucleotide
  source 1..201: mol_type = other DNA
gttcgggcgcgtcggttggggttttggcgttttcgtaggtttcgaggtcgatagtttcggcgagggcgggcgtttcgcgttttagtatcggttgtttgagcgtttttggagtagtaaattttagatttttttttttttttttttttttttttttttttttttttttatttttttttttttttagttttttttttttttttt

SEQ ID NO: 3907 - DNA, 201 bp, synthetic construct
  misc_feature 1..201: note = Description of Artificial Sequence: Synthetic polynucleotide
  source 1..201: mol_type = other DNA
tttgttttaaaagtttatagtatgttttttttttttttagatcgggagatagtgattttatttatacggtaagattaaaagttttcgttcgtttagtttgcgggtttgggttgggtttagacgttttttaggatgtagatgcgtcgtcgttggttttttcggttataaagtcgtttttagcgttttttcgcgcgtaggagc

SEQ ID NO: 3908 - DNA, 201 bp, synthetic construct
  misc_feature 1..201: note = Description of Artificial Sequence: Synthetic polynucleotide
  source 1..201: mol_type = other DNA
gggcgaagcgatttagcgcgaggattagtttttaattaattcgtttttagttttgggcgttttttttagtagttagatgggggttttagaggtcggtgcgcggttatatggtttcgggttaggtagggggtcgtggggacgtatttgcgttaggcgtatagtatttttgggcgcgggacgggcgaagcgtcgtgggtttta

SEQ ID NO: 3909 - DNA, 296 bp, synthetic construct
  misc_feature 1..296: note = Description of Artificial Sequence: Synthetic polynucleotide
  source 1..296: mol_type = other DNA
tgtttttattttttatcggggttcggttggttagaggtaagtttcgagattttttattaattattattatcgttgcgagggtcggtgaggttgtagataacgtttgtaaggacgggagtcggggagggtgtagggcgagtttaaaggacgggtagagtaagtttcgggaagaggtaggggttttttttttcgggtcgtcgtttttcgtattttcggagttagtcgtagttacgtagcgtcgtttgtcgggtatattaaggatttggcgcgtacgtggcgtttatttttattttcgg

SEQ ID NO: 3910 - DNA, 201 bp, synthetic construct
  misc_feature 1..201: note = Description of Artificial Sequence: Synthetic polynucleotide
  source 1..201: mol_type = other DNA
agtttacgggttagtttggcggggttcgacggcggcggcggtggcggtagcgttcgatttagcggtattagtttgggttacgattagcgttacggtagttcgcgtttcggtcgttcggattcgcgtttcggtttcgggtcgttttcggtgggtagcgttcgttttagcgtttttagtttcggttttcggggttcggtcggc

SEQ ID NO: 3911 - DNA, 201 bp, synthetic construct
  misc_feature 1..201: note = Description of Artificial Sequence: Synthetic polynucleotide
  source 1..201: mol_type = other DNA
atttattggttgaaagtttcgtttattttagggtgattgagagcgttttttttttttgtgttgtttggaaacggattgttcgtttagtaatatttgattacgttttttattggttatcgttttcggaagttcgttttttcgttttcggaattttcgtaggcgttgggtttgtagatggcgtttaggtatatagtggcgagt

SEQ ID NO: 3912 - DNA, 266 bp, synthetic construct
  misc_feature 1..266: note = Description of Artificial Sequence: Synthetic polynucleotide
  source 1..266: mol_type = other DNA
gaaagataaaagggaaagcgtttttacgaaattcgtttacggatacgatttcggggttatatttagttagacgaatgtttggtaaatgatagttattttacgttagatttttatagttttttatacgttatttttattgttttagggaattataagtataggtatcgtttcgttcggcgtttttttttaaagattggggtattaggatcgcgggtttttatttttatttagtataaagagttcggcgtttagagttagcggttttt

SEQ ID NO: 3913 - DNA, 201 bp, synthetic construct
  misc_feature 1..201: note = Description of Artificial Sequence: Synthetic polynucleotide
  source 1..201: mol_type = other DNA
tcgtaggttatttgtgtgatttcggtgcgagtggaggttggtatcgtttagtgcgaggttgttatttcgtgtgtttgtttacgttttgtgtgattgggtgcgaggaagttaatggtatcgtggaatgtgaggttgtgagttgaggcgggagcgggcgattgttcgttgtattttgttgggtcgatattcgcggtttttttg

SEQ ID NO: 3914 - DNA, 228 bp, synthetic construct
  misc_feature 1..228: note = Description of Artificial Sequence: Synthetic polynucleotide
  source 1..228: mol_type = other DNA
tagagtttaggatattttaggttttttttgattcgattggaatttattttttacgtttttttggttttaattaatcgttatttgtatgtataaatggaaacgatagggtagagggttagtagttattcgcgtttgggttcgtagtttcgggtacgttgtagtttcgtattcggttgtttacgttcgggattatttattgtgttttttcggaattgtttagcgtgtttt

SEQ ID NO: 3915 - DNA, 248 bp, synthetic construct
  misc_feature 1..248: note = Description of Artificial Sequence: Synthetic polynucleotide
  source 1..248: mol_type = other DNA
agattttagatatttattttaaatttaggttttagcgttttgtaggggatttttattttggggcgtttatttttgattttttttttgggttttttcgttacggtcgagtttaagtggttgaagcgcggacgaggatgcgcggggtttcggtttttaattgtattataggtcgtatttacgaatttggttcggtatagttattatcgttcgggtttttaggttttagggttgtagaagtttagtttcgg

SEQ ID NO: 3916 - DNA, 387 bp, synthetic construct
  misc_feature 1..387: note = Description of Artificial Sequence: Synthetic polynucleotide
  source 1..387: mol_type = other DNA
gaggcggttatcgtagcggtcgttaacgagtagttgtacggaggtgtagaagaaggaggttattgttatttttttgataagttgggggcgtgggaggtttcgggagttcgaagtcgtttcgagcgggggtgggcggtgagcggattttcgggtgttgattaggtgtttggtggtagagtagggaaggggggaacggacgtcgattttagggattttttattcgtttacgttttttggcgttggttatacgtcgtcgttttagtattaattggaggtttttagtggacgagtagtcgttcgagggtagtcgtttgagtcggtagatagcggttagttggggtagcggttcgaattgttttcgtaatacgttttttagtatttcggttt

SEQ ID NO: 3917 - DNA, 203 bp, synthetic construct
  misc_feature 1..203: note = Description of Artificial Sequence: Synthetic polynucleotide
  source 1..203: mol_type = other DNA
cgttgtttttttgtgcgttatcgggggtttgttttgggtttgttcgatatcgtggttgttcgtttatttgagcgtaggtttttattttgtgttagggtcgcgcgtggttttcgtttgcggtttgttgggtttcggcgttataggtattgcggtttcggcgttcgtacgcgggggattgggcgggggttggagagtttaggtcg

SEQ ID NO: 3918 - DNA, 203 bp, synthetic construct
  misc_feature 1..203: note = Description of Artificial Sequence: Synthetic polynucleotide
  source 1..203: mol_type = other DNA
gttgcgtttcgttgtttagttcgggcggtttatcgttttttttgtttgggtggacgtatttttgtttttcgtttttattggcggtagttttcgtggggcgcgcgtggggggcgttggggtttttagttttcgtttcgagttttttgtcgcggcgttgttagtttcgggggtttgggttttatttcgttttggttttgttcgta

SEQ ID NO: 3919 - DNA, 312 bp, synthetic construct
  misc_feature 1..312: note = Description of Artificial Sequence: Synthetic polynucleotide
  source 1..312: mol_type = other DNA
gtcgggggggcgttcggggcggcggcggtggcggcgggcgggggtaggtcgggttgcgaatatatttcgaagttgtcgtcgtagtagagggttatgtcggcggtcgtgggcggttgcggcgcggtcgcggcgaggggcgagcggggttggtttcgtcgttcgggcgagagtatttttttgggggttaattttgcggtttcgtttttattcgcgttgggcgttcggtgtttcgggtcggggtcgggcgggtgttagcggagcgtttgttagtcggttttttataatcgagttcggcgcggttttttttgggtc

SEQ ID NO: 3920 - DNA, 407 bp, synthetic construct
  misc_feature 1..407: note = Description of Artificial Sequence: Synthetic polynucleotide
  source 1..407: mol_type = other DNA
tttcgggaggtttaggggtacggcgaggggtcggggaaaggcgatcgtttattatagttcgcgcgtttagattgagggaggagtcgggttgtagaatcggcggcggatggagacgggagggaggttgcgaggtcgttcgaggagagattaaggttttagaaacggagaagcgggcgttttgcgggaggcggcggcgttgtcgttggtcgttaagggcgggaagtgttttgggatttttattaggggtcgcgagtttcgagcgttaaattttcgcggcgttcgtttagcgcgttgttgtggcgggcgcggagggcgcgcgtcggtagtgggggttgcggcggcggagggtacgggttttcgtttagcgtttttatttttttggtgtagttgtttttcgcgagtcgaga

SEQ ID NO: 3921 - DNA, 295 bp, synthetic construct
  misc_feature 1..295: note = Description of Artificial Sequence: Synthetic polynucleotide
  source 1..295: mol_type = other DNA
gcgttcgtttcgcgcgtttttgtatttttcgcgtcgtttttcggggtttcgcggcgttcgtaggtcgcgtcgttttgtcgtttttttttcgtggtttttacggttcgttcgttttttagtagttttggggtgttcggggcggttttgtaagcgggagagagcggcgaggcggcggcgtcgagtgcggggggatgcggagtcgtgttcggttttgtcgtatttttcggtcgttcgttcgcgttcggtttcgttcggttttgttcgggttgtacgtatttttttcgcggtttagaat

SEQ ID NO: 3922 - DNA, 435 bp, synthetic construct
  misc_feature 1..435: note = Description of Artificial Sequence: Synthetic polynucleotide
  source 1..435: mol_type = other DNA
tttggttcggtttggttagttttcgcggtttttgttcgggttgacgtttaggaatgtggtcgacgagaagttttaatagtacggcgtggttttttagtttcggtgagtattcgtcgtggggaagggttttggggatttattggaggtcgcggttcgtagtagttaggggtcgagttacggttacggacgttttggtgtttcggttcgtgtcgggtttttaggcggaggaggcgttcgttgggtttagattttcgattttagtttcggtttttcggcgtttgggttgcgcggagtttttgtttcgcgtttcggatttttacgcgtagtttttacgcgtttcgagttggagaagtcgttagttcgtttttttagggcgtgtcgttcgttttttgtttttttgtgcggggtatgtgaaatgtgtggggttagaattgt

SEQ ID NO: 3923 - DNA, 410 bp, synthetic construct
  misc_feature 1..410: note = Description of Artificial Sequence: Synthetic polynucleotide
  source 1..410: mol_type = other DNA
tttttggagggaagttcgtcgggaagttgaagatagtggttatcgttttcggttattatttttcgggattcggattttaattttgcgttatatttttattcgtttttagtcgtgttttggttgcgtagttggaaaggttgagtagtttattgttgtttttttgttcggttttggatatatcgtttgaatttttgggcgtttttgttgttaagtgggggatagtattatttattggggaggaaaattttaggaatgtggattttggggttacgtaggggttgggaagtgaagggtagggaacgcgggcggcgttcggggtttgcgggtaggtaggcggtttggtcgcggaggttttttcgagttttgcgtttttttagagagggaggggtttatatcggttggtatagtta

SEQ ID NO: 3924 - DNA, 392 bp, synthetic construct
  misc_feature 1..392: note = Description of Artificial Sequence: Synthetic polynucleotide
  source 1..392: mol_type = other DNA
ggagttcgttgggcgtgttcggttcggttcggtttcgtcgtacgttcgtttttttggtttggttgaggatttcggggtttggacgtgttaacgttattttcgcgcgtcgaagttgtgacggtttattaagtagagatttgcgaggtatatagagagggaatgaggcggaatcgttcgggggttcgttgatattgtagagtttttcgtagtatcgttgttttaaatttcgtttttttaggcgtgcgcgtatagcgagttagaggaggtttcgtttcgatttggggtttttcgcggtttttagttcgggggttcgggttttcgaagagatttttggtaatggtagaggttttaaagtttagatgttaagtttcgcgatggggcggatgttttta

SEQ ID NO: 3925 - DNA, 203 bp, synthetic construct
  misc_feature 1..203: note = Description of Artificial Sequence: Synthetic polynucleotide
  source 1..203: mol_type = other DNA
agagaagacgttaggttgaggttttagcgattttaggtattagtttcgaaggagggcggggagatcgtaaaggggaagtgttcggagggttaacggttttcgcgtattttgcgtttttttgaagcgcgtcgttttttcgcgtcggggattgggatttgtttttggggaattcgtttagaagacggcggcggattggggtcggg

SEQ ID NO: 3926 - DNA, 398 bp, synthetic construct
  misc_feature 1..398: note = Description of Artificial Sequence: Synthetic polynucleotide
  source 1..398: mol_type = other DNA
aaaattgcgggagtttatttattgcgtttaggtggttagtttttgagttttttttattcgtggttttttgtcggtatgtaggtatgtataagtatatcgtcgagtaggaggatttaacgaatttagtttgtggatatgttttaatttttattttcgttttttttaggtttgtttaggtgaggatgatgggagggaaaagcggtgtatagtcgtaatattggtattttgtaagagtcgtcggggtattgatatagagggatatcgtattggagatgcggtgtttacggagatttattgcgcgcggtgaaatattttaagtatcgcgcggaataattgggtttagtttttttatttcggattttttttaggattatacgttattttttattttcgaattt

SEQ ID NO: 3927 - DNA, 286 bp, synthetic construct
  misc_feature 1..286: note = Description of Artificial Sequence: Synthetic polynucleotide
  source 1..286: mol_type = other DNA
tgtagagtttgaattttatcgtttagaaggaaaggtgagtgggggattcgggcgggaggtgaggtttgtcggtagcggtttttaggcgtgttgggtagtacggttagtagaggcggcgtttggttttggatgttgtagcggagacgttaaggagattgaatgtagggagcgaggcgtagcggtcgcggagggtggggtcgttcggaaatttaggcggcgttagttttgtagtatttgtaggtcgggggcgcgtatacgaggggtacgtgggtgtggaggaatcggc

SEQ ID NO: 3928 - DNA, 267 bp, synthetic construct
  misc_feature 1..267: note = Description of Artificial Sequence: Synthetic polynucleotide
  source 1..267: mol_type = other DNA
ggttgttaaggaggcggggtggttagcgcggggggtggaggatgggggtaggacgcgggagggaagggtagggggtggggggcgaggtttcggggattagcgcgcgagagtgtttagttgggaaatgtagtttcgaattaatatcgtatgttttataattagtttacgagtcgatgtggggaaagttatttttagatggggaagagtagttcggatttttttaaggacgttttttagttagattagggaggggagaaggagatgggg

SEQ ID NO: 3929 - DNA, 260 bp, synthetic construct
  misc_feature 1..260: note = Description of Artificial Sequence: Synthetic polynucleotide
  source 1..260: mol_type = other DNA
tagagtcgtttgtatttgttcgtattttttgggaggttgcgatgatcgtagttagggtggtcgagcgttcggtttattgtattcggcggttgttttgtagcgtttttggtatttagggaatggtttgtaaattttaatgtattatagattagtttttatcgtggagtaggaaaggcgtttattagttaggggtaatcggttttgtagatttgggcgggggcgtagggggaggggcggtggtgtaaatttatcgtgatttt

SEQ ID NO: 3930 - DNA, 239 bp, synthetic construct
  misc_feature 1..239: note = Description of Artificial Sequence: Synthetic polynucleotide
  source 1..239: mol_type = other DNA
gaaggtaagttttaaatttttgtttggaagacgggttgtcgcggttgtattattagtaggaggaggaggagaagaaattatttcgcgatattttattttgcgggtgttttgtcgttgtcgtttttgttgtcgtcgattcgagttcgcgggttcgaatatcgtagcggtggggacggtgggttcggcgggcgtcgggaggaggatattagcggagttttgtattttcgtgtttcgtttat

SEQ ID NO: 3931 - DNA, 846 bp, synthetic construct
  misc_feature 1..846: note = Description of Artificial Sequence: Synthetic polynucleotide
  source 1..846: mol_type = other DNA
gttggcgggttttggttttcgaggacgtagatatgtggtttgaattttcgtttttttagtcgttgtttttgtgtatttttttgggcgtttttagcgaatgcgagcggcgaggcgagggcgagcgcgtcgaggaagggcgggagaggcgcggagtttggtcgcgtcgcgttgcgtcgagcgtcgggtttttttcgcgagtttttcgggttcgcgcgcgcgttttttattgttttcgtttttcgcgcggcgcgtgttttttatttttcgtcgcgcgttttcgtattcgttcggttttacgcggcgcgcgtttgttttggcggtagcggcggcggcggcggcgcgttttttttcgaacgtcgtttttagggttgttggttgcgttttttattgtttcgcggttgttgttcggggtgggcggcgaggcgggggggaggtgtcggtttggtcgtcggggagggtttatcgttcgggcggatttttattgcgagagcgatgcgggtttaggcgcggcgcgcgggggttgtagggcgtttagtattgggggttgtcggcgcgcgggggtttttttttggtttttaggtattcgttgttgttgggcgtttttcgtattttcggttattatggatatttcgttttttcgtcgtttttttcgcgtatttcgggaggtcgtcggggcggtagtagcggcgcggtttcgcgggtgtttaggtgatcggttcggtagcggtagagtagtggtagtagtcgttattgtcgttgttattgcggtcgtcgtcgttggagagaggaggacgaggagggtaaggggtagaagtaggttttgttttgtttgttttagaggttatt

SEQ ID NO: 3932 - DNA, 526 bp, synthetic construct
  misc_feature 1..526: note = Description of Artificial Sequence: Synthetic polynucleotide
  source 1..526: mol_type = other DNA
tgttgttttttttcggcgttttgtttttttataattggaagtcgcgaaggcggttattgcgttgagtcgttcgttttgttggttaagtttgggcgattcgcgcggaggagggtcgggttgattgtcgtcgttgagttgttttcggacgggagcgtttgtttacggtatttattttttttagcggtggaaatgtggagaagtaagtgggaggcggtgtcgggaattgattttttttaaaacggtcggcgtcgttgttttgaaatgggcggttaagtgtttgtgggattaagggcggttttagagatgttcggaaaatcgttgttacggttagagtgcggcgtagacgcggtagagttggaggtgttcgcggtgtaggttgttgtttacgtcgtttaggttaggtgttgagggtttagttcgcgtttcggtcgaattatttttagtttcgttgagttatttcgttcgttcggtttttatcgtatcggttagaggaaagttttcgcggtttttacgtttttttatagtt

SEQ ID NO: 3933 - DNA, 201 bp, synthetic construct
  misc_feature 1..201: note = Description of Artificial Sequence: Synthetic polynucleotide
  source 1..201: mol_type = other DNA
gtttcgttcggggatttagggaggagggagagaggagggagggagtgggtagtttgggcgtacgttatcggttttcgtacgttcggtatttttcgtggcgcggcgagttaatgggatttgtatattcgaggtgtaatagtattattgtattaattattatttttattttacgtttagattgtttatttatttgcgggaaat

SEQ ID NO: 3934 - DNA, 523 bp, synthetic construct
  misc_feature 1..523: note = Description of Artificial Sequence: Synthetic polynucleotide
  source 1..523: mol_type = other DNA
tgttttgtacgcgtgtgtacggttcgtacgaggcggtcgggttcgttagttttttgattatagcggtcgcgttagggttatcggggttcgcggttgtagtcgtagttgttgtagtcgttgcggttgtcgttatttggtaggaggtatagggtatgggtgagggaggttgcggtagcggttacgagttgttgaggaagttagattgtaggtatttggggggcgttaggtagtcgtagtcgtcggtttcggcgttcgttacgtcgtattcgtttgcggcgttttcggtttcgaagagttttttgtcgggttggaagtgcgcgggcggcggtcggaagggtttttttatgcggcggcggcgtcggtagttgtttttttcgaatatgttttcgtaggtcgggtttagcgtttagtagttgtttttgcgttcgtcgtcgttttcgcgcggtattttgatgaagtattcgttgaggttgaggttgtggcggatgttattttgttagttttttttatttttttcgtagaa

SEQ ID NO: 3935 - DNA, 276 bp, synthetic construct
  misc_feature 1..276: note = Description of Artificial Sequence: Synthetic polynucleotide
  source 1..276: mol_type = other DNA
gttattttttttttttcgtgacgttacgggtcgtttcggggtgagcgtttgagtcgtttcgggttcgcgttagtgagcgcggttgttgtcggcgagttagcggcgtagcggcgggaattcgaggtcgagcgtcgcggcggtagcgttagaagcgtatttatcgggtacggcgaggcggtttacggtgcggtaggtatcgggaggcgagagtcggcgcggatagtaggcggcggttgtagttcgttggcggttgttgcgaggatgttgtttgggcgg

SEQ ID NO: 3936 - DNA, 357 bp, synthetic construct
  misc_feature 1..357: note = Description of Artificial Sequence: Synthetic polynucleotide
  source 1..357: mol_type = other DNA
aggagggaggtagggtaggtttgagggtgaaagcggtaaggatttaggtttaagttggatttgtttatttttttttgtcgtagtttttttggtttttgtgcgttttggattttcgaagttagttttttgcgtagcggattagagaggtttattcgcggacgttaatttaatttttgggcggggttcgggggttgagtagaaggcgaggtttggggagtacggataattttgagggttgtttgtgtcggggtgggagcgtagtgggtgagtttcgagttttggtttagggacggttagagtagggcgttggcgcgtcgtggggataagtaggtgtttgtttttgtttgggggaaggat

SEQ ID NO: 3937 - DNA, 278 bp, synthetic construct
  misc_feature 1..278: note = Description of Artificial Sequence: Synthetic polynucleotide
  source 1..278: mol_type = other DNA
tcgggcgttgggtagttttcgtcggtcgtcgtcggagtttttgtgtttacgtcgggggcgtcgttgtaggtttaggagaagattcgtgttttcgagtagtcgtttttaaaaattaaataaattaataagagaattaattaataggtagcgttgcgatcgttaggagcgcggagcgcgcgaggtttagcggttttttcgttaagtttttgttatcggcgcgcggtcgttcgcgttgcggtagcggcggcggcgcggttgattgcggcggtagcgcggta

SEQ ID NO: 3938 - DNA, 336 bp, synthetic construct
  misc_feature 1..336: note = Description of Artificial Sequence: Synthetic polynucleotide
  source 1..336: mol_type = other DNA
gtttcgtatgtggggtataatgaaataagagtagtttcggttagaggtttagtaaagcggaaagacggtttcgttcgtatattttttcggaaaattgaagcgttttttttgatttttaaggttagaaagatttattatttttttcgagagggcgtagttatagatttattagagagggcgggtagggtgtcggaagttagagaacggcgtttcgcgtttttttatcgttttagggcgtagaggtgtttttagtgttcggagaggttggtagtgtcggtttcgagggaagcgtggagcggacggtcgataggggatttttgtttaaattttattatt

SEQ ID NO: 3939 - DNA, 311 bp, synthetic construct
  misc_feature 1..311: note = Description of Artificial Sequence: Synthetic polynucleotide
  source 1..311: mol_type = other DNA
cgcgtgttttgttttcgtagtggtttcggcgtttaggacgtcgttggttcgcgttttttttcggaatgaaggtgtttcgtaggaaggcgttggtgttgtgcgcgggttatgtattgttgttggtgtttattatgtttaattttttggattataagtggtataaggagtcgttgtagtagtgtaatttcgatgggtcgttgggtgtcgtagcgggggtagtcggaggtagttgggggcgtttagggtcgttttcggtcgggtcgtttcgtgtttatgttcgtttggattttcgtattttttatcgttttttc

SEQ ID NO: 3940 - DNA, 201 bp, synthetic construct
  misc_feature 1..201: note = Description of Artificial Sequence: Synthetic polynucleotide
  source 1..201: mol_type = other DNA
tataggtaatagagataaggttaggaggtaaagtatatttatgtgtaaatgagacgcgttagggaatttgtaattttttgtattttcgtttttgatgtttcgatttttataattatagaattttaggtagaggtcgtcgattttttcgttttcgttaagagggattcggagtatcgaagttttttagtcggtgtcggcgtt

SEQ ID NO: 3941 - DNA, 201 bp, synthetic construct
  misc_feature 1..201: note = Description of Artificial Sequence: Synthetic polynucleotide
  source 1..201: mol_type = other DNA
aaacgtttttttagaaaataagttattaatcgtacgagagaaggagaggaaggtagtaatttaattttttgcggttcgcggttttgaagattaggaggttcgttttagtagggtgaggtttatagaatgtatcgcgtcggttgcggttttttaggggtcggttattcgagttttggaatttcgagaggcgcgaagtgggag

SEQ ID NO: 3942 - DNA, 481 bp, synthetic construct
  misc_feature 1..481: note = Description of Artificial Sequence: Synthetic polynucleotide
  source 1..481: mol_type = other DNA
cgcgattgtatttggggtagtttcgtcgcgttttagtcgtttttcggtaggaagcgtaggtgtgtgagtcgattcggagcgagtcgcgttttcgggttagcgtgggtagggcgtcgtagtttgcgtagtttcgaggatttcgcgtcgttttttcgagttagggtttttaggagcgggtcgcgtaggagacgttagagggggttgttagcggttgttgggagaacgggttacggaaatagttttttttaaagtcggggttatcgtggggtgggcgagttcgtttttttaggtcgggggcgcggattagaggggacgtgtgtagacggtcgcggttagttttatttcgttcgggcggagacgtatagttggagttggagggtcgtcgttcgttgggtttttaggggtttgaacgtttaggggtcgcggcgagtttattcggagcgagttaggtgagtaggtcgttatggcgatgcggtttcgg

SEQ ID NO: 3943 - DNA, 280 bp, synthetic construct
  misc_feature 1..280: note = Description of Artificial Sequence: Synthetic polynucleotide
  source 1..280: mol_type = other DNA
taggttttttggggttatttcgcgaggtagtcgagggcgtaattcgggcgtttggggtcggaggcggaattaggggtcggggttaggaggtaggtgtaggcggttgttaattcgtttaatttgttgcgcgggtggtcgtttagagtcgcgggtttgcggggcgtttttcgtcgtcgcgtcgtcgtttttttaggttcgggagggggcgtttagggtggagttttatttatgggttgaggttttgggcgcgcggagtcgtcgtcgttttttcggttggttt

SEQ ID NO: 3944 - DNA, 252 bp, synthetic construct
  misc_feature 1..252: note = Description of Artificial Sequence: Synthetic polynucleotide
  source 1..252: mol_type = other DNA
cggagttttagttacgaattatttaatattcgtaggttatagagcgacggaggttgaggttgtgatcgaattatcgacgtttttttgaggggtgaaagtacggtcgtggagattttaatcgagtttacgttggcgtaaaaggtaaaagtcgcgttagatttcggatgtcgttttttttttttcggttgcgcgtttgattgggtagtttttaatttagcgttttgattggataagatattaagttttttacgt

SEQ ID NO: 3945 - DNA, 239 bp, synthetic construct
  misc_feature 1..239: note = Description of Artificial Sequence: Synthetic polynucleotide
  source 1..239: mol_type = other DNA
ttatttgcgtgttgttttcgggtttcgtttcgtttcgtttcggagggatttttaggtcgggtttagatttaggagttatttggggatttcggggtggttgcgcgtcgagggggcgttagcggggacgtgagttggcgtcgagatagtttcggttttttagcgttagggttattgttaggagattttcggttagtatttacgtggggcgttttcgggagttcgaggggtttatcgtttgt

SEQ ID NO: 3946 - DNA, 405 bp, synthetic construct
  misc_feature 1..405: note = Description of Artificial Sequence: Synthetic polynucleotide
  source 1..405: mol_type = other DNA
aagtttgcggagcgggtcgcgtttttggttcgttcgggttttaagtttcgcgtcgtcgttttggcggggacggtgtagtaggcggcgggatgcggcggggcggtagtttgagcgtttcggatggttcgcggcggggcggtttgtaagagcgacgcgcggttgttgttggggcgggacgcgttgcggtcggcgttcgttttgttggttttcgtcgtgttgttgggcgtcgcgttcggtttcggtttcggtttttggtttggttgtcgcgcgggtcgttagcgtacgcgatattaggtgggtcggtcgagtagatagcggcggggcggggagcgcggggcgcgtggtttttgggttttgcgggttcggagtttcggttttgcgattttttgagtttggttgggaatt

SEQ ID NO: 3947 - DNA, 237 bp, synthetic construct
  misc_feature 1..237: note = Description of Artificial Sequence: Synthetic polynucleotide
  source 1..237: mol_type = other DNA
cgcgtacggtggtgtaggagtttcggtagtttagcgtgaggaagttcgagcgtttgttttgcgcgtcgtcgtcgtcgttattatcgtgcgttttcgggttcgagggtacggcggtcgtcgtttcgcgtagtagtagcgcgtcgttgttattttgcgagacgttgttttttaggtcgttttggtagttttcgtcgttgagagagttttgtttggtgattttgggcgatagtagtttga

SEQ ID NO: 3948 - DNA, 204 bp, synthetic construct
  misc_feature 1..204: note = Description of Artificial Sequence: Synthetic polynucleotide
  source 1..204: mol_type = other DNA
cgatcggggcggtttcgtttagggttcggggtagcggcggcgtcggcggcgttcgagttttatcggaggagagacgcgcgagagaggagtttcgtcggtgcggcggcggtaatggagaggtaagaaggagttgttgtttttttggggcgagggcggggaagtgtgagagagatttgcgagaggttttagggttgttgttcggtt

SEQ ID NO: 3949 - DNA, 224 bp, synthetic construct
  misc_feature 1..224: note = Description of Artificial Sequence: Synthetic polynucleotide
  source 1..224: mol_type = other DNA
aggattttttattggggttgagtttttttcgtttttaatagaatttttaaatataagtagtttttttttgtttttaggagtttacgaaacgttgttatatcgagcgaatgtaacgcgtatatacgtttatattcgaatagtataagtaagagatcggttgggtgtggaatagaggcgtatatcgcgtaacgtatttatagtatgtatacgcgcgtatttcgatt

SEQ ID NO: 3950 - DNA, 278 bp, synthetic construct
  misc_feature 1..278: note = Description of Artificial Sequence: Synthetic polynucleotide
  source 1..278: mol_type = other DNA
gttttttattcggcgttttttaggatttttaaagacgttcgtttagatttataggtatttatttgagtttttttgtttttttataatttcgattttttttcgtttttttttttttttaaaaaaaaaatttaaataatttttaaataatatttaataggaaagaagaaggaaaaggagcgtataggaagggcggaggcggtattcgggggggattgtttttagaggaggtcgttgtgagtcggcgacgcgaggttgggggagtgggaggtaaattcgtt

SEQ ID NO: 3951 - DNA, 232 bp, synthetic construct
  misc_feature 1..232: note = Description of Artificial Sequence: Synthetic polynucleotide
  source 1..232: mol_type = other DNA
ggtggggtaaaaagtaagacgaaatttatttagatagttttttcgatttttagaggatcgatatttttttcgagggttttaatagtggtcgtttagggttcgagggtaacggtcgaggcgttacgcggggtcgcggttcgttttggttacggaggatcggatttgttgcgtttttgtgagtttgttttatttttatttattcggtgtttttcggtacgtcgatttgtttttt

SEQ ID NO: 3952 - DNA, 331 bp, synthetic construct
  misc_feature 1..331: note = Description of Artificial Sequence: Synthetic polynucleotide
  source 1..331: mol_type = other DNA
aacgcgtttcggattttatttttgtacgtgtagttgtttttggggatgagggttatttagtttttgtcgcgggtcggggcggcgaatttggtgttggggtcgtaggttaggcggtcgtgggtcgagttggttatgattattttttcgcgggcgttttgtttgggcgagtgtttttcgtagcgttcgtatttcgtttttttcgtgtgtagtttcgcgtcgtcgtcgttcgtcgtttcggtttcggggttcggcgcgggttcggcgtaggtgatgtttacgaaggcggtgtattatttttttttttcggttacggtaaagtttaggtagagta

SEQ ID NO: 3953 - DNA, 231 bp, synthetic construct
  misc_feature 1..231: note = Description of Artificial Sequence: Synthetic polynucleotide
  source 1..231: mol_type = other DNA
gcggttatggtggtttcgggaacgggttcggggagggagggcgcgggaggacggcgagtcgggggtatcggaggggaaggcggcggcgtagatcgtggttcgttttcggggtagaggagggggtgttaggcgggattggggagaggggaaggggggtttagttttgatcgggatttatcgtttttttcgcggggcgcggggttaggcgcgtagatgcgtttagggcgtagt

SEQ ID NO: 3954 - DNA, 201 bp, synthetic construct
  misc_feature 1..201: note = Description of Artificial Sequence: Synthetic polynucleotide
  source 1..201: mol_type = other DNA
ttcgtagtggttttttttgtagtttttttgggtttcgcggttagtagtgtagttcgtggagtcgcggttttgttcgttttttttgggtggttttagtgcgcgggttgatatttatttagtcggggaaggtgaggcgagtagaggttggtgcggaatttgtcgtttttagtagcgtcggcgggttaagtttagggtcgggta

SEQ ID NO: 3955 - DNA, 201 bp, synthetic construct
  misc_feature 1..201: note = Description of Artificial Sequence: Synthetic polynucleotide
  source 1..201: mol_type = other DNA
agtttaggagttcggggcgttcgcggcgggtatgaggcggcgtcggcggttgtagtaagaggacggtatttttttcgagtattatcgttatttcgagttgcgcgaggcgttcgtgttcgtgtggttgtagtgtatcgttattagtaggatttatacggtggggcgtagtttcgagggtcgggagtttttggttatcgagtt

SEQ ID NO: 3956 - DNA, 219 bp, synthetic construct
  misc_feature 1..219: note = Description of Artificial Sequence: Synthetic polynucleotide
  source 1..219: mol_type = other DNA
cggttggcggtgtttcggcgttttatcgggcgcggtttttttaggttcgggggttcggcgttcggcggtattttttcgtaatgggagtggtttaggtcggcggcgtcgttggtatattcggggttgtaggatagggttatgttgtagtcggggggcgatatttcggggtggtcgatgagttagttatggaagtaggggttttttttatggttgtagcgg

SEQ ID NO: 3957 - DNA, 284 bp, synthetic construct
  misc_feature 1..284: note = Description of Artificial Sequence: Synthetic polynucleotide
  source 1..284: mol_type = other DNA
gcgggaggagggcggcggggcggttggcggcggcggggttcgggagcgtcgcggcgtaggattttttagagcgcgtcgggttgagcggcggcggcggcggcggcgggcgtaggggtagggtatgattgacgcgttttttgtttgcgtttatgtgagagaaagcggtcgagggagggagcgtgtcgagttcgggttgttttttttttttattttttttcggaagtcgtttttttggagtttttcgtttttttcgtttttttttcggcggttttatttttttcggt

SEQ ID NO: 3958 - DNA, 429 bp, synthetic construct
  misc_feature 1..429: note = Description of Artificial Sequence: Synthetic polynucleotide
  source 1..429: mol_type = other DNA
ttttttttcgggtcgcgatattgattcgttaacgttaatgggggttcgcgattgttgcggggacgagggcgtagagtagttttcgttacgggtcggtttacgtaggggtcgagaaagtggcggagaggcggtggtcgaggtttaggggcgagcgcgggttgagttggtttttgttgcgtttacgagcgatatttattttttcgttgcggacgtttcgcgggcgttaggttgggggttttgcgatcgatttttttcgttttcgaggtatcgtcgggttcgtttggtaggtagcgcgtttcgcgagttggagggtcgagtttcgcggggtcgtggggcgtgtgggtgaaggcgatatttcggatgcgggacgtatgaatggtggtagagtaggggtcgggattcgtttatgggttgggagagagatgtttt

SEQ ID NO: 3959 - DNA, 283 bp, synthetic construct
  misc_feature 1..283: note = Description of Artificial Sequence: Synthetic polynucleotide
  source 1..283: mol_type = other DNA
ttcgttattattgtttaatcgagaattagtaacgtttttcgtcggtttttattttacgtcggaatggatttttagaatttattgcggtcgtaagatagttcgtaagagttggttaaaatgtttttaggtgcgtgggggtttcggggttttagttggagttcgatattttgagattggcggttcgagggttgtagggtcgtttcgggcgtgcgtttatcggttttgtatttttgggtagtcgagtgtcgcggagaacgttttattttttttatcgcggtttttt

SEQ ID NO: 3960 - DNA, 241 bp, synthetic construct
  misc_feature 1..241: note = Description of Artificial Sequence: Synthetic polynucleotide
  source 1..241: mol_type = other DNA
tcgtttatatcgttttttttttgtaggtgaggaatggggtttgtttcgtttggaatgtgtttttgtcgggttttgtttgatttttattttttagtcgggacgcgcgagttttttcgtttggttgagttaaaaagggatcgcgcgtatttcgtcgttttttattacgaagcgtagatataggaggttgtagggttagtgttgcggagaattttagacggttttatagtcgtcgttattcgcg

SEQ ID NO: 3961 - DNA, 244 bp, synthetic construct
  misc_feature 1..244: note = Description of Artificial Sequence: Synthetic polynucleotide
  source 1..244: mol_type = other DNA
tcgtcgtttttatttcggggcgcgtaggtcgaggaggatttcgttgattacgaagagtttgaggatttttcgagtttgttagatattcgtagtatcgtttcggacgattttttttattttttcgaggacgaggaggagtacggcgtcgagagcgcggagagcgtttcggagggcgtttcggaaagcgtttcggagacggcgatttttttgcgcgtcgtttgcgttaataacgtggggttgttgc

SEQ ID NO: 3962 - DNA, 225 bp, synthetic construct
  misc_feature 1..225: note = Description of Artificial Sequence: Synthetic polynucleotide
  source 1..225: mol_type = other DNA
ttagttcgggaagaggcgtgcgcggcgtcgttcggttttagggtaaggttttgattttgtttaattgtagtatttttcgtttttgttgtttgagcgcggtcgcgggataagggatgttggcgggcggtaggggcgagcgtcgcgggcgagaggcggttttcgacgcgagtgcgtagcgttcggttcggcggttttttcgagttcggcgagcgtagcgttttttgt

SEQ ID NO: 3963 - DNA, 249 bp, synthetic construct
  misc_feature 1..249: note = Description of Artificial Sequence: Synthetic polynucleotide
  source 1..249: mol_type = other DNA
gagtttggggtcgtcgcggcgttcggcgtcgagcgttttcgagttgcgtttcgcgcgcggttcgcgttatttgtgtcgtcgtcgttttagtcgtcgagggcgaggtttttttcgcggcgcgcggtagttttagtttttatttaaatttcggcggtcggttcgggcgttcggttagtgagggagcgttcgtttcgtcgtcgaaatcggtttcgggtgcggagtatgtttagtgtcgtcgcgagagcggcg

SEQ ID NO: 3964 - DNA, 255 bp, synthetic construct
  misc_feature 1..255: note = Description of Artificial Sequence: Synthetic polynucleotide
  source 1..255: mol_type = other DNA
gtatagtagatggtacgagtacgtgcggcgtttagtttaggttttcggaggtagttgagttggaaatttcgacggaaagtatttataagtttttattttgcgttggtttattcgcgtgtacgtttattttttacgcgcgtttttggtttagaagcgtatagatgtttattgtttagagtcggtatcgttggggagatcgagcgatttgcgcggcgtatagtgcggcgttggtagggttttgggttttcggtcggg

SEQ ID NO: 3965 - DNA, 243 bp, synthetic construct
  misc_feature 1..243: note = Description of Artificial Sequence: Synthetic polynucleotide
  source 1..243: mol_type = other DNA
ttagtagcgtcgtcgttttttagcgtcgatgttttagtcggcggggcggttgaggggtgagggggaatttcgcgggcgggggcgagggagcgtgtgtgcgcgagcgtgtgcgcgcgcgaggggagcgcgtgcgcggtgaggacgcgcgtcggcggttggggcgggggcgggggtcggggcgtttttgtgggaagggaggggtgaaaggtcgttggttttcggtaatacggtttaggtaaacgt

SEQ ID NO: 3966 - DNA, 201 bp, synthetic construct
  misc_feature 1..201: note = Description of Artificial Sequence: Synthetic polynucleotide
  source 1..201: mol_type = other DNA
tggagagaaatgagttggagagttatatcgagttaacgcgggatacggttttcggttcgggtcgggttaggggtgggaggcggttttttatcgtaggcggcgggatttttatgcgtcgagggatttaagtttttattttatttatacgtttattcggcgtcggggcgttgcggtttcgttttacgagtttagagtaggtcg

SEQ ID NO: 3967 - DNA, 208 bp, synthetic construct
  misc_feature 1..208: note = Description of Artificial Sequence: Synthetic polynucleotide
  source 1..208: mol_type = other DNA
gtcggatatttttttttaggattattcgtattttatagtcgcgttaaaagcgttttatttttttgtttttcgtcgcgtaggttttttatcgacgttcgttcggaaggcgagagtttttacgtggttcggcgcggcgcggttttcggggatcgcgagtaataaaagttcggttcgtagtttttgtttttcgtttttttttttaattttt

SEQ ID NO: 3968 - DNA, 257 bp, synthetic construct
  misc_feature 1..257: note = Description of Artificial Sequence: Synthetic polynucleotide
  source 1..257: mol_type = other DNA
tttagtttttcgtaagtatttttttcgtttttttattttttttagtttttagtcgtcgtcgttttcgtagtttcggtttcgcgttttttcgtagtttcggcgttcgtttattcgttaggtaggcggtggtgtcgatttatttgagtagttgtttcgcgtttagttcgtcgcgcgtagtggcgtgcgtcggttggatggtttggtttatgattatttcgtcgggcgtcggtcgttttatggttagggcgagagcgtta

SEQ ID NO: 3969 - DNA, 350 bp, synthetic construct
  misc_feature 1..350: note = Description of Artificial Sequence: Synthetic polynucleotide
  source 1..350: mol_type = other DNA
gaacggtttagtttaggttttgcgttagagtatcgtattcgggggcggacggttttgtagttttttagttttttttcgtattaattagttgacgttcgggcgtattggtttttttcgttttcgttcgtacgaaagttttgttcgacgtttgtagttagtatcgttcgtattgtttagggagggtttgcgtcgagatttagtggtcgagtgagttatagagtcgttggttttggggacgttgttttttatcgttttttatcgttttttttttttttgtattttatttcggtatttcgtattttttttttcgttcggtttcgcgtattttgtttagattttataagtatttt

SEQ ID NO: 3970 - DNA, 216 bp, synthetic construct
  misc_feature 1..216: note = Description of Artificial Sequence: Synthetic polynucleotide
  source 1..216: mol_type = other DNA
attaaattaggggttgggagtttttagattgaaatgcgttttttattattaagagggagtttacgcggtcgcggggggtcgaggtagttagtcggcgtcgcggttttggggagttcgtgtaggggtgtgttttggtgtgaaatttggtaggattttgtttgggtttgtatgtagggaggggttagagattttgaaatgtattagcgggtagggtgg

SEQ ID NO: 3971 - DNA, 269 bp, synthetic construct
  misc_feature 1..269: note = Description of Artificial Sequence: Synthetic polynucleotide
  source 1..269: mol_type = other DNA
ggtattgttgttcgaacgaacgaacgaacgaacgaacgaagcggtttcgtttaggaaaaatatttttttgacgcgaagttacggttgaagtttcgggttacgtagaggggttagtaattttatgggtggtggggttttttatttttggacgtagcggggagtagcgggcggtttttttttttgtttattttttttgggggtgggggagttttgtgttattcgacgttgcgaggggttgttacgggttttttaggttgtgtttttcgcgg

SEQ ID NO: 3972 - DNA, 258 bp, synthetic construct
  misc_feature 1..258: note = Description of Artificial Sequence: Synthetic polynucleotide
  source 1..258: mol_type = other DNA
agatcgggtttttgttcgttttttttttgcgtttcgggatgaggtagagattgaatagtcggcgagtaaattaacggtatttagaaagttatgtcggattcggcgtttagcgtttaagcgttaattcgttgaaagttttttagcgaaattttagggacgatttggatttcgttgagaggaattgtttttgagtgagatggttttagaggtttggaggagcggattggtaagtatcgggagggtagtgggagttttgtt

SEQ ID NO: 3973 - DNA, 224 bp, synthetic construct
  misc_feature 1..224: note = Description of Artificial Sequence: Synthetic polynucleotide
  source 1..224: mol_type = other DNA
tgtgttttttttttttttttttttttttttttttttcgtcgtttttttttttttttttattttttttttttgttcgttttttttttttttttcgcggtcgcggttcggatagaggttatttagcgttttttcgtagtttttcggagagtatgtgattaggtcgttagtagcgtcgcgagtgttcggtaatggtagggatggtgttttaaatatttttggaagtt

SEQ ID NO: 3974 - DNA, 256 bp, synthetic construct
  misc_feature 1..256: note = Description of Artificial Sequence: Synthetic polynucleotide
  source 1..256: mol_type = other DNA
cgttatttcgcgttagtgtttgagttgtaattgtaaattgcgcgttttggtacgagtagcggtgggggcgggtgggggaaggagcgagtgattttttaggcgtttttcgttatttgatattagttaggtagtttttagggttagagcgttagcgtcgaagttaggtttattcgggaagttatttcggtggtcgcggggtgtttatgttagtattagattttttttcggaaggaggagcggggcgggttatacggtt

SEQ ID NO: 3975 - DNA, 310 bp, synthetic construct
  misc_feature 1..310: note = Description of Artificial Sequence: Synthetic polynucleotide
  source 1..310: mol_type = other DNA
gggaaggggcgttaatagggttattatttcggggtttcgttattttttagtcgttttttttttcggagattttgtttgttaagagttttgttttttgtttcgtttagggttggggttcggtgggaattttttcgtgttcgaagggacgatttcgttagagagtttttcgatttttgtatttatcgtttttggtaggacgtggagttgttcggaagttatttcgggttggtttttttattcgtgtgttacgatttttcggcgggtttttgtcgttcgagtgtttttatcgttagttttcggagcggcggag

SEQ ID NO: 3976 - DNA, 410 bp, synthetic construct
  misc_feature 1..410: note = Description of Artificial Sequence: Synthetic polynucleotide
  source 1..410: mol_type = other DNA
aggataattgggacgggttggatttatatttgatattcgggaaatttttagagcgtgtggtgtttttgttagcggtagttattggtggagttgaggttatcgttattgtcgtcgttggcgttttgtttttggaattttttagtaagatggtatttattgtttgttttttttcgattagtatttttagtcgcgttttttttttttcgggatacgtattagttatatattgtggggagaagatgggttatgtaaatgtaagttaacgcgtttttttagttatttttgtataatgtaataggaatagcgattcgcgcgtacgaatcgggtagtgtgcgcgtgtgtgtgttcgcgtgtgtgagcgcgtgtgttagcgtgcgttttcgcgcgggcgtgcgtttgggtggattttt

SEQ ID NO: 3977 - DNA, 274 bp, synthetic construct
  misc_feature 1..274: note = Description of Artificial Sequence: Synthetic polynucleotide
  source 1..274: mol_type = other DNA
ttggggttagttttttttttttatcgtcgtcgtttttttatttatttcgcgtttattttataattatttcgtttggttttttttcggttttatttttatgcgtttttattatttttttaaatattgtagtaagttgtagtaaggcgggtaaatatcgatagcgcgcgtgggggcgggcggcgggcgtcgcggggtttatttttttttcggttttttcgcgttttcgtcgtttttcgcgttggtttttatcgtatgagtagcgttttttcggttt

SEQ ID NO: 3978 - DNA, 201 bp, synthetic construct
  misc_feature 1..201: note = Description of Artificial Sequence: Synthetic polynucleotide
  source 1..201: mol_type = other DNA
tttttggttggcgggcgtttcgtcggtcgtcggttttttttttgaaattcgtcggcgtatatgaggtcgttgttttcgtcgtaggcgttggcggttttttcgcggtgttcgtggtgatgttatgtttcgttattacgcgggaggagaggagggcggcgtcgtcgggttttgggtgaagagcggcgtagcggcggcggcggc

SEQ ID NO: 3979 - DNA, 265 bp, synthetic construct
  misc_feature 1..265: note = Description of Artificial Sequence: Synthetic polynucleotide
  source 1..265: mol_type = other DNA
ttttcgtggtaggcggtagcgagttgggttcggggtcgggttgagttttgggatcgcgttgcgtagttttcgagtcgttcgttatttggttgcggtcgcgcggttatttgtttttcgttttcggggcgtcgtttagtttcgcgttaggcgttttttttagcgttcgtcgttttttttcggcgagattattcgggcgcgtttcgttcgtcggttttcgatgtaaatagttgggtttcgtaggcggttggtttcgcgtttttcggtt

SEQ ID NO: 3980 - DNA, 201 bp, synthetic construct
  misc_feature 1..201: note = Description of Artificial Sequence: Synthetic polynucleotide
  source 1..201: mol_type = other DNA
attattattattttaagtgtttgttcgttggggattcgtcgtcgtcgtcgtcgtttggtttgttttgttttggggttttgcgcggtttttttttgtttttcgttttttcggaagaggcgttcgtttttaagtacgtggagcgcgtttcgttcgtagtcgtcgcgttgttaggagcgcgttatgcgtagttgttttttgcgt

SEQ ID NO: 3981 - DNA, 362 bp, synthetic construct
  misc_feature 1..362: note = Description of Artificial Sequence: Synthetic polynucleotide
  source 1..362: mol_type = other DNA
tttggcggggagtttgggtagcgtcgattaaagttcggagcggtagtttcggggcgcgggacgcggggtatacgggtttagttgttcgacgggagttcgacgcgcgtttttcggcgggtcggcgggttcggaagtttcgttgttcgggtcgggtttttaagttcgtagtcgttttgattaaaataggtatcgcgacggcggcggtaggcggcggtagttagggttggggtcgtatcgcgtacgcgtatgcgttcgtcgtttcgcgtttttcggcgggcggagttcggcgtcgcggttaggattttttatttcgttttcgcgatttcgttgcgggtttgtatattcgaggattcggtttgaaa

SEQ ID NO: 3982 - DNA, 298 bp, synthetic construct
  misc_feature 1..298: note = Description of Artificial Sequence: Synthetic polynucleotide
  source 1..298: mol_type = other DNA
gttttcgttttttatcgttttttttcgtttcgtagttttcgagtggcgttagtacgttcgtcgggtatgggttttaaatgtttattagcgggagtttaggcgtttttgttttggagcgcggtcgggagtaaaatcgtaggagtgggagggtagcgagttagttggatttcgagtcgcggagcgcgttggttttgtttcgtttgatgattttagagcgcgggtttaagcgtcgtttatgtagtatttttgagtttcggggaaggagagttaatgaaaaaatatttaatcgttttcgttg

SEQ ID NO: 3983 - DNA, 295 bp, synthetic construct
  misc_feature 1..295: note = Description of Artificial Sequence: Synthetic polynucleotide
  source 1..295: mol_type = other DNA
gagcggcgcggagagcggtaggggcgaaatttcgcgggttagatgttcgagggcgcggcggcgttgttaggttgtcgttgttgtttttgcgggtttcgagcgcgttttcgtaggcggtattgttcgcggcgcggcgtgtgtatcgagcgagtgaaggtatgtgtggcgggcgcggttggagttgtcgtcgtcgtcgtcgtcgtgttagtaggttttaatgtttgttattttttaggacgttggtagtagtagtagttcggagttttcgagttttcggtaggtttgcgtgtttttt

SEQ ID NO: 3984 - DNA, 203 bp, synthetic construct
  misc_feature 1..203: note = Description of Artificial Sequence: Synthetic polynucleotide
  source 1..203: mol_type = other DNA
cgaaggtatttgggatttttagacgtaggatgtttttgatcgttgagtaaatgataagggaggcgcggtcgcggtattcgtttatttagcgtaatcgtttcgcgcggggagatttcggttgggtttttaggttggatttcggtagtcgaacgttcgttattcggttaggaagttagggagcgagcgtttgcgcggtcgtattt

SEQ ID NO: 3985 - DNA, 215 bp, synthetic construct
  misc_feature 1..215: note = Description of Artificial Sequence: Synthetic polynucleotide
  source 1..215: mol_type = other DNA
cgcggatcggtcggtttgggtttttgtagagtagattttgtttgcgttttttaggaggagtgggtggtaggattggggttttttataggttttggggcggcggcgagattggtacggttcggggtcgtaggcgcgtagttacgtttttggaagttcgtttcggttttcgtttttaattcgttttttcggggttttatggcgtgaggtttggggtt

SEQ ID NO: 3986 - DNA, 201 bp, synthetic construct
  misc_feature 1..201: note = Description of Artificial Sequence: Synthetic polynucleotide
  source 1..201: mol_type = other DNA
ggaggttgtagtcgttcgagtcggttcgggtgggggcggggtgggggcggcgcggagggtacggagattacggcggcgttattcgggatatttagggtttcgaggttttgggcggtttttacgcgagatcgtaaattatgataataggtagttattcgaggttaaataaaaacggagtgggtttttcgcgcgtcgtcgttt

SEQ ID NO: 3987 - DNA, 340 bp, synthetic construct
  misc_feature 1..340: note = Description of Artificial Sequence: Synthetic polynucleotide
  source 1..340: mol_type = other DNA
ggcggcgttgacggatgtcggtttttagggagttttaaggcggcgggtattagcgggttgattttgaagcgttgttcggagtcggagcgttattgtttggcgcggttgatggttgacgcgttgcgcggttgcgtgtttgttttttacggcgtggtggagcgcgacggcgaaagttatttgtagttgtaggatttgttcgatggtttcgacggattttgtgtgttcgattgtaaaatgggcgttaggtatgcgtgttttgttaggtcggttggggggattaagtaggggttcggggtcgggatagttgtttgagggggattcggggcgagtgttcgaaggg

SEQ ID NO: 3988 - DNA, 201 bp, synthetic construct
  misc_feature 1..201: note = Description of Artificial Sequence: Synthetic polynucleotide
  source 1..201: mol_type = other DNA
agggtttagggcgtagggcgggtttcgtacgtagggcgggcgcgcgggtatttttgtggttaggcgatttcggttcgttttttcggagtttagggattttcgaggttggcgcgggttgttcgcgataaggtgttagtagtttcgggttcgcgaggagtagtttttattcgcggttttcgagtttagttttgttttttcgtt

SEQ ID NO: 3989 - DNA, 236 bp, synthetic construct
  misc_feature 1..236: note = Description of Artificial Sequence: Synthetic polynucleotide
  source 1..236: mol_type = other DNA
tttgagtagtgtatttttttaaaggtaaagagagataagggaggaaatatagtatttaaggtgattagtcgattggatattgttgatggtatatttttttcgtttttaattaatcgtataaaattcgtaatatttcgcgttttcgcggggtttttcgcgtttttggttcggttttttcggtcgtttttagtaggcgtttcgtttttcgcgggaattttgggatttggtcgagcgtt

SEQ ID NO: 3990 - DNA, 251 bp, synthetic construct
  misc_feature 1..251: note = Description of Artificial Sequence: Synthetic polynucleotide
  source 1..251: mol_type = other DNA
gttttttagtttttcgcgtatttttttgcgttcgggtttcgtcgtttcgtttagtgttggttacgggtcgtgttattagtttgtgcgttttcgttattcgcgggtcggggtatttggcgttttgtgtgggtggcgggagcggggacgtttcggtgttcggggatcgtagcgcgttggcgtttaattttgtcgtcgttcgttttggagtcgggaggttttagtcgtttaagtgtttcgggagatttaggtat

SEQ ID NO: 3991 - DNA, 201 bp, synthetic construct
  misc_feature 1..201: note = Description of Artificial Sequence: Synthetic polynucleotide
  source 1..201: mol_type = other DNA
tttcgttttcgttttattttttattggcgtaggtttaggttatcgttgttaggatttttcgttgtcgtcgtttttcgttttttttatttagattttgagtcgtttattttagtcggtgtaggtcgcggggtcgtttttgatggtttgggtattttttattttcgtttcgtttacgattatcgcggttgtttgagttgttta

SEQ ID NO: 3992 - DNA, 206 bp, synthetic construct
  misc_feature 1..206: note = Description of Artificial Sequence: Synthetic polynucleotide
  source 1..206: mol_type = other DNA
gttttcgagtgcgtagcgtgcgtttttagtttttgttgcgtttttaggtttggcgcgcgattcgagcgtagcgggtaaagttggaggaatttggcggcggcggagcgggcgtaggtttagttcgataaagttcgggggttcgggtcggggtcgttgtcgtagttcgtacgttgtttcgtgttttcgagaggttttttttttagcgt

SEQ ID NO: 3993 - DNA, 201 bp, synthetic construct
  misc_feature 1..201: note = Description of Artificial Sequence: Synthetic polynucleotide
  source 1..201: mol_type = other DNA
ggtcgtcgtttatttcgcgtatttcgttttttggaaatttagtagtcggggggcgaatatcgcggcgtttttatgggaatttggtttcgggtttagagcgcgggtagttggtagagtttggggggcgcggcggcggtagtagtaggttggagggcgcgcggcgggggttaaggggatttggtcggcgttcggagtcggagt

SEQ ID NO: 3994 - DNA, 203 bp, synthetic construct
  misc_feature 1..203: note = Description of Artificial Sequence: Synthetic polynucleotide
  source 1..203: mol_type = other DNA
gttgtaattttgggtttgggattgcggggacgggacgggtgggaagcggttaaaggcgtagcggtttttggttagagtcgtagaggtttgagacgtgggtcgcgtttcggtttaggagatttcgcggtcgcgttttaatttttagtttttcgattgcgattgcgattcgggaaaacgtttacgtttttggaaaggaagtttta

SEQ ID NO: 3995 - DNA, 216 bp, synthetic construct
  misc_feature 1..216: note = Description of Artificial Sequence: Synthetic polynucleotide
  source 1..216: mol_type = other DNA
ttggggggttgggagaacgaaaatattagttgcgtttttaatatttaaggaaggaagtggtagcggggacggggagaggatgggaaggggatgttgattgcgagttggggcgggacgcggtgatgggaggggatcgggtcgggaatgcgggaggcgaggggagcgacgggatttgtcgtttcggcggtcgggtagttaatcgattcgtttttttta

SEQ ID NO: 3996 - DNA, 335 bp, synthetic construct
  misc_feature 1..335: note = Description of Artificial Sequence: Synthetic polynucleotide
  source 1..335: mol_type = other DNA
agtgtcggagcgttcggtggtcgtcgcgtcgcgcgtttggagggatgttaacgtggagtcggcgtcgagttcgttcggcgtgcgtgcgtgtgtgggagcgcgcgagttttttgacgcggggattagttatgaatcgggggtgtgtgtttgtttttagagatttggtaaggtgcggagttttttagaagtgcggttaagcggtagcggagacggcgagttaggaattttttttcgcgtttttagttttttagcgtggcggcggaattttcggagaaagtttgtaaatttttagcgggcgcggcgaggacgtcgggttatttagggggcgggtgggc

SEQ ID NO: 3997 - DNA, 230 bp, synthetic construct
  misc_feature 1..230: note = Description of Artificial Sequence: Synthetic polynucleotide
  source 1..230: mol_type = other DNA
gagagaaagtgagaagggagagaaaagcggcggttgagtaaagcgggagtcggcgcgggcggtggggtttgattcggacgtcgcgtattcggtttcgtttcgcgtttagcgtttcgtttattttttggtcgcgtttgttttcgcgtttttttgtttttttttatttattagtagttttgttgataagcgagaaaattgataagtgagaaaagtcgtttgttagcgttcgg

SEQ ID NO: 3998 - DNA, 224 bp, synthetic construct
  misc_feature 1..224: note = Description of Artificial Sequence: Synthetic polynucleotide
  source 1..224: mol_type = other DNA
tagtatagggggtgagatggggtggtggttggtgaacgttggttattttattttatattattttattttgagagttgttataattatcggcgttatttttcgtgtattttgaggtttggttggcgagtcgttgttgggagttttttgtaaatattttttaaagtttgaaggcgggttttaaacgtaggcgtcggggattatgggagtttttaaatagttgcgtt

SEQ ID NO: 3999 - DNA, 211 bp, synthetic construct
  misc_feature 1..211: note = Description of Artificial Sequence: Synthetic polynucleotide
  source 1..211: mol_type = other DNA
ggttaattttaggtatagtttattcgagttaggcgaggtttagaaaggtttgattcgtttggtagttttaacggatttgttttcgtagtcgttgattagtcgttgacgagcggatttttcggtcgttatggcgattgtgaaatgtagggtggagcgtatgcgttcgaagttattcgcgcgggtagtttttgcgtgtttttttgcgtgtttt

SEQ ID NO: 4000 - DNA, 205 bp, synthetic construct
  misc_feature 1..205: note = Description of Artificial Sequence: Synthetic polynucleotide
  source 1..205: mol_type = other DNA
cgtgtaattcgattttttttgatttataagttttgagtgatagttttgatttggtttaatcgcgggagggaggggaaagagaaagaaagaaatttttagtcgtacgttttttttggtatttaatcgattttttggaaaaaggttttatttcggtttggtgtttcgtgttgggtggagaagtttttcgtttcgatttggtatcgtt

SEQ ID NO: 4001 - DNA, 398 bp, synthetic construct
  misc_feature 1..398: note = Description of Artificial Sequence: Synthetic polynucleotide
  source 1..398: mol_type = other DNA
tttcgttcgtttcgcgtttcgcgtttcggcgtttcgtcgttcgtcgttcgttcgtttcggcgtcgtcgttcgcgtttcggcgtttcgggtcggcgaggggcgcgttcgcggtcgcggtcgttgtatggcgttgagatggcgggggcgtcgcgcggcggaggcggcggcggaggcggcgcgggcgagttcgggggcgtcgagcgggcggtcgggataagtcgtcggcgcgggtttcgggcgtgcgacgaggagttcgtttgtttagagttggaggcgttgtttcgcggttatacgttgcggttggagtaggcggttacgttgaaggcgttggtcgtttttagtttgttggcgggcgcgttggcgttggtcgagttgttgggcgcgtcggggttcgcgtt

SEQ ID NO: 4002 - DNA, 290 bp, synthetic construct
  misc_feature 1..290: note = Description of Artificial Sequence: Synthetic polynucleotide
  source 1..290: mol_type = other DNA
atagcgggcgtttttagatattggggaaagtgttttacgatgtttcgagtttttttagtttcgttagcggggcgagcgtgagggtgtttcgatcgattagcggtttcgggtgtagggtggcgggttcggcggcgcgcgttttttttttttttttggcggttcgtacgtgtcgttcgcgtcgcgtttttacgggttacgcgcgggtttcgtagcgtcgcggtcgagtcgggttgttcggttcgcggatatagcgtcggtcgtcgtatttcgtgcggggtcgcggcgcgatg

SEQ ID NO: 4003 - DNA, 307 bp, synthetic construct
  misc_feature 1..307: note = Description of Artificial Sequence: Synthetic polynucleotide
  source 1..307: mol_type = other DNA
cgtgaaattgtttaattaagtgcgtagttatagaggaagaggcggtttttttaatatggcggggtttttgttttttagttttcgggttttgattttagttcgcgtttttattgttttatttttttcgtttttggagtttttcggtgattttattatagtttttgttattttgtgatttgtaggtattgggagatttatagggaggacggcggaatatttggaggttgggaaatggtgagtgcgtggagtgggtgtttcgagaatggggaagaggttgtttgaattcggtcggaatcggttgcggtgg

SEQ ID NO: 4004 - DNA, 212 bp, synthetic construct
  misc_feature 1..212: note = Description of Artificial Sequence: Synthetic polynucleotide
  source 1..212: mol_type = other DNA
agtgttgttaggcggaggttcgttagaaggtttcgtagttgttgaggcggggtgggattgcgttttaggggtcgcgttgaagttggcgtcgcgattattgcgtatcgatttcgtttattttttgttcgttttcgggagttttttttgttttaggacggttttttattttttaaattatgttcgttttttatttcggatttatagttattttt

SEQ ID NO: 4005 - DNA, 375 bp, synthetic construct
  misc_feature 1..375: note = Description of Artificial Sequence: Synthetic polynucleotide
  source 1..375: mol_type = other DNA
tggtttttgagtagtatcgtttagtgtagttttcgttaggaaaagtagtagaatcgatagttttagggggcgagcggggtttatggtgtagggggtcgggcggttcgttgggtaaggcgttcgagaaagcgtttggcgggaggaggtgcgcggttttttgttttaggcggttcgggtgttcgttttatgcggggcgagcgttcggtcgattttcgtcggggcggagtttgaggggtggttgatttatgtacggggattgttatttcgtcgttttcgcgttgtaaattgtgtaagagggagaggaatttttcgttaagttgaaaagttgaatttgttttttaaatttttttttgtagtttagacggggacgttttg

SEQ ID NO: 4006 - DNA, 201 bp, synthetic construct
  misc_feature 1..201: note = Description of Artificial Sequence: Synthetic polynucleotide
  source 1..201: mol_type = other DNA
ggggttgttcgtaatatgtagggaaatgagtatttcgttttgttttttatttttttttagtttttcgtggtgggtgtataggaaaaagaagggcgaaaagcgggggtaatagttagtcgtcgcgcgcgtttttagcgtcgtttttagtaatagcgttaggaggaaagtttgtcgggtttagttattgcgttttatgtcgtc

SEQ ID NO: 4007 - DNA, 356 bp, synthetic construct
  misc_feature 1..356: note = Description of Artificial Sequence: Synthetic polynucleotide
  source 1..356: mol_type = other DNA
ttggagacgtcgggacggaggagttacgcggagagaaggcgagaagaaggcggacgggagcggaacgggttcgggagcgggtttgggagcgggttttcgtcgagaagtttcgcgggagacggcggtttttaaagttattttgggtcgcgggagcgcgggatcggggttgcgggcgtcgagagcgcgtcgtttgtcgttttcgtgcgtcgtcgtcgtttttgcgcgacgtttttcggttaggtttgggaaagcgttcgtttcgttttatatttttttaaagtttcgggcgtcgcgtttttttcgtcgtcgttatacgtgtttcggtcgttttttcgttttcgcgcgtcgtttcgttc

SEQ ID NO: 4008 - DNA, 265 bp, synthetic construct
  misc_feature 1..265: note = Description of Artificial Sequence: Synthetic polynucleotide
  source 1..265: mol_type = other DNA
gtcggtttttttgtttgagtcggttgcgtttcgcgtttttcggggttcgtagtttgttagttcgggcggttcgtattcgttttgggaattcgttcgaggtcgcgaatcgttaggggttttcgcgttttttttttatttaggttttttgtttttttcgtcgcggtcgttcggtttttcgcggtagcgatagagttttatttgtagaggattttaaaatgagattaagcgaaagtggaattggtagattcgagtggtgtttggaaat

SEQ ID NO: 4009 - DNA, 697 bp, synthetic construct
  misc_feature 1..697: note = Description of Artificial Sequence: Synthetic polynucleotide
  source 1..697: mol_type = other DNA
gattttagtcgtacgttgtgcgaggtttgtaatattcgttttagtcgttacgagatttatatcgtgtataagcggtattattgcgtttcgcgttacgattcgtcgtcgcgtcgatcggtcgcgttttcgggattttttgggtcggtcgcgttttcggttttttttttcgtcgcgtttgtgcgtacgcgtagacgtcgtaagttttacgagttgtacgcggtcggcgtttcgtttttttcgtcgttcggttacgttttcgcgttcgagtcgtcgcggttcggaagcggaagcggaagcggtttcggtttcgtttttgcgcgttcgttcggtttcgcggtcgacggttttatcgatttgagtaagaagtcgcggcgttcgtttttcggagtttcggtatcggcgttggtcgattattacgagtgtacggtttgtcgcgtgagtttttatagtttcgaggtttatttggcgtataagaagtattcgtgtttcgttgcgttatcgttcggcgcgttcggtttgttcgtcgtcgtttgtttttattgtttttcgaacggttcggtgcgcggggatttgttggagtattttcgtttggcgtacggtttgttgttcggcgcgtttttggtcggttcgggggtcgaggttcggacgtcggtcgatcgcggtttttcgttcgttttcgttttcgtcgttttttcgt

SEQ ID NO: 4010 - DNA, 226 bp, synthetic construct
  misc_feature 1..226: note = Description of Artificial Sequence: Synthetic polynucleotide
  source 1..226: mol_type = other DNA
tgggaggagcgtagatatttttcggtgatagggagggttttttatttggttgttatttggaagtttatagtggtttcggcgggtaggcgggcgggtagagcgcgggttcgaacgtttttcgcgtttgcggcggcgtacgtgcggcggcggcggcggcgtcggcggcgcgggcgggatttattgggtggtcgcgcgcgttattcgcgcgttttttgcgcgtttttgt

SEQ ID NO: 4011 - DNA, 201 bp, synthetic construct
  misc_feature 1..201: note = Description of Artificial Sequence: Synthetic polynucleotide
  source 1..201: mol_type = other DNA
ttttttttatttttttaatttttagtaggatacggaatttcggcgtttttcgaaagttataaaagaggggtacggaaattttaagttcgtcgtgttaattcggagaacgtaaattcgaggtagagcgtgcgtcgtgcggggatgtgggtgtcgaggatttcgaagcgttcggtttttttcgcgatttttattttttttaga

SEQ ID NO: 4012 - DNA, 201 bp, synthetic construct
  misc_feature 1..201: note = Description of Artificial Sequence: Synthetic polynucleotide
  source 1..201: mol_type = other DNA
tatttcgttatttcggcggggtaagttcggattttattagggtaggttcgggaggttatttagggtagacgattcgaggtagagcgttttaaaattttgtcgtcgtacgtttagttagagcgtcgagcgcgtttgtttttttttcgttattttttagttttttattcgtcgattaaatttttgggggattatatttttaag

SEQ ID NO: 4013 - DNA, 215 bp, synthetic construct
  misc_feature 1..215: note = Description of Artificial Sequence: Synthetic polynucleotide
  source 1..215: mol_type = other DNA
ttgttttttagttagaacgtgaatgtattgttgacgtatattgttttgggagaagattagcgtgatgtagtgtttttatgtattagcgtcgtttttttttcgtcgtttgtttcgcggggttaacgtcggcgttttttagcgtcgcgtcggtcggcgtcgcgtagtttcgcgttttcggtcgttcgtttttttttttttttttttttttttttttt

SEQ ID NO: 4014 - DNA, 252 bp, synthetic construct
  misc_feature 1..252: note = Description of Artificial Sequence: Synthetic polynucleotide
  source 1..252: mol_type = other DNA
tgaacgtgtgcgtgtgcgcgcgtgtggttgttttttttagttttagtttcgaacgtaaatattttatcgaggtatagggaagtcgggagtagtcgaggaacgcggagggcgtcgaattagagtttgcggggtttgatagttttttttgcggcgtttaaggtgggcgtaatgtttaataaaaaggtcggaaaatggggatcgatttcgaatattttttttttttatttagtttcggagttcgagtagcggcgg

SEQ ID NO: 4015 - DNA, 203 bp, synthetic construct
  misc_feature 1..203: note = Description of Artificial Sequence: Synthetic polynucleotide
  source 1..203: mol_type = other DNA
cgtttcggcggtcgcggagggagcgtaggcggcgtcgttgtaggggtcgggcgggttggcggcggcggcggcggcggttgtaggagcgcgggtaggttcgcgcgtcgttggtaggggtagtaaatggtagttttttttcgtagtatttattcgcggttgtatcgtatcggggtattgtgggaaatttcgtttattttttcgtt

SEQ ID NO: 4016 - DNA, 201 bp, synthetic construct
  misc_feature 1..201: note = Description of Artificial Sequence: Synthetic polynucleotide
  source 1..201: mol_type = other DNA
cggcggtattcggcgtagaggttttagcgcggggagtcgggtttagtttcggtttgttagcgtcgcggttttagtttattcgaggtcggtttggggggttcgtagggcgcgcggagcgtcgagtgcgcgtcgggttgggtttcgtatttcggtgtaggagcgcgggcgcggcgcggcggagcgtttcgtatggagtcggtt

SEQ ID NO: 4017 - DNA, 201 bp, synthetic construct
  misc_feature 1..201: note = Description of Artificial Sequence: Synthetic polynucleotide
  source 1..201: mol_type = other DNA
gttgaatatcgttcgggtttagtttttatttcgcggtttggtgaagttggttttcgtgtttgtttgggaagtttttgtttggggataatcgttaggttttcgagtcgttttttttttatttttcgttgcgtcggtaattttattttttcgtttttattaacggatcggtatttaaattaaagtttagttttttggggttta

SEQ ID NO: 4018 - DNA, 201 bp, synthetic construct
  misc_feature 1..201: note = Description of Artificial Sequence: Synthetic polynucleotide
  source 1..201: mol_type = other DNA
tttcgtttttcggtagagtttttgttcgcgttaatttatttattaggttttgttcgcgttacgcgcgtttttggtaggtttggggcggggaaaggcgaagcgttgggtacgcgagggtttgtgtattttagtttttacgacgtttttggttttttttaggttcgtcgttgtcgtatttaatttttttttttcgggggttat

SEQ ID NO: 4019 - DNA, 213 bp, synthetic construct
  misc_feature 1..213: note = Description of Artificial Sequence: Synthetic polynucleotide
  source 1..213: mol_type = other DNA
tagtttatttaatattatttatgtattttgtgtaaggaattgtgggatttcgttttacggtaaataatatggaaattttaaaaatagcgatttttttgtgcgtgtttatttacgcgtttcggggtgatttggcggggttgtcgtcgggtgatttatatttttgaatcgcgaagcgatagggaaagcgcgggcgagcgtaggagacgcggtcgg

SEQ ID NO: 4020 - DNA, 385 bp, synthetic construct
  misc_feature 1..385: note = Description of Artificial Sequence: Synthetic polynucleotide
  source 1..385: mol_type = other DNA
ttattttttgtttgtttaagtcggttggttttcgtgattgattcggaataatagagtagatgtttgcgtgggaggtaagttttatttaatatttgttttgcggcgggaaggtttgggtgtttatagatagagttggagtttttcggtgggtggtatagataattagttggggttgttttatatgtaatttaattataggggaaataggtttaaatatcgggtgataagtagcgtaattgtttcgggtgattttgtaattttttttttattaattttttttataacgtatatgattgttataagggttaattaaaaagagcgtgagtggttttatgttatatgtagttggattagaaagtgttgagtatttgtttatgcgtgtaag

SEQ ID NO: 4021 - DNA, 278 bp, synthetic construct
  misc_feature 1..278: note = Description of Artificial Sequence: Synthetic polynucleotide
  source 1..278: mol_type = other DNA
ggtattgcggtttagttttcgttcggggattcgcgggtcgattgtggttttttttggggaagtcggggcgcggggaggcgtttcgggtattttagtcgtacggggtacgttcgttttcggcggggtttttcgtttcgttgtgggagtggtagtgggtgtcggggtggagaaagtacgcgtggcgcggagttttggggacgcggcgttttattcgttttggggagtttcggattttttttagtttttaggttcgtatgtttttttttttttagtgtttt

SEQ ID NO: 4022 - DNA, 248 bp, synthetic construct
  misc_feature 1..248: note = Description of Artificial Sequence: Synthetic polynucleotide
  source 1..248: mol_type = other DNA
acgcgagtcgttagcggtgggatttatcgacgatttttcggggcgataggagtagtttcgagagttagggcgagcgttcgttttaggtggtcggatcgttcgtcgcgttcgcgtcgcgttttttgtaggtaacgggagacgttttcgcgtagcgcgagcgttttagcgcggtcgttcgttttttttttcgagggataaattttttttaaattcgattcgagtttttggattaaattcgtttgcgtcga

SEQ ID NO: 4023 - DNA, 216 bp, synthetic construct
  misc_feature 1..216: note = Description of Artificial Sequence: Synthetic polynucleotide
  source 1..216: mol_type = other DNA
tataatataagggagagaaagtaacgttttggttttagaaatttttatcgttaaggttagttttggttagacgtatagttaaagagtttttttagtttagcggatgaatcgttcgcgagtggtattttttaaaattttggttttattttttaagatgtttttttattgcgtaatttagaaagtattcggatcgtcgttatttattagcggcggcga

SEQ ID NO: 4024 - DNA, 201 bp, synthetic construct
  misc_feature 1..201: note = Description of Artificial Sequence: Synthetic polynucleotide
  source 1..201: mol_type = other DNA
tgaggtgttttttttattaattttaggtatcggtttttggtggaattgtttttagattgtttgagtttttagggttaagttttttttttattttttagtacggagttttatttagaattgtatttcgaaagtttaaagtttatttatggtttttagagataggcgaaggcgaggttttttacgggacgttttggtaggtgt

SEQ ID NO: 4025 - DNA, 208 bp, synthetic construct
  misc_feature 1..208: note = Description of Artificial Sequence: Synthetic polynucleotide
  source 1..208: mol_type = other DNA
cgagtagttagggttagcgagcgattttagtagtagggacgcggtcgtgcgagagttcgcggataggcgagggggattttaggggagtagttgttgtttacgggttacgggcgatgtacggagtggagaagtgaacgtggtttataggatttttgttcggaaggtggagagcgttataggggaattttttcgatttttgttcgtttcg

SEQ ID NO: 4026 - DNA, 201 bp, synthetic construct
  misc_feature 1..201: note = Description of Artificial Sequence: Synthetic polynucleotide
  source 1..201: mol_type = other DNA
ttaggagttcggatttttgtttagttttttggcggagttaagttcgagcgtatagatttttcgagttttagcggttagggggtattgtgtgagcggttgacgttattttttcgttcggtcgaaattaggcggcgggattttatatagttgaggagagggagtcgaggtcgtgatttagggttggcgacgattaaattaagt

SEQ ID NO: 4027 - DNA, 364 bp, synthetic construct
  misc_feature 1..364: note = Description of Artificial Sequence: Synthetic polynucleotide
  source 1..364: mol_type = other DNA
gtcgcgggtgaggtttgtggttaatttcgcgttgtcgaggttttattttttcgagtttagtttgattttaggtcgtttttaggtcggtgtttagttgaggcgggaacgttgtagtttggttgagcgtgatttttaggttttgtgaggaaaagtcgagcgcgttatatcgaggcgttagtcgtttattttattataaggtaaaagatttatgttgttttagttattttaaagttgggagatatattgtattttttattagatttcgaatgtttttagtgtttgtaattttttaagaagtttttagagtagatagtttttggatcgtgggtattttttttcggggacggggattttgttgatcgtt

SEQ ID NO: 4028 - DNA, 213 bp, synthetic construct
  misc_feature 1..213: note = Description of Artificial Sequence: Synthetic polynucleotide
  source 1..213: mol_type = other DNA
gtttagtttttttttagtatgtaaagttttttgttttttttcggagttggcggaggcggtaattttttattttcgtcgtcgggggtcgggtagtagcgggcgcgcgggttagcgtttagtacggcgggtagcgtcgcgttgcgtatcgtcgtcgattatgagcgaggatagtcgcggagatagtcgcgtcgagagcgttaaggatttggagaa

SEQ ID NO: 4029 - DNA, 201 bp, synthetic construct
  misc_feature 1..201: note = Description of Artificial Sequence: Synthetic polynucleotide
  source 1..201: mol_type = other DNA
ttttttcgttacggtaatttaattggaggtagaagtcggcggggcggtcgagcggggcggggcgggagcgcggtcgtcgcgagttacggtggggagcgggcgcgggggattttggcgggtttcgggtagcgcggttgtatttatttgtgttataattgcggcgacggggggttgaggaatcggtttttttaaaagtaaatc

SEQ ID NO: 4030 - DNA, 201 bp, synthetic construct
  misc_feature 1..201: note = Description of Artificial Sequence: Synthetic polynucleotide
  source 1..201: mol_type = other DNA
ttttgggcggttgtagaggtcggtcgttcggtttggtttattttttttaggaaattttatattggagaggtaagggcgattttaaaatgtatcgttgagtcgttaagttgttatttttttttatttttttttgtttttttaaattgtatttaaaaaaaaaaaaaagttaattgtatagagtggttgggcgcgatgggtggg

SEQ ID NO: 4031 - DNA, 296 bp, synthetic construct
  misc_feature 1..296: note = Description of Artificial Sequence: Synthetic polynucleotide
  source 1..296: mol_type = other DNA
ttcgggatcgcgtttcggtcgttcgagtttttcgcgttcgtcgttttttatttcggtcgggggtttatttgggagttcgttgttttcggttagtcgttcgcgtgtgtttagggttagtagtacgtataagtgttagcgtacggtcgtcgcgtttatgtttaatgcgggtttcgttgggcgtgcgggcgtgcggggcgcggggattcgatcgatcggtcgttttcgtaggcgttgttcgttgttcgtcgtttcgttatcgttcgggttttcgagtcgtttagttagttcggttgatg

SEQ ID NO: 4032 - DNA, 201 bp, synthetic construct
  misc_feature 1..201: note = Description of Artificial Sequence: Synthetic polynucleotide
  source 1..201: mol_type = other DNA
ttttgtttggcggtttttgcgttcggggttgttgagttcggggttcgttttgaggtcgcggttgtggtttttggttttttcggttcgcgttattgtcgcgcggcgttcgttgtattttgttttttttgcggtttcgtatgtttttggtggaatttagttcggcggacgacgaggaggatgagatggaagtttgttggaaat

SEQ ID NO: 4033 - DNA, 297 bp, synthetic construct
  misc_feature 1..297: note = Description of Artificial Sequence: Synthetic polynucleotide
  source 1..297: mol_type = other DNA
ggggagggaggcgcggcgcgggaggaggaggggcgtagtcgcggagttagtggtttcgtttggacgcgttgttttttagatattttcggagttttagtcgcgcggatcgcgcgttttcgtcgttttgtttttaaatttttgtcgtagtttttttttaagttagcgaatttattttttaaaattagaaattgaatttcggtacgggaaaggagttcgcggaggagtaaaattatagtagagtaagaagagttttagagagtagttttttcggagtattaatttcgtgtcgggagtgta

SEQ ID NO: 4034 - DNA, 268 bp, synthetic construct
  misc_feature 1..268: note = Description of Artificial Sequence: Synthetic polynucleotide
  source 1..268: mol_type = other DNA
tcgcgttcgggaggggcggttgtcgttcgcggggcgttcgcggtgttcgggtttgggtagcgaggaggtgacgtcgttttcgcgggatgagttcgggaggcggaggggcggaggaggtgttggcggcggtattgagcggcggcggcgtagggcgcgcgggtttttcgcgtcgattttatcgatttaaggggcggcggcggtggcggcggttgagcgattttgggtcgggcgcgtgatgaggaggggtcggcgttagatttcgttgtac

SEQ ID NO: 4035 - DNA, 201 bp, synthetic construct
  misc_feature 1..201: note = Description of Artificial Sequence: Synthetic polynucleotide
  source 1..201: mol_type = other DNA
ttgagtagtcgaagggataattagatagttatagatagatagacggttagttcgagtttcgggtaggagagaggttgcgaggagtagtttatgtttgtttcgtttagttttcgcgttttcgggttgtttttttaatttcgattcgcgtacgttgcgagttttcggcgttgtcgtttagtcggaggggtagtttcgtttttt

SEQ ID NO: 4036 - DNA, 201 bp, synthetic construct
  misc_feature 1..201: note = Description of Artificial Sequence: Synthetic polynucleotide
  source 1..201: mol_type = other DNA
cgcgattagtattttttcgttacgaatttgagagataagaagcgaaaatagggtgtgtgggggatggagagagtttcggggaggtagttgcgttttcgtacgttttaatttaaagaagagagggaaggaggaagcgaatttattgtttagtacgagtcgcggagcggtttaatttagagcgggtagttgcggacgagttgg

SEQ ID NO: 4037 - DNA, 201 bp, synthetic construct
  misc_feature 1..201: note = Description of Artificial Sequence: Synthetic polynucleotide
  source 1..201: mol_type = other DNA
ttttgtgcgagtaaagtcgggagagcgagttttaagtatttggtagcggtgtttttagtaggcgtcgaggaattcggttatttatttttggtgaattttgcgtttattgaggtattcgaggtacggatgtgttcgtttagtattcggagacgaaggagagagagcggggatatgcgttttagttttgttaggttttagggt

SEQ ID NO: 4038 - DNA, 201 bp, synthetic construct
  misc_feature 1..201: note = Description of Artificial Sequence: Synthetic polynucleotide
  source 1..201: mol_type = other DNA
tttttttttttcgcgtatttcgtggttcgattcgagggcgtcgaatacggcggcgtttattagtaggtaggtgaaggtgtagacgatgagggatagagttcgtacgttttgtttttttatggtcgttagtaaggagtcggcgcggggggtatgtttcgtaggtttatagtcgcgcgcgttttattgtagcgttcggcggtc

SEQ ID NO: 4039 - DNA, 302 bp, synthetic construct
  misc_feature 1..302: note = Description of Artificial Sequence: Synthetic polynucleotide
  source 1..302: mol_type = other DNA
cgtttattcgggcgcgcgggtgcgtagcggggttttcgtcgggcgtcggtcggtgcgcgaagtttgttcggtttaatttttaaggcgcgggagcggggcgcggttttaggacggtagggatcgcgatggagcggtttcgggggcggtcgggggacggcgcggtggcggtcggttagttcgttttttcgggggcggcgggcgcggcggcggcggcgggaggggtttcgcgggtttcgcggagtagcggggcggacgcgggcgtatgagtcgcgcgggggtcggggtttttcggcgttcgggcg

SEQ ID NO: 4040 - DNA, 201 bp, synthetic construct
  misc_feature 1..201: note = Description of Artificial Sequence: Synthetic polynucleotide
  source 1..201: mol_type = other DNA
tcggtggtcgcgttcgtgaaatggggacgcgggttttgttttcggattttttttagttttcgatttttcgtatttgtttcgagatttaacgtgttcggttcgtagcgtgttgggtttgcggcgttagggtggttcgagtttcgagattatttgcgtttgcggatatagtcgcggggtttggtatgaagggttttagggagg

SEQ ID NO: 4041 - DNA, 220 bp, synthetic construct
  misc_feature 1..220: note = Description of Artificial Sequence: Synthetic polynucleotide
  source 1..220: mol_type = other DNA
gcggggcgggcgattgtcgggtttcgggttagttttcgtttttcgtttcgttttcgatcgttcggttttttcgttcggcgttttttcgggttgcgtttcgcggtttttggcggcggcggcggcgggcgtagagcgcggtatgggcgttcgggtcgcggggtttggcggcggcgggcggacgggcgcgcggttgcgggcgtaggtgcggggcggcgggtcg

SEQ ID NO: 4042 - DNA, 347 bp, synthetic construct
  misc_feature 1..347: note = Description of Artificial Sequence: Synthetic polynucleotide
  source 1..347: mol_type = other DNA
tatcgtttcgggtgcggcggttttaagcggagatttgagcgcggcgggtcgagttttttaatttgttggcgttgttttttttttttcggcggtgcgcgggcggcgttttaaaggggaggattttgcggcgcgggtaagaggcggcgggagcgcgcggttcgggagtgtggttgtagtgcgtcgggatattagggtttcgcgtttcgtatttaagaggttttcgcgttttaatttttcgcgttcgcgcgttcgcggatttaggtcgaggatcgaaaggggtcgttcgagttttcggggtcggcgtttagagagtttagtaaggtcggtcgttttgtcggtgtgtcgtc

SEQ ID NO: 4043 - DNA, 201 bp, synthetic construct
  misc_feature 1..201: note = Description of Artificial Sequence: Synthetic polynucleotide
  source 1..201: mol_type = other DNA
tggtattaggtttttttatgggtatcggagtaggcggataggggtggggtttcgcgagcgatacggaagggttagtgtggcggagcggattttgtggaggcggggttattgtgtttttgagaagggttttcgggggtggagtttattaaggttgcgggggcgtggttacggagcggagttaataaaagcggggcgtgtacg

SEQ ID NO: 4044 - DNA, 201 bp, synthetic construct
  misc_feature 1..201: note = Description of Artificial Sequence: Synthetic polynucleotide
  source 1..201: mol_type = other DNA
cgttttggtatcgggggcggcggcgtagaggtcgggaggaagaaattcgggttttggtttaggtcgggtttttatttttgcgattcgcgagaggtttaggcgggaaaggcggcgagtggcgttagcggtttcgaaagtaaatttggttcggtgttattgttcgagggtcgtcgggcgcgttttttaattttttcgagtttg

SEQ ID NO: 4045 - DNA, 225 bp, synthetic construct
  misc_feature 1..225: note = Description of Artificial Sequence: Synthetic polynucleotide
  source 1..225: mol_type = other DNA
agtgcgtacgttgtaggaattacggttacgtttcgtcgtttaagggttataagcgtttttgtatgtggcgcgattgttagtgtaagaagtgtaatttgatcgtcgagaggtagcgcgtgatggtcgcgtaggtgggtgcgggcgtgcgggagttcgggtttagttttagtttttttttttttttttttttttagatggagtttcgttcggttgtttaggttgtag

SEQ ID NO: 4046 - DNA, 318 bp, synthetic construct
  misc_feature 1..318: note = Description of Artificial Sequence: Synthetic polynucleotide
  source 1..318: mol_type = other DNA
gttgttaatttattcgggagttcggggtatgaacggttacggttttttttatttgtatatgggcggttcggtgtcgtagtcgttacgggcgtttttgtagcgtacgtttaagtgcgcgcgttgtcgtaattatggcgttttgttttggtttaagggttataagcgttattgtcgttttaaggattgtatttgcgagaagtgtatttttattatcgagcggtagcgggttatggttgcgtaggtggcgttgcgtcggtagtaggttaacgagagtttggagagttttattttcgattcgttgcgcgttttgttagggtt

SEQ ID NO: 4047 - DNA, 265 bp, synthetic construct
  misc_feature 1..265: note = Description of Artificial Sequence: Synthetic polynucleotide
  source 1..265: mol_type = other DNA
aggaaggggagcgtagtttgtagattgaagttagtggcgttgcgttgaatgtaattgcgcgcgttcgtcgggtgagttagcgatttgagttaggcgggggcggttcgatttttttcgtttagtttgggttagaggaagtcgaaagcggttttagtaaggtgaggcgttcgaggttgtagaagatcgagtagaattttgtagagttcgggatgtgttgggttaggtcgttgaggatttgattggttttttttttttttttttttat

SEQ ID NO: 4048 - DNA, 259 bp, synthetic construct
  misc_feature 1..259: note = Description of Artificial Sequence: Synthetic polynucleotide
  source 1..259: mol_type = other DNA
cggaggggaggtcgcggagggtcgggtggaggtttttatcgttagttttaaggtttgtagtatttttttttggtttttgtttttagggtcgatgtgttttcgagcgaagtcgtcgtgtttgggtagaaggcgttttaggaggcgcgaggttttagtcgcggcgttgttttcgtcgttattgttgttgtttcggtttcgcggcgtttagtacggtttcgattttttagttaggcggcggtcgttttcgatttcgcggttt

SEQ ID NO: 4049 - DNA, 201 bp, synthetic construct
  misc_feature 1..201: note = Description of Artificial Sequence: Synthetic polynucleotide
  source 1..201: mol_type = other DNA
gacggggtatcggtattaattagcggttcgtttcggggttttcgcggttaaggcgagaacgtaggattaggagtattgttgtttattttttatcgtaattcgtatatttcgggattacgtaacggcggatggggcgttcgggagcggtttttgtaggggagagtaataggttttcgcgttttggaggtttggtttgcgttt

SEQ ID NO: 4050 - DNA, 323 bp, synthetic construct
  misc_feature 1..323: note = Description of Artificial Sequence: Synthetic polynucleotide
  source 1..323: mol_type = other DNA
ttttcgcgattttatcggggaaatatcgcggatagtcgggttagtagcgttcggagtttattttaggtttttaaatttgtagtattttttagagcgcgcgcgttcggagcgggatttgtttgttttagtgtacgtcgcggagcgaattatcgggttggcgggggtggaggggtgtaggcgtgggggttgcgggtcgttcgggttttgggttttttttgtcgtcgtcgtcgtttttcgttttcggttaggagtcgcgcgtgacgcggttcgtcgtaggagtttcgaaggcgcggcgtcggcgagttttttttcggtaggcgcgt

SEQ ID NO: 4051 - DNA, 201 bp, synthetic construct
  misc_feature 1..201: note = Description of Artificial Sequence: Synthetic polynucleotide
  source 1..201: mol_type = other DNA
agtcgttttcgtatttttcgttatagttttcgtagtaatcgttttagtagtcgtagttttagtagtcgttttatttcggtaagatgtaggaggcggcggtcgtggcggcggcggcggcggcggtcgcggtagtcgcggtgggtagcgtgggacgtttgttttagtttttattttacgggttgggttcggtcgtcgtcgttg

SEQ ID NO: 4052 - DNA, 355 bp, synthetic construct
  misc_feature 1..355: note = Description of Artificial Sequence: Synthetic polynucleotide
  source 1..355: mol_type = other DNA
gcgaatataattgttttagttataggcgaggtttggttaaggtgtgggcgtatttggggtaggttttgagaggtttagcgttcggtggtgcggatagaggcggggtatcgcggcgttcgtcgtcgttttttcgtaggtgattatttttttgtaggtgttttcgggttttaggtggttgcgtgtttgcgttatggttgatattttgggcgagcggtatttggtgatttgtaagggcgcgacggtggaggtcgaggcggcgttgtagaataaggtggtggtattgtatttcgcggcggttcggtgcgcgtcgagtcgcgattttacgtcgttgttttgcgatttttatacggcgttg

SEQ ID NO: 4053 - DNA, 201 bp, synthetic construct
  misc_feature 1..201: note = Description of Artificial Sequence: Synthetic polynucleotide
  source 1..201: mol_type = other DNA
ttcgcgcggagcgattgtgaggggttttgttggaatttggtagcgcggaggtttggagagaagttttatgttggtttttatttagtcggttcgtttttttcgagttttggaagttttatttagtcgtgtatttaatggttttataaagttgattataagttttagcgtatttttgaaggagttaaaagcgacgtaggtgta

SEQ ID NO: 4054 - DNA, 290 bp, synthetic construct
  misc_feature 1..290: note = Description of Artificial Sequence: Synthetic polynucleotide
  source 1..290: mol_type = other DNA
gatattttgtggagtaggtggtttaggttgtcgggtttatcgtcgggcgttttgcgtagcgtttcgtcggatattaagtagggagtcgtcgtcggggtcgcgcgcgtcgtcgaaattttgttttcgtcgtcgtttatcgataggttgtggagaaggttatcgatcgatgttatcgagttatttttgaagcggttatatttggtgcgtggaagtatgttttttcgtgggttcgttgtattcgttcgggcgttgttggtgtcggtttcggcgcgggttgtcgcgtatagtag

SEQ ID NO: 4055 - DNA, 201 bp, synthetic construct
  misc_feature 1..201: note = Description of Artificial Sequence: Synthetic polynucleotide
  source 1..201: mol_type = other DNA
tagagattgtagttttcgtcgggttggatgcgagttttttaggttagagtttagaagcgcgttgggatttgggtttggtttttgggtttgtgttttttttcgtttggttttaattgttcgtatttaagattataataaaaaggtttaggaagtaaattttttggacgcggaagggtcggttcgcgggttttcgtcgagtga

SEQ ID NO: 4056 - DNA, 201 bp, synthetic construct
  misc_feature 1..201: note = Description of Artificial Sequence: Synthetic polynucleotide
  source 1..201: mol_type = other DNA
agaggtcggttcgtcgcgcgggagatattttttttaaagtggaagcgttgcgtgggtagtagcgcgggtcgggttttcggattttagtttttgttgttttcgagattttcgtttcgcgtcgtatttttcgagtttagcgttttcgggttgcgttgggcgtagtggttttcggttagggcgtagtcggtttgggcgttagag

SEQ ID NO: 4057 - DNA, 288 bp, synthetic construct
  misc_feature 1..288: note = Description of Artificial Sequence: Synthetic polynucleotide
  source 1..288: mol_type = other DNA
cgatgtagtttagaattcgcgatttagttcggtttattatagtttttagtagcgatattcgtagttttcgattttttagatcgagtgagtttaattaagtcgttattcgcgtgttagtagttgggcgtttcgattttttagatcgcgtgagtttagtaaagcggttaggcgcgcgtttgtagttcggcgttagttcggatttcgggagtcgttttcgagttcgcgtggacggtagagggcggttgtagttcgggcgtaggcgtcgttggtttgcgggtttttttgggt

SEQ ID NO: 4058 - DNA, 212 bp, synthetic construct
  misc_feature 1..212: note = Description of Artificial Sequence: Synthetic polynucleotide
  source 1..212: mol_type = other DNA
ttatttttcgttgcgggaaggggttgtttggttgtttttgggggtttttagagttattttggtttcgggggattggaggaggaggttatttattttgcgtcgtttttaattcgtgtattattatttattaaatagagatagattttgggttttttaaagacggatgattgggggtggtgattggtttatttttaaatatttattacgtaagg

SEQ ID NO: 4059 - DNA, 201 bp, synthetic construct
  misc_feature 1..201: note = Description of Artificial Sequence: Synthetic polynucleotide
  source 1..201: mol_type = other DNA
agtagtagtaggagtagcgacgtttagattttcgggtgttgtcggggcggtcgcgttattcgtgcgtatagatttcgtagttaggtcgttcgggtcgtagcgggggcgtcgcgggcgcgggtcgggattgagttttcgtcgaggttattagtacgcgttcgcgtagtcgcggagtttttcgtattttcgtttttttgtttc

SEQ ID NO: 4060 - DNA, 246 bp, synthetic construct
  misc_feature 1..246: note = Description of Artificial Sequence: Synthetic polynucleotide
  source 1..246: mol_type = other DNA
gcggggatattttcgggggtttcgggcgcggtttcggggaagaggcggaagttgaaattgcgcgacggggatatttgttgaaaggtcgtttagttcgaaacgagcgttagattttagtaataaaaggttaggcgaggttatatcgcgttggagatagagcggttgtttcggagcgtaggcggcggttcgggcgggaagaggcgttgggcggtcggattcgtagaggggcgtgcgcggagttgggcg

SEQ ID NO: 4061 - DNA, 201 bp, synthetic construct
  misc_feature 1..201: note = Description of Artificial Sequence: Synthetic polynucleotide
  source 1..201: mol_type = other DNA
ggcgttgtatcgtttttgcggttttagaggttcgcgggtgtttgggcgcgggtggcgggcgggtcgggggtttgcgggcgtgtttgtgcgagagttgtttcgcgagcggcgtagagatattcgggcgagttgagagttttattttgttttatcggtggaatgggtatattcggaaggcgtagttgttttatttttgggagg

SEQ ID NO: 4062 - DNA, 201 bp, synthetic construct
  misc_feature 1..201: note = Description of Artificial Sequence: Synthetic polynucleotide
  source 1..201: mol_type = other DNA
ggttgcgcgacgtttttcgtcgttgggggagattagtaaagttattcgtttttggatttcggggtttgggtttttagatttcgtttcgcggcgggagatgcgtttgagttttttatagacggagcgcgttttagtttgacgtagagggatgaatagataagcgtatcgggcgggaatttcgattgtttgtgtatttggggt

SEQ ID NO: 4063 - DNA, 358 bp, synthetic construct
  misc_feature 1..358: note = Description of Artificial Sequence: Synthetic polynucleotide
  source 1..358: mol_type = other DNA
gatatttagcggttttagggtgaatttcgatcgtagtcgtcgtcgtttcgggtagagtttgcgtttttgttttgcgtttcgggcgttgaagtcgggcgggcgatgttcgcggcgtgaaagcgttcgcggcgggcgtcgatttttgttttagttttttgtttttttcgtttcgtttgtttcgtgtttttgtgattttggttttggcgtcgtcgtttaggcgtttcgtaatgtagttgtttttgcgtttcggcgggaggcgttttgtttcgcgagcgttcggggttcggagttcggtttgggggtttagtcgagttcgggcggggtcggggtcgcggtggcgatgtatcgggttcgttag

SEQ ID NO: 4064 - DNA, 201 bp, synthetic construct
  misc_feature 1..201: note = Description of Artificial Sequence: Synthetic polynucleotide
  source 1..201: mol_type = other DNA
cggtcgggttttttggagagggagtgtaaggaggagtagtgttttttcgaggaggttcgggagatttttaaggacgcggagaggacggtgagtttagtttcggggcgtttcgcgtcgcggatattgtaggcggcggtgaattaggtcgcgtggggtcgtttgcgtttttttggttgcggttgtgggcggcgaatacgtagc

SEQ ID NO: 4065 - DNA, 201 bp, synthetic construct
  misc_feature 1..201: note = Description of Artificial Sequence: Synthetic polynucleotide
  source 1..201: mol_type = other DNA
gttcgggacgcgagagggggcgcgacggcggttgcggtcggttcggcgtttatttggtcgtttttgcgagtagcgtttcgcgtttcgttcgcgcggagttcgtatttttcggtcgcgtcgtcgtcgtcggcgaggagtcgtattcgggcgtagcgtcgttcgttcgcgatgacggtcgttcgggtcggggacggggaggcg

SEQ ID NO: 4066 - DNA, 201 bp, synthetic construct
  misc_feature 1..201: note = Description of Artificial Sequence: Synthetic polynucleotide
  source 1..201: mol_type = other DNA
agagagaattcgaggttgtttttgtcgttgaaatttgagcgggagagtatttcgaagtcgtttgcgtggagcgagtagttttcgcgttatgggttagaggcgttcgggagaatttgcgggttacggattatattcgtaggggtttggcggagtaaggtgtcgttcgtcgtttgcgggtaggagtcggttttgggtttcggt

SEQ ID NO: 4067 - DNA, 277 bp, synthetic construct
  misc_feature 1..277: note = Description of Artificial Sequence: Synthetic polynucleotide
  source 1..277: mol_type = other DNA
tcgtagagatttagttttgtttgtcgattggtttttcgacgtcgtcgtcgtgtttgagtttcgttgtttgttcggataagtagaatttcggtaggcgtagcgggcgtcgaggtttgggttttagtcgtggcgttcgtttcggcgtagtggggagtcgcgggcgtcggagaagcggtcgcgttgtttcgggttattgtatcggttgaaaaaattaaaagtaaaattaatatttagaaacgaagtttgcgtgttttcgggggtttcgttttgttttttt

SEQ ID NO: 4068 - DNA, 201 bp, synthetic construct
  misc_feature 1..201: note = Description of Artificial Sequence: Synthetic polynucleotide
  source 1..201: mol_type = other DNA
agttagtggaatcggagggggatttcggaggaatttgtttttgatgtttcggttttttggttttttattagaattcgtagaggattcgttttggagttttcgtgcgttttggtagaggtcggggacgttagagtgtacgtagttttttgcgcgtcgagtttaggtttcgggcgtagggaggatcgggttgagagtagggtg

SEQ ID NO: 4069 - DNA, 247 bp, synthetic construct
  misc_feature 1..247: note = Description of Artificial Sequence: Synthetic polynucleotide
  source 1..247: mol_type = other DNA
gtaagggtcgggagtttggttttttatgaagttgttttaggtcgggattagttttagtttcgacggtcgttgcggtttcgtttcggtagtttcgtgagttcgcggaggagtttcgtattcgatcgtgtatagcgatcgagttggcgcggttcgtatgaagcgaagcgtcggttttagtagcgtagtttgagtaggggattcgcgtggtaattagggttgcgcgcgagttcggggcgattgtggcggt

SEQ ID NO: 4070 - DNA, 201 bp, synthetic construct
  misc_feature 1..201: note = Description of Artificial Sequence: Synthetic polynucleotide
  source 1..201: mol_type = other DNA
ttttcgcgcgtagttcgcgtagcgtttagagtcggacggcgtttttcggtggcggcggaggagttcggagggacgtagtcgggtaaggtagggcgtagggcgggcggcgcgaggcgtagggcgcggcgggtagaggttatttggttattttttttggcgttcggggaaggtgcggcgatggtcggggcgcgcggggcggcg

SEQ ID NO: 4071 - DNA, 201 bp, synthetic construct
  misc_feature 1..201: note = Description of Artificial Sequence: Synthetic polynucleotide
  source 1..201: mol_type = other DNA
cgttaggttcgttttcgttcggtcgttcgttcgttcggtgggtcgcggtggtcgcgggttgcgttgcgcgggtcgggtttggcgggtcgggggttgcgcgcgttcgcgagggcgttcgacgcgggttgaggggcgttggcgtgtgttcgtaggcggttttgcgcgggggacggcgcgtttttggatatcgtcggttttaag

SEQ ID NO: 4072 - DNA, 201 bp, synthetic construct
  misc_feature 1..201: note = Description of Artificial Sequence: Synthetic polynucleotide
  source 1..201: mol_type = other DNA
ttttcgagtttcgcgattttttcgtttatcggggaaggagattttagcgtcgttgttttgttttttttgaacgttgtttttgttcgatttggagtcgtcgcgggagcgttttatgttgcggaaatattgtttttagcgttgtcggtcggcgtttttttttagttttttttttttggttcggcggttttggaattaaatttg

SEQ ID NO: 4073 - DNA, 356 bp, synthetic construct
  misc_feature 1..356: note = Description of Artificial Sequence: Synthetic polynucleotide
  source 1..356: mol_type = other DNA
aatacggagtacgaatataagtaggtatcgtatatttgcgagttattcgggttttcgggggaaggtaaaaagttttaataagttttaagtaagattaggacgtttttatagttttgttttgatagttaaggaaaaaatttgttaaaaattagaggcgttgttgagtgttggcgtgggaatgttagtttagttagagttttgttttgggttatttaaataaaaatagatatgttggtggtaaatgttagttgaatacgtaggagagcggtgtttttcgggttcggagaagggtttgtagttgtatttttttttttttttttttttggtttttttagtttttttattattacgattag

SEQ ID NO: 4074 - DNA, 201 bp, synthetic construct
  misc_feature 1..201: note = Description of Artificial Sequence: Synthetic polynucleotide
  source 1..201: mol_type = other DNA
ttaacgtttgtttttattttaagttttgttatagttgttatatttattattgttcgcgtttgtgtcgtcgcgaggattgggacgtttataaggcgcgttgcgtgtacggtcgcgtgggtagcgtgtgtcgttacgtattgtagttttgtcgcgatagcggttcggtgtatcgcgttttttcgcgtatcgcgcgtgtcggtt

SEQ ID NO: 4075 - DNA, 281 bp, synthetic construct
  misc_feature 1..281: note = Description of Artificial Sequence: Synthetic polynucleotide
  source 1..281: mol_type = other DNA
agtttcgtgcgtcggtttttgtttcgttagtttcgttatggttttttatttattttcgcgggagcgtttttgtttttttattttgtattttttttagagtcgcgcgttagtttttcgtttcgtggaagcgtttttttttcgatttcggttgattttcgttcgtcgtttttttcgcgggtgcgcgttcggtttttttttcgttcggggcgggtttgcgtgggcggtgtttcgggtcggcgggcggagtttcggttttttagttttgcgtttcggtggagttc

SEQ ID NO: 4076 - DNA, 222 bp, synthetic construct
  misc_feature 1..222: note = Description of Artificial Sequence: Synthetic polynucleotide
  source 1..222: mol_type = other DNA
gtttaggttatatattagattttattggggatgtgagaagggtgtagcgggcgtgaggtttcgttttcgtcgttttttgttcgtttttagattcgcggttcgtttggtcgttttatttggtcgatggcgttggtggtgagtataggaaggttattatagttttaatttttgaggtaatggttgaagttcggcggggcgaagtcgttgtacgaggggtcggta

SEQ ID NO: 4077 - DNA, 237 bp, synthetic construct
  misc_feature 1..237: note = Description of Artificial Sequence: Synthetic polynucleotide
  source 1..237: mol_type = other DNA
cgggtttggattaggacggcgaggcgggtcggcgcgcgcgcgaggtggtttttatttatatttagcgcgagttgcggttgcgcggcgtttttttgcgttacgagttttcgcgcgtttacgagtagttttgcgagttcgtcgaggttaataggcgttttacgtttattattatttattttacggatcggcgtatcggtcgtttttttatgtgtatgattatggtcgttttcgagtcgc

SEQ ID NO: 4078 - DNA, 201 bp, synthetic construct
  misc_feature 1..201: note = Description of Artificial Sequence: Synthetic polynucleotide
  source 1..201: mol_type = other DNA
tttggttttttaatttagtagtgtttttgaatgaacgtgtgatagtttaatgaagtagtcgagtattttgatttgaatgttggagtcggggtttatagggggttgtattagttagtataggttgggttatgttattgtgataaagagttttagattttaaatttcgtttttgtgggttagttgaggtttttgttttaggtt

SEQ ID NO: 4079 - DNA, 364 bp, synthetic construct
  misc_feature 1..364: note = Description of Artificial Sequence: Synthetic polynucleotide
  source 1..364: mol_type = other DNA
gttttattagtttttcggtcgagcggaaggcgtcggcgtttagttgggttaagttgttgtagttgaggtcgaggaatacgagtttggtcgagtcgttgaacgtgtttttttttagcgagcgtagcgagttgtttttgaagtttaggtagattaggtcgtcgtagaagatgaagaagttttcggggattcgttggatgcggttgtcggttattagtagtttgcgtacgtttagggggaaagggtttggtacgttgggtagttcgcggtcgcggtagtttacggtgtgcgggtcggtgtaggcgtagttcgcggggtacgcgtgttcgggcgcgagtagtagtagaaggttgtagagttcgagcgt

SEQ ID NO: 4080 - DNA, 201 bp, synthetic construct
  misc_feature 1..201: note = Description of Artificial Sequence: Synthetic polynucleotide
  source 1..201: mol_type = other DNA
gaaattaattcgttagaaaaattttttgggagaggcgggagcggtaggggtggtcgagtggtcgtcgttaaaacgcggttttattttggtagttgattttcgagatttggtagtaagacgtcgcgcgtatcgggcgggttgtattcgacgtttaagtttagttattaagtttaggagcggtttttttaaggcgtgtttcgg

SEQ ID NO: 4081 - DNA, 201 bp, synthetic construct
  misc_feature 1..201: note = Description of Artificial Sequence: Synthetic polynucleotide
  source 1..201: mol_type = other DNA
gcgtttttttttggggtgggtagcgtaggtttggtttgcgggtggggggtggagagtgagaggtacgcggggtattagtttagtttttttttggggatttcgtattcgtagtttaaggaatcggtggagtacgaattttatttttgagttggcgtaagcgttttttttttatggagatttatttcggtttttttttgaggt

SEQ ID NO: 4082 - DNA, 201 bp, synthetic construct
  misc_feature 1..201: note = Description of Artificial Sequence: Synthetic polynucleotide
  source 1..201: mol_type = other DNA
aggaatcggcgttgtcggtgtttgggggtcggggcgcgggcgaagtcgggtcgcggaggatataataggtagagtcgggggtgttcggtcgcgcgtttttcgcgtattatgtagttttttgttatttttttcgtttttaggttaaaattttgagtatgatggaagataataagtagttcgcgtttcgtatcgatggggcgg

SEQ ID NO: 4083 - DNA, 222 bp, synthetic construct
  misc_feature 1..222: note = Description of Artificial Sequence: Synthetic polynucleotide
  source 1..222: mol_type = other DNA
tgcgcgcgtgcgtgtgtggcgtgtgtttgggtgttttatgattgtttttcgtgaggtcgtgtgtgagtttttgcgtgggtcgtgagtgcggtagggagcgcggtgttcgggggtcgtttgtcggtgtgtttgtgcgtgtttgtgcgttagtttttgtttttgcgagtgcgtatttttaggatcgagtttgtttatatgagtttgtgtttgtgtgtgtgcgtt

SEQ ID NO: 4084 - DNA, 201 bp, synthetic construct
  misc_feature 1..201: note = Description of Artificial Sequence: Synthetic polynucleotide
  source 1..201: mol_type = other DNA
gataataagatttgttattgacgttatcgggttggtgatatttaggtatagtagttttagtaaacgaatatatttttatgagaattaagttttttgagagcggtaagttgttttgttttgtttatagttgataagaatacgtttgtacggttatttagtatttagtattgttatttaatcgttttattagtatgtatgaat

SEQ ID NO: 4085 - DNA, 265 bp, synthetic construct
  misc_feature 1..265: note = Description of Artificial Sequence: Synthetic polynucleotide
  source 1..265: mol_type = other DNA
aggcgtatacgaggagttcggtttagtatttttaaattagatttcggaggcgtcgttagggagcggttatcgttgggcgtcgtcgagcgtgttcggggcgcggtcgtggcgggttttttggggcggtagttttaggcgcgggcgcgtagtagtttcgaaggcgtcgtttggtttagtcgttcggttttcgagcgtcgttgtaagtggggggcgtttcgcggcgtcgcgtatattttattggggggtcgtttcgtcggcgttcgtt

SEQ ID NO: 4086 - DNA, 242 bp, synthetic construct
  misc_feature 1..242: note = Description of Artificial Sequence: Synthetic polynucleotide
  source 1..242: mol_type = other DNA
tcgggttgttttcgtcgtttatcggagagggtcgttcgggtgtttggttttgttcgaaagtttttgggtttttttttttttttgtaaaatttaaagtaatcgaataaaaagagtttaggtcgcgcgggcgggttgcgcgttcgcgttttgtagcgcgtcggcgggggttcggttcgcggggttattgtattgagtcgggtagtgtgtggtggtggtggtggtgtagcgtcgtcggcgggggc

SEQ ID NO: 4087 - DNA, 201 bp, synthetic construct
  misc_feature 1..201: note = Description of Artificial Sequence: Synthetic polynucleotide
  source 1..201: mol_type = other DNA
ttttagggcgtagggttacgagttttcgtttttattttcggtttttggtattcggcgtcggtttcgtcgtttttttttatacgtatttttggtagggtttcgcggggcgttttaaagtttgggggtagtttttaggtgtttttgggaagggaaagaaaggttataaagtaaaagaaggagtaaagagaaggcgagggagga

SEQ ID NO: 4088 - DNA, 261 bp, synthetic construct
  misc_feature 1..261: note = Description of Artificial Sequence: Synthetic polynucleotide
  source 1..261: mol_type = other DNA
tcgtttatcgatgagtcgtcgtcgttcgcgttcgggtgtaggtgcgtcgtcgtcgcgtgtaggtcgttcgcgtgtgtatgttcgtgtgcgtgttcgtgggcgtttagatgcggcggcggcgacggttttagttgcgtttcgtggttattttcgtgtagcgcgtggtgtaggttcggtttcgcgtcgttatcgttcgtcgttagtatttcggttaggtcgtcgtcgtcgtttttcgggtaggtcgtttgcgcgtatagttcg

SEQ ID NO: 4089 - DNA, 201 bp, synthetic construct
  misc_feature 1..201: note = Description of Artificial Sequence: Synthetic polynucleotide
  source 1..201: mol_type = other DNA
cggtgttttgggtcgagtcgtttggagattttagattagtatgtgggtgggaaagggcgtttcgttttgggttttttcgtttttgcgcgtagagtagagacgcgtagattcgtttttatttcgtttggtttttttggagtagtttcggcggcggtagcgatgggttgggaggggtcggtacgttggtttgcgcgggttttt

SEQ ID NO: 4090 - DNA, 337 bp, synthetic construct
  misc_feature 1..337: note = Description of Artificial Sequence: Synthetic polynucleotide
  source 1..337: mol_type = other DNA
gaattggataataatgtggcgtttgttattggttaggggaggtagacggcgttttgattggtcgggttcgcgttcggggagtttcgtattttgtagtgttcgaaagattcgaaattttaaaagttttattgcgtgtttttgggaggggagggggcgcgttaggaaaggagtggaaaaaagtgggcgaggaggagcgttgaaaattttttgataagtagttttcgtgcgttcgagagcgtgtgaattgtttttaattatcgtgttcggtgcgtttttttgcgtagatttgtgtaatttttcggtttttggggcgtcggttcggttgtatcgtttttat

SEQ ID NO: 4091 - DNA, 201 bp, synthetic construct
  misc_feature 1..201: note = Description of Artificial Sequence: Synthetic polynucleotide
  source 1..201: mol_type = other DNA
tgaagttgttttttcgggataggaagggttaaatggttgcgcgttaattcggtttcgattggggtgttagggagtaagagtcgtttgtttcgggggatttcgtttggggggtttttaggggtcgttttggcgtttcggttataatttgggcggttttgtgcggcggttttcgtttgcgtttttgcgcgttatttaaaattt

SEQ ID NO: 4092 - DNA, 201 bp, synthetic construct
  misc_feature 1..201: note = Description of Artificial Sequence: Synthetic polynucleotide
  source 1..201: mol_type = other DNA
tagtaggtagtgcgggtatagtgttgtagattattatttcgttaggttcgggtagcgtttattagacggataggcgttcgcggtcgtttttatttcggcgcgtttatttcgagttttttacgtcgcggcgggcgggcgtaatatatttttttatttttagtcgtcgaggattatatttttcgtttagttttttcgatttat

SEQ ID NO: 4093 - DNA, 201 bp, synthetic construct
  misc_feature 1..201: note = Description of Artificial Sequence: Synthetic polynucleotide
  source 1..201: mol_type = other DNA
ttttgaatcgttatttgtttattattcgggcgttcgttatttattaggcgttgtattagaggcgttatacggcgggtatgttggcgttgttttgggcgttcgttttgggtttcgtgttgttgttttcgttttgggtatcgcggttcggcgtcgcgttatcgcgagtttattattcggcgttgttggtcgtcgcggcgttgt

SEQ ID NO: 4094 - DNA, 201 bp, synthetic construct
  misc_feature 1..201: note = Description of Artificial Sequence: Synthetic polynucleotide
  source 1..201: mol_type = other DNA
gtttcgtgcgtttagttttgtcgggcgtcggcgacgcggcggtcgttgtcgttgtcgttatagtcgtgttcgtagtgttttaggcgtaattgggtattcgcgtcgcgggttagtattggtaatttagtcggggttcgagggaagcggagattttcggttttcgacgtttttgggtatcgtcgttttttttttttttagggt

SEQ ID NO: 4095 - DNA, 386 bp, synthetic construct
  misc_feature 1..386: note = Description of Artificial Sequence: Synthetic polynucleotide
  source 1..386: mol_type = other DNA
tgtttgttgaaaaataatattgtgattatttttagcggcgaagggtgtgtttgggaacggtttggggaggggatagaagagagaggggtgggatggacggcggtagaagtgggaggtatacgaggagttattggaaacggcgtttttgtggaggagtcgggggggatggggagtagagggagggggttttgttgttttagcgtttcgaggtcgtggagcggtagtagttgtagtcggagtagtattagtaatagtaatagtgagcgggacggagttaggatcgttcggagcgtataggtttcgaggtagtataaggtttgttatttttttatttgttggtagttgtagaagaagatttgttttttaagtgaaacgtatatgttatt

SEQ ID NO: 4096 - DNA, 201 bp, synthetic construct
  misc_feature 1..201: note = Description of Artificial Sequence: Synthetic polynucleotide
  source 1..201: mol_type = other DNA
aggttatataggggtcgggtgtaggttttacgcggaaaggcgcgtagtgttcggggtttatgtcggtttagggcgtataggttttcggggtttcggggttcgcgttgttcgcgtcgtttgtgagcgttcgttaagggggagggatttgggcgcgggggcgcggagttttcgggagcggcgcgcgtcgcggggggcgggggg

SEQ ID NO: 4097 - DNA, 201 bp, synthetic construct
  misc_feature 1..201: note = Description of Artificial Sequence: Synthetic polynucleotide
  source 1..201: mol_type = other DNA
tgttagggcgtagggagggcggtattcggttttagttttcgtaatttcgcgcgtttttttcgtcgtgggatttgggttttcgcgtcgtttttttgagtttcgagcgcgcggcgggcgggagttaggttgggattggtggtgaggtagggagtgaggagcgagcggagtcgcgtgcgtcggcgcgtagtttcgggtcgtttt

SEQ ID NO: 4098 - DNA, 309 bp, synthetic construct
  misc_feature 1..309: note = Description of Artificial Sequence: Synthetic polynucleotide
  source 1..309: mol_type = other DNA
tttgggtcgcggcggtttttatttcgttatcgtcgtcgtcgtcgtacggttgttcgtcgcgaataagtatcggtattattacgcgacgtagtaggtcgggcgcggcgtgtagttcggcggatgttgttaggttaggcgatttcgtcgtttttggagcgcgagcgcgttttagtttgtagcgatgattttggaattagattttgatttgcgtgggcgtgaggcgaagtaggttcgttagttgttcgcgttcgggcgtagataggtatcgttgttgtcggaagcgtcgttttaattttagcgtttgcgttt

SEQ ID NO: 4099 - DNA, 203 bp, synthetic construct
  misc_feature 1..203: note = Description of Artificial Sequence: Synthetic polynucleotide
  source 1..203: mol_type = other DNA
tattttgttttcggtcggtgattcgttgtggtttttaggttaagtgtttttcgtgttcgggcggttgacgttgtttgaagtttacgcggcgtgtcggcgacgcggcgtcgtggtggttaaggttgggtatttttacgtcgtttggaagttttcggggttagattagtgcgacggcggttggttggttgacggtagtgtgcgtt

SEQ ID NO: 4100 - DNA, 388 bp, synthetic construct
  misc_feature 1..388: note = Description of Artificial Sequence: Synthetic polynucleotide
  source 1..388: mol_type = other DNA
atcgggaagtagttcggtgttttaagttttttgagatttttcggatttgcgcgtcgttcgttcggtagggggttcggtaggcgcgggcggcgggtgggggcgggaggttttgttcgttcggtggttgtcgcggtttttttcgcgttgttttttacgtttggtttattatgtacgaggtaggtaatttgttttttttttcggggatttatttcggagataagaaggtagtttgttttttgtaatggtttttgttggagtgcggcggggtttaggcgcgagcgggggtacgggcggggagttggtagcgaaggatgcgttcggcgtttttcggcggtcgttcggagttcgaggtcggcgcgggaggagcgttgatttcgcgggtcgagtt

SEQ ID NO: 4101 - DNA, 241 bp, synthetic construct
  misc_feature 1..241: note = Description of Artificial Sequence: Synthetic polynucleotide
  source 1..241: mol_type = other DNA
gagggcggcgcgtagcggcgtttcgcgaggtttttacgtcgggcgatatggggtgtttgttgtttttgttgttttgggcgtttttttaggtttggggaagcgttgaaggtgggtggaacgagggcgtttgagtgtattcgcgggagggcggagagagggagttgggtagggacggggagggtaacgtttgatggggattggtgagattcgggacgtattggcgcgatttaggtagaaaatt

SEQ ID NO: 4102 - DNA, 232 bp, synthetic construct
  misc_feature 1..232: note = Description of Artificial Sequence: Synthetic polynucleotide
  source 1..232: mol_type = other DNA
gggttttttatttgtatttttttataaaattgtcgttcgtgtgtgtttttgcgtttggttttttgtatttttaaggggtttttgaagatagggtcgaatgcgcgcgggggttttaggtattttgcgttttacggcgggtttcgtagttcggttcgagtcggttttggaagtttcgttttggattagattggtatcgacgtcgtttttagtttgagcgttgagagggaaaacg

SEQ ID NO: 4103 - DNA, 214 bp, synthetic construct
  misc_feature 1..214: note = Description of Artificial Sequence: Synthetic polynucleotide
  source 1..214: mol_type = other DNA
gaattttttttagtgtcgtaattaggaaagttttaaaaagtaaggattttagatagataagagatttatttttttttttagtataagaaatatttcgcgtcgcgttagtcgaacgttgttcgtataaggttattcgttttttttggtcgggacgtattcggtgttttttagttttttattagaattggtttagggggcgcggaaatagagaggt

SEQ ID NO: 4104 - DNA, 250 bp, synthetic construct
  misc_feature 1..250: note = Description of Artificial Sequence: Synthetic polynucleotide
  source 1..250: mol_type = other DNA
agtagggattagttggtcgtcggtttttcgggtaagatggggaatcgggagatggaggagttgatttcgttggtgaatcgtttgtaggacgcgttttcggcgttgggatagagttgtttgttggagttgtcgtagatcgtcgtggtgggcggttagagcgtcggtaagagttcggtgttcgagaatttcgtgggtaggtaagcgcgtagggcgcggagtaaggatgcggtagtggggcgatttcgttgcg

SEQ ID NO: 4105 - DNA, 201 bp, synthetic construct
  misc_feature 1..201: note = Description of Artificial Sequence: Synthetic polynucleotide
  source 1..201: mol_type = other DNA
ttaggattttgtagattcggtcgcggtcgggtcgagtgtttttcgtcggggttttacgtttacggtttacgtttgtaatattagggttgtacggcgggttcgtagttgggtttgcgtttgggattcggggttttttgcgtttttcgtgtcgtattttttgttttaattttaagcggacgggttttggggttttatcggtta

SEQ ID NO: 4106 - DNA, 467 bp, synthetic construct
  misc_feature 1..467: note = Description of Artificial Sequence: Synthetic polynucleotide
  source 1..467: mol_type = other DNA
tcgtttttttttacgttttttttttcgttttttttcgcgtttagtttcgttttttttattttgtaaaataaagtcggggaaaatgtttgttcgtgtagttcggagcgcgtagttcgtttttgaataagaagtgagtataatggcgtgtttgtaaaaaaaagttttaagttcgttttttttaaaaaatattttgaatgttgtatgttttatgttttttagcgtttcgcgggagagattcggttatagagtaggaggtgagatttttttttcggtatttttatttttttggtcgtacgtttttttgttttagttttttttgggaggattgtaaatgtttttttttagtaagcggtcgttttttattttcgtttcgcgtttaaagtgttgggttataatttggatttggaggtaaatttttgttagattttttttacgtcgttttttttttttttttcgtcggtgttcgg

SEQ ID NO: 4107 - DNA, 201 bp, synthetic construct
  misc_feature 1..201: note = Description of Artificial Sequence: Synthetic polynucleotide
  source 1..201: mol_type = other DNA
ttcgaggggtttatagtttggtattaatttgtaggtgttcgttgttgatttggtttttttttcgatttgcggacggttttttttagcgattttcgatatacgtttttttgttttcgtcggagggtcgggtttggggtcgtcggagtttgcgggaatttagcgtttattcgttgattttcgagtcgtttcgttagttgtgcg

SEQ ID NO: 4108 - DNA, 232 bp, synthetic construct
  misc_feature 1..232: note = Description of Artificial Sequence: Synthetic polynucleotide
  source 1..232: mol_type = other DNA
ttggggtgtttttaggaagtgaaggaaaaggttttcgacgatattgttattggaaaagtgttggttacggttttcgttttattttttttatttacgggttcggagtttttaggagtagttagatcgattatcgtttttgtagttttatttgttttcggagagatatttataagttagtttacggagagtttggattcgttcgttttagtatttacgtttttttcgcgttcgg

SEQ ID NO: 4109 - DNA, 222 bp, synthetic construct
  misc_feature 1..222: note = Description of Artificial Sequence: Synthetic polynucleotide
  source 1..222: mol_type = other DNA
ggttagggatagtaaaggagatacgggtgggtgagacgtcggattttacgagggtttgttgtttttttggcgcgggcgtggaggtattggttagagggtacgtttattagttcgagattttcgggatgaggttattttttgagtttatatttggatatttattttttcgaatgcggtgattttatttatattatagcggttattagcgggtttgagatcgtg

SEQ ID NO: 4110 - DNA, 239 bp, synthetic construct
  misc_feature 1..239: note = Description of Artificial Sequence: Synthetic polynucleotide
  source 1..239: mol_type = other DNA
ggtttttaggcggagcgcgggcgcgaggtgcgggtttcggggcggagcgtacgttcgggaggcgggaagtgggtagtagcgttttcgtttggtttttgtgcgtttcgattcgacgttttttcgttcgattaggtgtttcgagagcgtatagttgggagggttttttcggtcgcggcgagatttacgtttgcggtgtgttagggcggcggcgacggtgacgggcgtggggcgcggcgttg

SEQ ID NO: 4111 - DNA, 209 bp, synthetic construct
  misc_feature 1..209: note = Description of Artificial Sequence: Synthetic polynucleotide
  source 1..209: mol_type = other DNA
cgtttcgggggtttttgtattttagtcggggaatgttgttattttgaggggggttgtttggttgcggggcgtcggggttgggggtattgtttttttaggacgcggtttcgtagtgtagagcgtcgtcgtttgcgtggggggatttggtagttttaggggttgttttgagttttttggcgagtaggagtgagttgttgcggcgagtgagt

SEQ ID NO: 4112 - DNA, 380 bp, synthetic construct
  misc_feature 1..380: note = Description of Artificial Sequence: Synthetic polynucleotide
  source 1..380: mol_type = other DNA
gaggtcgggtttcggcgattttcgagggaggttcgggaattattttcgatttaggcgttagattcggagtcgtacggggtttttagtttagtttcgcgagcggttgttgatcgtttttttcgcgttcgttagggtttttgtttcgcgttagttatcgcgcgttttttttttgtttatgtcgtagttttcgtggtttttgttttggattcgggatgttaggttgagatacgttttgtaaatttttggtagaaatgggcgtaagggggtggatttcgttttcgtttttcgggtttttttttttttttcgtttatatgtttttttattattttttttttttttttttattgtattttgatgaaatggttttgtttgtttaaat

SEQ ID NO: 4113 - DNA, 394 bp, synthetic construct
  misc_feature 1..394: note = Description of Artificial Sequence: Synthetic polynucleotide
  source 1..394: mol_type = other DNA
cgggtcggtagggattaagagtttgaaagggaatttgttttttttttttcgtagttcggttattaaggtaagaaattgtaggtagagaagttttcgaattcgatttaggacgtcggcgtttgttaggattttttcgtttgtttttcgcgtttcgcgcgcgtttatgttattattacggggagggtgtatgcggtaggtgtttggtcgaggttttcgggagcgagtcgtttttacgtgttttagtttgtttttttttcgaagttagacgttggcgttgtagttttgttgtttgacgttgttgtagaagttcgcgtttattcgggttaggtttggggagggttttttggggcggtttttgagttttatttgttcgaagtttttatggggggaggtc

SEQ ID NO: 4114 - DNA, 201 bp, synthetic construct
  misc_feature 1..201: note = Description of Artificial Sequence: Synthetic polynucleotide
  source 1..201: mol_type = other DNA
tttcgttcgggttttttaaatatgtcgtagcgtggttgtttattgttttttttgggtaagaggaggttttagatatttttacgggatttgaattttcgagcgttttgtacggagtagttatttcgttagtattttaaagtgaagttgtttataacggataagttcggagattttatgagaggtcggggtggagaagtcggg

SEQ ID NO: 4115 - DNA, 557 bp, synthetic construct
  misc_feature 1..557: note = Description of Artificial Sequence: Synthetic polynucleotide
  source 1..557: mol_type = other DNA
gtcgttatcgtttagtttcgttgtttaggtgggaggggttatttgtcgcggggtttttaagttagtgtcgtttgttttcggtttttatttattgatagtacggcgttcgagtgattttgtttagtttcgttttgcgtttttgtaaattacgttgttgcgttaattataaatttggttaatatgtttttgtaattttattatttaaaaacgtttttaggtatttggtcgttgttagattaggttcgcgggttcggaggaggtttttttatttgttttcgttagtttcggggatcgtgcgcggttttcgtgtggttttcgtttacgaggtttttcgggtaggaatcgtcgcgcgatttttgtttagcggtcgcgttttggttacgggcgatttttgtcgggaattttgttttcggttaagttgcgttttcgtatttcggtggtttttattcgagttcgcgtttgttggttttttttttggtttttttgtttgatttcgattttgttttcgaattttatttttagatttttttcgttttggaacgtcgatttttttttcg

SEQ ID NO: 4116 - DNA, 212 bp, synthetic construct
  misc_feature 1..212: note = Description of Artificial Sequence: Synthetic polynucleotide
  source 1..212: mol_type = other DNA
agttgggtttttttttattttaaaatttttatttttagtttttaaaagttattttagttcgttatattgaaattggtacggtttttaaagatttttttttcgtagttgtggcgtttttaagaaaatacgagtacggattaggttttggatgagtgttcggttatcgagaattagttattttttattttttaggattttttagttttttttag

SEQ ID NO: 4117 - DNA, 201 bp, synthetic construct
  misc_feature 1..201: note = Description of Artificial Sequence: Synthetic polynucleotide
  source 1..201: mol_type = other DNA
tttttaatggtttagtcgatcgtgtgtataaatttgcgttttattcgtcggggatcgttgggagcggagataaatttaatttttagggtaattttggtttcgttcgttttattttattttgtgtttaaatagagttttttttgaagttgcgaatatttttaggttttttgggtagggttggaggggtcgaggagagttatt

SEQ ID NO: 4118 - DNA, 201 bp, synthetic construct
  misc_feature 1..201: note = Description of Artificial Sequence: Synthetic polynucleotide
  source 1..201: mol_type = other DNA
ttttggataataatgcgcgttttcgtttttttagaaagttagggacgtttttagtcgtcgttagagttggttcggttttttagttttttttcgtggtattcgtaggcgagataaagttcgttttcggtgaggttgcgcgcgtttaaagcgtgcgggatgtttagtacggaggtttttaagcgggggatttttggttttttt

SEQ ID NO: 4119 - DNA, 294 bp, synthetic construct
  misc_feature 1..294: note = Description of Artificial Sequence: Synthetic polynucleotide
  source 1..294: mol_type = other DNA
ggtagatgacgattcgtcgagttcgtcgtttgttttttcggaggcgttcggagttgttgcgggtttcggtcgtcgttgttattgttgttgtcgtcgtcgtcgtgcggggttatttgaaggttggggcgcggaagtttaatttcgtgttgattgggttttaagttttttgcgttttcgtttcgtttcgagtgttcgcgaatttttcggacgtttacgtagattatttagttatattataattttgtttgcggagagaggagaggagaaaaaggggtcgttttaaaaatttttaaa

SEQ ID NO: 4120 - DNA, 244 bp, synthetic construct
  misc_feature 1..244: note = Description of Artificial Sequence: Synthetic polynucleotide
  source 1..244: mol_type = other DNA
tagttttgagtcggttgtcggttaggtgttgggtatattcgcgtcgtcgtcgtcgttcgtttttggtcgcgttagtcgtagggttttcggcgttcgggggcggtagtaggttggagcgtatcgtgcgcgttttgttttttcggcgttttcgtcgtttcggaggttcgggtttttcggttttcgtcggttttcgttttatggtcgcgtgtcgtcgcgttcggttttttcgtcgtttacgttcgtt

SEQ ID NO: 4121 - DNA, 303 bp, synthetic construct
  misc_feature 1..303: note = Description of Artificial Sequence: Synthetic polynucleotide
  source 1..303: mol_type = other DNA
ggtttggggttatgggaataggattaaggttttttgagcgtcgggtttggtttttgtggtttcgtaaattttttagtttgtgtgttacggcgacgcgtagcggttgagtcggagtttacgcggcgcgcgtttttcgcgaggaatttttcggtttgtaggttgtttgttattttcgtttttcgacgcgtttttttttggttcgcgttttcggagttttttttttttttggcgaggatttttttcggcgttcgcggtttcgattttcgtcgcgttgcgttcgttttttcggtttcggttgtttcg

SEQ ID NO: 4122 - DNA, 286 bp, synthetic construct
  misc_feature 1..286: note = Description of Artificial Sequence: Synthetic polynucleotide
  source 1..286: mol_type = other DNA
aatagattttcgagttgaaaaaataaaaataaattggggagttagagtttttgaaagtttcggtaggaaatttaatgggttttttgtttttttaaattttcgttttcgttttcgttgatattttgtaaagtcgcggcggtagcggcggggattacgttgcggtgtattatttttcgttattttttcgcgttgggttggggtcgagggggtttcgtagagtcggtaatcgaatcggttttggtttgttttttttattttttagttattattagaattagttttcgcg

SEQ ID NO: 4123 - DNA, 261 bp, synthetic construct
  misc_feature 1..261: note = Description of Artificial Sequence: Synthetic polynucleotide
  source 1..261: mol_type = other DNA
tggttgtggaattagatttgttttgaatttagtggagcgtatcgttggggttcggaagttatcgttcgcgggtatcgggttggcgttgttcgagtggaatcgatagtttgcgagtttcggttgtaagtggtttttttttttcgcggttgttgtttagtgtcgggtgagggttgcgagtgtggtaagttgtaaagagagttttagaggttcgaagagcgttgcgtttttattcgcgttcgttttttttttttttcggttttt

SEQ ID NO: 4124 - DNA, 201 bp, synthetic construct
  misc_feature 1..201: note = Description of Artificial Sequence: Synthetic polynucleotide
  source 1..201: mol_type = other DNA
gaacgcgtagagagttttttggagtgttttgattttgttttcgagagggtttttaattttcgtatttttttagtggttgttttggtaggtgcgcgttttgcggggagttgcgtttcgggggttatcgtcgagcgggagttgttttttggaattttgtttatcgcgaattgggtgtttattttttatttttgttttttagtg

SEQ ID NO: 4125 - DNA, 201 bp, synthetic construct
  misc_feature 1..201: note = Description of Artificial Sequence: Synthetic polynucleotide
  source 1..201: mol_type = other DNA
tcgcgttttagtatcgagtgttttaagttttgcgcgtagcgtcgggtttggaaggcggcgaatggttgtttagtcgtcgtttttattagtgatattcggtcgttagttttcgtttaggatgtgtatatttgttggtagtattggttcgggtggtagttatcgggttatttattttataggtataatcgtatttaatttaat

SEQ ID NO: 4126 - DNA, 201 bp, synthetic construct
  misc_feature 1..201: note = Description of Artificial Sequence: Synthetic polynucleotide
  source 1..201: mol_type = other DNA
gcgtttcgggaagtgtatggttttaaggtttaaggcgttaggatttaggtttttagagtttttaattagtgttattttttttcgtagcgcgggtgttagtcgcgagttcgtagtttttcgatattcgtttttttttggggttttcggggatttttttagaggttgtaaaggtgttagaagtttaaggtaggaggtagtttg

SEQ ID NO: 4127 - DNA, 201 bp, synthetic construct
  misc_feature 1..201: note = Description of Artificial Sequence: Synthetic polynucleotide
  source 1..201: mol_type = other DNA
tcggcgtcgtcgttgtcgttcgggtttcgcgattcgggtcgggttgtgggcgcgcggtaggcgggttgcggcggcggcgggacggggcggtcgcgggttgcgtggggtttgtgcgcgcgtgtgcgcgggcgtcggttgtgcgcgtcgcgggcggatagggttcggtcggcggcggtaaagttgggattcgcgggtcgggcg

SEQ ID NO: 4128 - DNA, 201 bp, synthetic construct
  misc_feature 1..201: note = Description of Artificial Sequence: Synthetic polynucleotide
  source 1..201: mol_type = other DNA
tgtttcggttgatttcgttttgtagttagtttgaggttaggcggtcgttttttgtaggttataaattttcggcgtaaaagtagggttttgaacgcgatatcgtattagagcgtttagttaagcgagttgtttttatttttattgtgtcgggcggcgtaaattgcgggcgtaggtagaggagtcgcggttttgcgtcgggcg

SEQ ID NO: 4129 - DNA, 201 bp, synthetic construct
  misc_feature 1..201: note = Description of Artificial Sequence: Synthetic polynucleotide
  source 1..201: mol_type = other DNA
ttgcggaggggtcggtgggttagagttaggttaggtagttgttgagtttttttttttttttttggcgggagtgtgtgtgtaaggggttagggggcggagtcggagaaagggttgggggtgttcgtgtttagcgttttttcggacgcggttttataatttagttgcgagaatagatggacgtagcggcggtttatttcgggg

SEQ ID NO: 4130 - DNA, 201 bp, synthetic construct
  misc_feature 1..201: note = Description of Artificial Sequence: Synthetic polynucleotide
  source 1..201: mol_type = other DNA
cgcggtttttcgtgggttggtcgggttaatgagcgcgcggttgtaggggcggcgggcggggagggggcgtcgagttttgcggatggaggcgcgggtagcgcggcgcgtttatttcgcgcgggcgttgttggcggggggcggcgtagttattggattcggatcggggtcgcgattcggggtggcgggtggcgtgggcggcgt

SEQ ID NO: 4131 - DNA, 201 bp, synthetic construct
  misc_feature 1..201: note = Description of Artificial Sequence: Synthetic polynucleotide
  source 1..201: mol_type = other DNA
ttcgtcgatttttagaggtatcggttgcgttttttggtggtttggaacggcgcggagggtaagtttgttgtgatttgttacgatcgtatcgcgtagtagtcgtagcggcgcgagggggttcggttggggttggagtataagttcgaggtcgtcgtgttttcgtttagttgggtcggtcggttttcggtcgcggggtttcgc

SEQ ID NO: 4132 - DNA, 344 bp, synthetic construct
  misc_feature 1..344: note = Description of Artificial Sequence: Synthetic polynucleotide
  source 1..344: mol_type = other DNA
gtcggttagagggtttacgtaagtttcgaaattcggggggacgttttttttatttttatttttgcgttcgttcggggttgggcgcgtcggggcgtacgtacgtcggtttgttggcgatttggcgtatttgttcgcgcgttttggttttagttgtcgtaggttttttttgtatttatttttagtttttaaagttagtgtagttagtatcgtttatttggagttttaatttttttttgcgattttcgtatatttattgtattttatttattattttcgggtcgcgtaggttcgggtttgcgaagatacgcggtttattttcggttatttcgtttatttggttaaag

SEQ ID NO: 4133 - DNA, 201 bp, synthetic construct
  misc_feature 1..201: note = Description of Artificial Sequence: Synthetic polynucleotide
  source 1..201: mol_type = other DNA
attttttttcgcggcgttttttcgcgtagtttttagattgtttagtcggtgttcgcgggcgttcgttttttgcgagttttaggttcgcgcgagttgtttgcgggaggggtcggggatacggatagacgttgttttattagggattcggaggatttggtgggtaagagtatgatttagcgattttcgtttcgggtaagcgtt

SEQ ID NO: 4134 - DNA, 218 bp, synthetic construct
  misc_feature 1..218: note = Description of Artificial Sequence: Synthetic polynucleotide
  source 1..218: mol_type = other DNA
attatttttttttttgtttaaaggattttttttttttttttgattttacgaatttatttttttaataggtttttaaagtatgggcggatgtgttttttttcgtttatcgttaggagtcgagtttcggtaggtgagcggtgtaaaatacgtatttagttgtttttagtttttttcgttttcgttgagttggttgtttttatttcgtattacggtattcg

SEQ ID NO: 4135 - DNA, 234 bp, synthetic construct
  misc_feature 1..234: note = Description of Artificial Sequence: Synthetic polynucleotide
  source 1..234: mol_type = other DNA
gcgcgtttcgtgcgttttcgtttttcgcgcgttttcggtttattttcgtttttggagagttgtcgtttgcgttcgggcgcgcggttggttgttttttcggcggcggcggcggcggttttattagcggagttttcgtttatgattggtttcgttcgggaagttggagacgggcgatgaataattgatgtgtgcggtgcggtagtcggacggcggcggcggtggcgggtagtagcg

SEQ ID NO: 4136 - DNA, 201 bp, synthetic construct
  misc_feature 1..201: note = Description of Artificial Sequence: Synthetic polynucleotide
  source 1..201: mol_type = other DNA
cgggggtattcgggtaggggtgttagatatagtattgtatttggtaatttttcggggcgtttagtgtggtttttttattcgggagtttggaagggtttttcgtagttcgtaggagacgtagcgtttttcgtttagggggagtaggaggatagttggtcgttttcgggagttttaggcgcgaagcggttttttttcgtttta

SEQ ID NO: 4137 - DNA, 201 bp, synthetic construct
  misc_feature 1..201: note = Description of Artificial Sequence: Synthetic polynucleotide
  source 1..201: mol_type = other DNA
agttatagtagtcgtatttttcgtagcgcgtcggcgtttagtgtagcgtttttagtagtagcgttagcgcggtcgttcgtacgttttttttcgtcgtcgtcgttcgtatggttgcgttttttttaggtgcgcgtcgcgtagtttttcgacgttcggtgttcggcggtttaggtgtttcggcgtgcgttttcggttttgatt

SEQ ID NO: 4138 - DNA, 235 bp, synthetic construct
  misc_feature 1..235: note = Description of Artificial Sequence: Synthetic polynucleotide
  source 1..235: mol_type = other DNA
tttcgcggtttgggggacgggagaatggggggtttacggtcgttttgggtttttatcgcgtatcgcgttcgtagcggagtttcggagttatggttttgagcgagttggcgttggttcgttggttgtaggagagtcgtcgttcgcggaagtttattttgtttatcgtgtttttggcgttgttgttggataatatgttgtttattgtcgtgggtacgtgcggatagggtatttttgt

SEQ ID NO: 4139 - DNA, 201 bp, synthetic construct
  misc_feature 1..201: note = Description of Artificial Sequence: Synthetic polynucleotide
  source 1..201: mol_type = other DNA
attcgtttattttttatttttggtttatttatcgttatcgatatttgggttatcgtttttaaggtacgtgttacgtcgcggaattgtagcgcgtcgttttcgtcgtattttttattgttttcggtttgtttcgggtgggcgtttggtaaggtttgggcggaggttttttcggttcgcgggttagcgcgttttgttgggaaa

SEQ ID NO: 4140 - DNA, 241 bp, synthetic construct
  misc_feature 1..241: note = Description of Artificial Sequence: Synthetic polynucleotide
  source 1..241: mol_type = other DNA
gttaataacgggcgggtttttatagttcgaagttaaagcgttaaaattcgagggaaggcgaggagggggcggtggcggaggcggttgcggggtcggggttcggttgagttttcgtttgtttaattttatttgttattgtacgcgtttaatcgtcgtatatttttcgtatttaatttggatgatattttgattttattattagtattcggcgtcggattgacgtagtttcgagtcggggatt

SEQ ID NO: 4141 - DNA, 201 bp, synthetic construct
  misc_feature 1..201: note = Description of Artificial Sequence: Synthetic polynucleotide
  source 1..201: mol_type = other DNA
ggggtatttgtatcggggttgggcgggcgtatttagagttaggcgggtaggaatttttgcgtagttattcggtgtttgtatgtttttggcgcggaagggacgttttattagtttcggcgttttttttttttagatttttttttcgtttttttttattgtttgtttgttgtattattttttatttagattatttagatcgtt

SEQ ID NO: 4142 - DNA, 201 bp, synthetic construct
  misc_feature 1..201: note = Description of Artificial Sequence: Synthetic polynucleotide
  source 1..201: mol_type = other DNA
ggtcggcgcgcgtgggtttcggcgaggcggcgttgtaggagttttgcgggtagttggagcgttatttgggcgcggcggtttacggttgtggcggcgttatcgtgcgcgacgtttttttcgcggttaagggtcgcgcggtcgattgcgagagttcgcgcgagtttcgggagcgggttttgcgcgtttgatgggtcgaggcgg

SEQ ID NO: 4143 - DNA, 217 bp, synthetic construct
  misc_feature 1..217: note = Description of Artificial Sequence: Synthetic polynucleotide
  source 1..217: mol_type = other DNA
tcggcggcgagcgttgtattattttacgcgggcgtcgagtcggggtcgggcgtcgcgatcggagggattttttgtttcggcgagttagtttcggagttttcgcgtagcgttcgcgtcgtcgttgagtttttttagttttttatttttaaaaaagttttttttcgtgtgtgtgcgtgcgtgcgcgcgcgcgcgtcgttttggtataagttagttttga

SEQ ID NO: 4144 - DNA, 201 bp, synthetic construct
  misc_feature 1..201: note = Description of Artificial Sequence: Synthetic polynucleotide
  source 1..201: mol_type = other DNA
tagggtttcgatttttcgtggggtacgcgcgatttcggcgtagatgttagttcgttgtttttcgggttgagggagcgaggattttagacgattttagggtcgttgtttaggtttagtttcgcgttttttatttcgttatttcgttttgcggttttagtttggagatttacggattttattgcgattttttgcgtagtgtag

SEQ ID NO: 4145 - DNA, 201 bp, synthetic construct
  misc_feature 1..201: note = Description of Artificial Sequence: Synthetic polynucleotide
  source 1..201: mol_type = other DNA
taaatgggttaaataggttcgtaaggttttcgcgggttttttggttcggaagttgagtcgcgggtgtttggtttgaagtttcgcgttttatagtggttcgcgggtttcggcggtttttgttttacgttttttaaggtattaggtaggtggttttagggtttttgtttacgatattttttgggtggggtaggattatttttt

SEQ ID NO: 4146 - DNA, 201 bp, synthetic construct
  misc_feature 1..201: note = Description of Artificial Sequence: Synthetic polynucleotide
  source 1..201: mol_type = other DNA
tgtagttcgttcggcggcgttttcgggcgagggtttggtgttggggagcgagcgcggagcgaggtgtttttttaaatacgttttgtagtgtgacggcggtcgttcggttggaagagttatttttattttgcggtaggagttcgttcgtcgttatcgttcgtttcggtttttatggttacgcgtttgttttcggtttcgggt

SEQ ID NO: 4147 - DNA, 317 bp, synthetic construct
  misc_feature 1..317: note = Description of Artificial Sequence: Synthetic polynucleotide
  source 1..317: mol_type = other DNA
cgcgttttgttattaggcgttgtagttgttggtcgagttttgtgttcgtggggttttggagtacgatagttgttaggattttatttattatttgcgggatcgtgttagatttcggtttcgcgatttaggtgagtgtcgttatcgtcgtttggagggatttaagggttttgggttgggatttggggtcgtatcggggtttgaggtagaatagcgacgcggattgggagagggcggggggcggttatcgagttaggagagtgattaagaattagcgtattgtggtttgatgttgtaattaggcggggattcgggcggtg

SEQ ID NO: 4148 - DNA, 221 bp, synthetic construct
  misc_feature 1..221: note = Description of Artificial Sequence: Synthetic polynucleotide
  source 1..221: mol_type = other DNA
tttgtattgtggagtacgttatgattgtttacggtggtcgtaggtgtagacgttagtcggaatcggaatcggaatcggagtacgggttgtcgttttcgatcgaatcgcgggcggcgcggacggcgtcgcgcgagggataaggtgcgcgaggcgtacgtatttttatttttattgtcgggagttgatttgtttttttcgcgtggttattcgtcgttgtaaat

SEQ ID NO: 4149 - DNA, 201 bp, synthetic construct
  misc_feature 1..201: note = Description of Artificial Sequence: Synthetic polynucleotide
  source 1..201: mol_type = other DNA
tcgagagttttgcggcgttcgtttttttgttggcggacgtgttttttgagtcgttttcgcgtaggtaagaggttgtcgtttttagcgagggagagagtagcggcgattttatttagttatcggacgtcgtttcgtagtgttttgcgggtgcgaattttaattcgatatattaggtgttttgaggggatggtggtcgtttat

SEQ ID NO: 4150 - DNA, 201 bp, synthetic construct
  misc_feature 1..201: note = Description of Artificial Sequence: Synthetic polynucleotide
  source 1..201: mol_type = other DNA
gtaggggagagcgagtatgtttttgtttcgggcgtcgtgcggtcgtagtagtagcgcggttttttttagtgcgagtcgtgtttggaatgtttcgggtaagcgaagggttagtaagcgaggcgaaacggatattataaagtagagagtggtgtgagttttttcgttttttgaaaagatggtaagttttcgtttcgggaaggt

SEQ ID NO: 4151 - DNA, 201 bp, synthetic construct
  misc_feature 1..201: note = Description of Artificial Sequence: Synthetic polynucleotide
  source 1..201: mol_type = other DNA
gagttttacgtcgtcgtcgtcgcgttagcggtggggggcgggttgggggcggggcggtcggggttgttttttcgggcgtatatgcgagcgtagtattcggcgttgtcgagttatttttttcgtcgttcgttagtaagtttggcggttttaagttaggcgcgttttaggatttaggtttatttgtttttatttagtttcggt

SEQ ID NO: 4152 - DNA, 201 bp, synthetic construct
  misc_feature 1..201: note = Description of Artificial Sequence: Synthetic polynucleotide
  source 1..201: mol_type = other DNA
gggtatagttacggtaatttttagtttgttaatgttaaggcgggcgcgtaaggtcgtttaaatttagatttttttttttatttattttaaaaaataataacgtgttagttattttcgtagatatcgtcggttggtgtttgtttaggagacgttagggttagagcgttatttttagtatcgaaatggtagagagaaagcgta

SEQ ID NO: 4153 - DNA, 230 bp, synthetic construct
  misc_feature 1..230: note = Description of Artificial Sequence: Synthetic polynucleotide
  source 1..230: mol_type = other DNA
tcggtgttttttttcggtcgttttatttagtaatttttcgtgttttgtttttcgattggaaatgttttacggaagcgttttggatagggttttcgttaggcgataagagttcggtgttgagatgtgttacgtttttatttttttattaattatggatggaaataaataaggaagagttaattttgttgagtttttttttcggtaacgagaggcgttttgtagtcgggagg

SEQ ID NO: 4154 - DNA, 201 bp, synthetic construct
  misc_feature 1..201: note = Description of Artificial Sequence: Synthetic polynucleotide
  source 1..201: mol_type = other DNA
gttttttcgagttggtcgtttttgtagatttttacgtttagttgttatagcgtcgtttcgattttttcgttaagtatattttgtattgtaaggttaagtacggtcgtcggtttgggatttagtgttatcgggaggaaaagagagagatttggggttggggtatggatgatggggggaagggcggtcgtttttgttattgtt

SEQ ID NO: 4155 - DNA, 201 bp, synthetic construct
  misc_feature 1..201: note = Description of Artificial Sequence: Synthetic polynucleotide
  source 1..201: mol_type = other DNA
tcgtagacgtcggaggcgttatggtcgttaagttcggcgagttgatgggtatttgttttagttattaggcggtgatgtcgtatttcgtgtgtttggtcgacgagttttcgtagttcgtgcggttcgttaagttgtttaagggtcggggtcggttgcggcggtcgcgttagtttcgttttaagacgtagtcggtgattttcg

SEQ ID NO: 4156 - DNA, 201 bp, synthetic construct
  misc_feature 1..201: note = Description of Artificial Sequence: Synthetic polynucleotide
  source 1..201: mol_type = other DNA
gtagttttaggaagtcgtagtcgtcgtcgtcgtttaggtagagtagtagcgcgcgcgtggcgttggtgcgtaggttgaagttgagttcgtcgttgttcgtcgcgttcgtttagcgcgcgtagcgagtttattgttcggggtcgtcgtcgaattttaggtcgttcgcgcgcgtcgttagcgttagtagtagtagtaatagta

SEQ ID NO: 4157 - DNA, 201 bp, synthetic construct
  misc_feature 1..201: note = Description of Artificial Sequence: Synthetic polynucleotide
  source 1..201: mol_type = other DNA
aagtttttattttttggattcgggtttggcgttttcgttttcggcgcgtttttattcggcggacgcggtcgcgtataaggtttagtacggttcgcgttttcgtagttcggtcgcggttgaatatttttagcgcgaagcgggtgggcgttagtagtttcggggacggcggtttttaggtttgaaagttggcggttcggggtt

SEQ ID NO: 4158 - DNA, 201 bp, synthetic construct
  misc_feature 1..201: note = Description of Artificial Sequence: Synthetic polynucleotide
  source 1..201: mol_type = other DNA
ggttttttagtttgggttaggtcggggcgcgtgtttcgggttttttgtggttgtatcgcgcgttttgtgtttacgggcgaaggcgttggaattcggcgttcggagttcgagtttttgaaggcgggaggcggcgttcgattttaggggttgcgttgggttgtcggagttaagagtgtttgcgtttttagtttcgcgttagaa

SEQ ID NO: 4159 - DNA, 201 bp, synthetic construct
  misc_feature 1..201: note = Description of Artificial Sequence: Synthetic polynucleotide
  source 1..201: mol_type = other DNA
ttagagtgtgattgagcgggttggttcggcggtcgttgtttttcgttttcgttttttcgcgtttggtcgcgttatttattgtcgcgggtgttcgcgtgcgcgtcgtcgatgcggtcgtcggggagcgtttggaggtggaagtcgatgtttacgttgtagtagagtcgtcgtagtcgtttgatgtttagtaggtagtcgtcg

SEQ ID NO: 4160 - DNA, 201 bp, synthetic construct
  misc_feature 1..201: note = Description of Artificial Sequence: Synthetic polynucleotide
  source 1..201: mol_type = other DNA
tatttagaaaatggaaagttgagtggtcgatgaatcggaattgggagtagttttttatgaattagagaaaatgtaagttaaaaggagatattattttttacgtattagattggtaaatattaggaaatattaagttttgttgaggaggaggggtttagggagtttttatattatgtgggtgggattgtaatttggtataat

SEQ ID NO: 4161 - DNA, 201 bp, synthetic construct
  misc_feature 1..201: note = Description of Artificial Sequence: Synthetic polynucleotide
  source 1..201: mol_type = other DNA
ttttcgggacggacgttttaggcgcggcgtcgagtggaggcgagggggttgcggagggggaaggggttacgcgggttacggggtttaatttttgatttttcgcgacgttaagaatgtaggagggtagagttgagggagattttaggtggaatttttaggtggggaaggttgagttgtcggggttgcgggtatcgggaaggt

SEQ ID NO: 4162 - DNA, 201 bp, synthetic construct
  misc_feature 1..201: note = Description of Artificial Sequence: Synthetic polynucleotide
  source 1..201: mol_type = other DNA
tcgtcgtcgtttgttcgggacggtttcgtgaagaaggacggaggtagattgcgtgttcgtagcgggatttttttggtttttgggatcgtcgtggttttcgcggggtttgttacgttttttttcgcgtttttagtgttcgtattttttagttcggtcgtcggcgtagttattttatttttcgtcggttcggtattttcgggg

SEQ ID NO: 4163 - DNA, 268 bp, synthetic construct
  misc_feature 1..268: note = Description of Artificial Sequence: Synthetic polynucleotide
  source 1..268: mol_type = other DNA
gcggttagatttcggttttgtaagttggcggtcgcggcggtttgcgacgtttttcgtcggggggtagttttgtcgtgggtcggggtcgcgattgtcggggcgttaggggcggttagcggtcgtttggttggcgtgtcggcggcgttcggggagggcgggtcggggggcgcggcgtttatgaggtcgttgtagcgtttgatttgtttttgtaggtatttgcggtggtttatttttcgtttcgatttgttcggtttgtttagcgttagtt

SEQ ID NO: 4164 - DNA, 614 bp, synthetic construct
  misc_feature 1..614: note = Description of Artificial Sequence: Synthetic polynucleotide
  source 1..614: mol_type = other DNA
agagttattttgttcgttgttttggattttgaaatttgggagatttatattaaaggagggaatcggtttttttattttttaagcgcgtcgtgttttttatcgtttttttttttggttcgattggttttggttttttttacgtttttagtttttaaattggcgttcgttttatggttcgtgtaggacgttaaaagtacggtaaattttagggcgatttttagtagacgttttcgacgtatgatgtcgagtcgttatcggttttcgtcgttttttgtcgcgttcggggttcggtttgcggtcgtcgttgcgttttgaagcgtatcgcgtcgtcggggtttcgttatttcgtcgttcgtttttcgggtcgggtttttttcgttttttttaggcgttgtttttattttaggcggtttttgttagttgtaatatagagataaattttcgaggcggggagatttttagggtatcgggatgttgaagtttcgcggtttttatttttaagtttaattcgtgcgtcgtttgcgcgtggcgtagttaatttgggtaagggaagatcgtttggtttatagttggttggaaagtttaggttttcggcggtagtagtttcggtcgat

SEQ ID NO: 4165 - DNA, 201 bp, synthetic construct
  misc_feature 1..201: note = Description of Artificial Sequence: Synthetic polynucleotide
  source 1..201: mol_type = other DNA
gggtattagtttcgagtttaggttttattttcgggcggttcgggacgaattttttttataggttagtgtgtgtgtagggtaagtgtagggggttgaggggcgttggcggggaggtagtagaggtggtttggattattttggcgcggcgcgcggtgagcgcgaggatttcgttagtgggagtcgttgagttaaagtgtattt

SEQ ID NO: 4166 - DNA, 201 bp, synthetic construct
  misc_feature 1..201: note = Description of Artificial Sequence: Synthetic polynucleotide
  source 1..201: mol_type = other DNA
ttcgcggcgacggtgacgcgttttggttttgataagtttggttttttttattttatcgggtggcgtcgttgttgattttacgtttagtcgtttttattttcgtttgaaattttttcgatagggtttcgtttcgggggtttagtttttagcgcgtatatattcgcgtggtgtcggtttagttttttgtaaaggaagtagggt

SEQ ID NO: 4167 - DNA, 201 bp, synthetic construct
  misc_feature 1..201: note = Description of Artificial Sequence: Synthetic polynucleotide
  source 1..201: mol_type = other DNA
ttgtagttagtcggcggtttaggtaagagataaggtgtgagtaaaggtttttgatggtcgggtggtttgacggttaggtgcgagtggggaggatagtttacgcggtttgagtagttatttttggttatagttttagttttcgtttttgttttcggtttttgttttggtttgtttgcgcgttatttcgttatttcgtagtgt

SEQ ID NO: 4168 - DNA, 201 bp, synthetic construct
  misc_feature 1..201: note = Description of Artificial Sequence: Synthetic polynucleotide
  source 1..201: mol_type = other DNA
cgttcggtcgtcgtttttagttaattcgggttttttttacggcgattaattagtgcgaagttggttgggcgggaagtcgcgagaggtttttattgcggcgcgggtggcggttaggagttgttaggatagtttttcggtgttttagtttaacggtttcgtttatttatcgttaagagaaatttcgttttgcggtcggttttt

SEQ ID NO: 4169 - DNA, 201 bp, synthetic construct
  misc_feature 1..201: note = Description of Artificial Sequence: Synthetic polynucleotide
  source 1..201: mol_type = other DNA
cgggtattgcgaattgtcgggcgatgttgtcgttgtcgtcgtgatacggagagtaatagttttttagtaatattttttttcgatataggtatatatttttcgataggtacgtatatttattttatagtgttcggttcggttgcggtgagtgaggggtcgggaagaggcgtatcgtttagcgagcgtcgcgcgtcggggttt

SEQ ID NO: 4170 - DNA, 261 bp, synthetic construct
  misc_feature 1..261: note = Description of Artificial Sequence: Synthetic polynucleotide
  source 1..261: mol_type = other DNA
ggatcggcggtgatatcggagttcgtcgtgcgttttcggtcgttttcggtgggtgtcggtttttgtatttgatgcgttcgggatgttttttttattttggcgcgttcgtcgttagttcgtatagcgtttcgtatattttcgtacgcgtttgaaatgcgtacggtttcgtcggttcgcggaattattcggacgtacggagcgtttcgtatcgattcgttcgtcgttttttcgagacgttcgtatcgtgtttgggtcgggcgc

SEQ ID NO: 4171 - DNA, 201 bp, synthetic construct
  misc_feature 1..201: note = Description of Artificial Sequence: Synthetic polynucleotide
  source 1..201: mol_type = other DNA
cggttagggtaatagttagggtaaagggagagagaagtcgtttcggggcgagaaggagaaaagttagagggttgaataggtgacgttgagtttgttggagcgtgtgtgttttattacgtaagggcgcggagttcggtcgttttatttttcgttatttgcgcgttcgggggtacgttttttgcgatagtttggaatttagat

SEQ ID NO: 4172 - DNA, 201 bp, synthetic construct
  misc_feature 1..201: note = Description of Artificial Sequence: Synthetic polynucleotide
  source 1..201: mol_type = other DNA
gggtatcggtgtcgacgtcgcgagggtagcgttcgcggcgggaatattaatgtattttaaagggtacggtcgtcgtcgtagtaggtaattagttggatcgcggcggagcgcgcggaggtggttgttggttgtaaggattgcgtttagttttcgtttcgtttttcgaggttttcgcgtgggtcggcgggtagtgcgtgggtt

SEQ ID NO: 4173 - DNA, 201 bp, synthetic construct
  misc_feature 1..201: note = Description of Artificial Sequence: Synthetic polynucleotide
  source 1..201: mol_type = other DNA
ttttttgtttcggtttcgtgttttcgttggggattgtttgcggtgagtttgtcgtacgtacgttagggtcgaggtagtgatgcggggtagcgtgggaggacgggttgcggagttcgcgttattttgtttgtggggagcgttgtgtttgtttttttgttagcgcgtttagttgtttcggtcgtcgttacgcgggattgtttg

SEQ ID NO: 4174 - DNA, 201 bp, synthetic construct
  misc_feature 1..201: note = Description of Artificial Sequence: Synthetic polynucleotide
  source 1..201: mol_type = other DNA
ggaaaatagggtattcggagtgtaggagattttttagggtcgttttttttttcgggggtgttttgaggaatcgcggcggggattcgtcgttggtagtttgcgggttttggtgttagcgcgtatgggcgggttgtgcggacgtggttggttttttaaaggttttagatttcgttcgggtcgtttagttttttaaagttgtgt

SEQ ID NO: 4175 - DNA, 219 bp, synthetic construct
  misc_feature 1..219: note = Description of Artificial Sequence: Synthetic polynucleotide
  source 1..219: mol_type = other DNA
tttcgggttaggaagttgttaggtaggggagggttagcgttagttgtggacgtttcgggatagttttttattttagtttttgtttttgttttcggcgcggcgtaaacgtaaaagttttcgtggtcgtagttttagtttcggtggtcgttcgattttcgtcgggatttcggttgtatttattggagaagcggcggtttcgattttcgaggaggcggcggc

SEQ ID NO: 4176 - DNA, 268 bp, synthetic construct
  misc_feature 1..268: note = Description of Artificial Sequence: Synthetic polynucleotide
  source 1..268: mol_type = other DNA
tttattattgtttttttttttcgttttttatttttttgtagcgttaagtcggttttttaatttggtttgttgaacgtaaatcgttgagagtttgttgtatcgttttttggggtttttggttgtcgagtttcgttaaggtaaagacgttagtaagcgaggaagcgtagcggaagaaaaataagcgggcgcgcgaggggagttttaggagggttgtcgagtggttggtaggcggttttcgtttttttcgggtggtttcgtcggcggttga

SEQ ID NO: 4177 - DNA, 201 bp, synthetic construct
  misc_feature 1..201: note = Description of Artificial Sequence: Synthetic polynucleotide
  source 1..201: mol_type = other DNA
tttttcggttttaggattggggagtgtgtcgcggggtcgagggtggggaatagttagagggagacgcgaattaggtcgttggcggagggtttagggggagcgtagaggcgacggtttttatgtcggcggttaatatgatggagaatcggtcgttgttcgttttgtaggtgttcgagtcgtagggtgcgttcgagggtagtt

SEQ ID NO: 4178 - DNA, 517 bp, synthetic construct
  misc_feature 1..517: note = Description of Artificial Sequence: Synthetic polynucleotide
  source 1..517: mol_type = other DNA
tagagcgcgggttttcgggttttatttcgggaaaagtttgggtttgttttgcgttgttgcgtgttgcgtttttgggatttgttgattgttttagagggaacgtttcgcggtagtgttagttttttggggattaggaagggcgatttttgtttgggagttagtgtttgggtcgtcgggttcgggtaagcgttgggggtttggttcgagaagatgcggataggtggtttagggcgtcgcggattttcgttttttgcgggtatcgggagtttagggtcgaggcgcgtcgtttcgaggggtttttttttttaataatgcgttcggaatggagttcgcgttttgatagcgcgggttagttcgaaatcgtttagaattcgtttcgatgagtgggtgagtcgttttgggagtttgtcgcgtttcggtagcggagggtttgagtggaaaaatttttattggatgtattttttaatggttggtttgtttcggttttcgttcgagtttttttcggtagtaggcgttg

SEQ ID NO: 4179 - DNA, 226 bp, synthetic construct
  misc_feature 1..226: note = Description of Artificial Sequence: Synthetic polynucleotide
  source 1..226: mol_type = other DNA
cgcgtttttttagtcgcggttttttttttcgtcgtttttttttgtttttttagtttttttttttacgtgtggatgacgttaaaatttcgcgaaaaagtcgcgtggtggtttttcgagcggaggcgcgatttcgtcgtttagcggttttttttcgggggcgtttggagggggagaagggcggaggcggtcggtttttttttttttcgggaggtaggatttttcgacg

SEQ ID NO: 4180 - DNA, 201 bp, synthetic construct
  misc_feature 1..201: note = Description of Artificial Sequence: Synthetic polynucleotide
  source 1..201: mol_type = other DNA
ttttcgggaggcgagtcgcgggttgttgggcgcggaggttggagtcgcgagaggttcggttgttgaagcggttattgttttttagagttaggtttcgcgtcgcgcgttttcgtcgtcgtcggtattgtgtatttatttatttttcggagattggggtaggggaaaaaagttttgaggcgtttttatttttgttttcggggt

SEQ ID NO: 4181 - DNA, 212 bp, synthetic construct
  misc_feature 1..212: note = Description of Artificial Sequence: Synthetic polynucleotide
  source 1..212: mol_type = other DNA
tttcgggcgtttggtatttttttttatcggggtttcggcggcgcgcggcgtttgttcggaggggggttcgggtatggtgttgcggtagttggattcgtcgcgagtttttcgcgtttcgtcgtcgtttgcgtcgcggagttggtttagttgtaaataaatagtagttttttcgtttttttcggttatcgttatttttttcgttttattgcgta

SEQ ID NO: 4182 - DNA, 388 bp, synthetic construct
  misc_feature 1..388: note = Description of Artificial Sequence: Synthetic polynucleotide
  source 1..388: mol_type = other DNA
ttttttcggttatttgtgttgttttcgttttggttgtttttgtttcgagggaagatgttcgagtattttttttattttatttggtcggcgaagtatagttcggtgacgatgtgtagagttttttggtatagattgtttatttcgttttttttgtggaaatttatcgtttggtttttttttcgtttttttttttttttttagttagtcgttttttttttttttcgtatttttaatttttttggcgttttaagttatagttcgttcgcggtgattttggttggagattgcgtcgttgagagtcggtaatttttaggagttttacgttggttttatggcgggagcggagggcgtaggggaaggagaggcgcgcgaggaggttgcggttgtc

SEQ ID NO: 4183 - DNA, 201 bp, synthetic construct
  misc_feature 1..201: note = Description of Artificial Sequence: Synthetic polynucleotide
  source 1..201: mol_type = other DNA
tttttggatgttaaattcggtttagggagtttaggagtcgttgtagttttagtttttttttttttttttttcgatgattcgggtaatgttaattttttttcgggattgaaagttttaaatttaaggtgttaagttgatgggcggtttttgtttttatttttcgatttcgggcgcgtgttttgaaagataggagagaaaaaa

SEQ ID NO: 4184 - DNA, 201 bp, synthetic construct
  misc_feature 1..201: note = Description of Artificial Sequence: Synthetic polynucleotide
  source 1..201: mol_type = other DNA
tcgtggtattttcgttagagtttaagtagttttttaggcgtggggtttggtggacgttggtttggagcgttcggagggcggggtgggggtgggggggacgcgttgtcgtttggggtgttttcgcgtatttttgttgggcgaattttggtttttcggtgttggttgttatttgagtaattgatgggtttttaggggaagtaa

SEQ ID NO: 4185 - DNA, 212 bp, synthetic construct
  misc_feature 1..212: note = Description of Artificial Sequence: Synthetic polynucleotide
  source 1..212: mol_type = other DNA
ttcgtcgttttttttttatttcgttttttatcgtcgtttttagttttttttcgggatgagagagagtcgcgttgcggagtaattttagtggatgggttcgcgggggttgagcgggcggaggacgcgggaatttcgtgatatcgattagttgacgttgttcgcgtgaaattagagtcgggtattagggttttatttttattgtttttgtattt

SEQ ID NO: 4186 - DNA, 250 bp, synthetic construct
  misc_feature 1..250: note = Description of Artificial Sequence: Synthetic polynucleotide
  source 1..250: mol_type = other DNA
taggagggtgggtgttagtttttttttttatttttcgagtttttttttcggcgtttacgtgggcggagtagcgcgagggtgtgcgtggtaggggtcgcggcggcgtgtgtcgtgcgtggggtggggtgcgggttgggcggtttcgttttcgggtttcgcgtcgtcggggcgcggtttttagttttattttttttgttatttgggcggagatttgggggattgtgatttattttgcggaagatacggaggg

SEQ ID NO: 4187 - DNA, 488 bp, synthetic construct
  misc_feature 1..488: note = Description of Artificial Sequence: Synthetic polynucleotide
  source 1..488: mol_type = other DNA
atacgtttttcgttagtttgggcgtcgggtttcgaattttcggtttgtaaatttgcgtattttttttcgtcgcgttcgttagataatttggcgaatagttcgttcgttcgtatttcgtttttttcggttttttttttaaattttaaacgtatcgtcgtgttttaaagaaggtgtttacgtcgtttttagatttcggagcgttttttttttattttcgggattttttaggtcgtttatttttttcgtttttcgtttagatttgagagggatcgaaaatatattttcgattcgggtagttagggtcgaaattgttaagaggagaaaaggtaaagcggaaggagggtggttataaatagatttttttgtttttttttaaaaggatattgtcgttttaaaagtttttttttcgggtttttatttttcgtattttcgtattttgggggagcgtatttaattgaggtaacgtagtttttttttagtgtttgtag

SEQ ID NO: 4188 - DNA, 201 bp, synthetic construct
  misc_feature 1..201: note = Description of Artificial Sequence: Synthetic polynucleotide
  source 1..201: mol_type = other DNA
ggttgaggagaagggagggagagtagagggaggggggaattcggtcgggggaggaggagagaggcgaggaggcggttttggtagcgcgcggcggcggcggcggtagcggtagtagtagcggcggtgcggagagtttggattgggagtttaaagttcggttgggtagcgggagaggaggagtcgtaggagttgtagttttgt

SEQ ID NO: 4189 - DNA, 364 bp, synthetic construct
  misc_feature 1..364: note = Description of Artificial Sequence: Synthetic polynucleotide
  source 1..364: mol_type = other DNA
ttttataattaaggagtatggtggagttgggttaattttaggtatagtttagtcgagttaggcgaggtttagagagatttgattcgtttggtagttttaacggatttgttttcgtagtcgttgcggatttttcggtcgttatggcgattgtgaaatgtggggtggggcgtatgcgttggaagttattcgcgcgggtagtttttgagtgtttttttacgtgttttttagcgcgagtagtattttcgtttttgcgttttttagagcgtgtagttttcggtgagggtagttttacgtatagttttttatattttttttagcgtttgtagttttcggtgcgcgtaggttttaagtttatatgcgtagt

SEQ ID NO: 4190 - DNA, 220 bp, synthetic construct
  misc_feature 1..220: note = Description of Artificial Sequence: Synthetic polynucleotide
  source 1..220: mol_type = other DNA
gtttttatttcgagcgcgtagttttacgtagtttttttatattttttttagcgtttgtagtatttttagtgcgtatagttttgttagtcgttttttcgggcgtcgtttttgtattatttcggtttataattttgcggcgattgtttgaagaatttttcgtggttttattttttttttcgggtttagttttagttgtgatattttaattaaaagattatac

SEQ ID NO: 4191 - DNA, 201 bp, synthetic construct
  misc_feature 1..201: note = Description of Artificial Sequence: Synthetic polynucleotide
  source 1..201: mol_type = other DNA
tcgtttttttcgtttcgagcgattttttgttttagttttgtaggtttcgtattgtagatgtttgttggtttttttgcgttcggcggttttcgcggtgtttcgtaagttttcgtgattttttagtattagtcggttgtgcgttttttgtttttacgggtcggttagtcgtagatatttatttagtttcgcgagtttagtcgt

SEQ ID NO: 4192 - DNA, 201 bp, synthetic construct
  misc_feature 1..201: note = Description of Artificial Sequence: Synthetic polynucleotide
  source 1..201: mol_type = other DNA
ggggtatcgcgttggtatttgtagggagcgattggtttggaagggtagagggtagacgggggtttgggtggggtagcggttattttaggcgcggagaattcgttgtttttatttttttttcgcggatttttattttgcggtttgtgtgttcggtttttttcgcgtggcggggaagtgcgggtggttgttcgggtttttaga

SEQ ID NO: 4193 - DNA, 201 bp, synthetic construct
  misc_feature 1..201: note = Description of Artificial Sequence: Synthetic polynucleotide
  source 1..201: mol_type = other DNA
gtgtcggttttcgaacgtatttcgaggcggggtgagggttggtagtcgtttttgtattcgtcgttgcgagtcgcgttttttaaatttaggtatgggatttcggaaaatcgattcgttgttttgagtgtttattacgtgaggaattggagtggtcgagttcgttaaggcgtcggggatatttgagtagatgagaattggagt

SEQ ID NO: 4194 - DNA, 358 bp, synthetic construct
  misc_feature 1..358: note = Description of Artificial Sequence: Synthetic polynucleotide
  source 1..358: mol_type = other DNA
gcgtagcgtttgagtttgcgtttcgttaagtgtattaagtacgagatttagagcgttatggagatcgtgttgttttggggtttggtcgcgtattgtacggcggttgcgttggtcgtattgtttttttataatatgagtagcgtcggcggcgatcgtttgggtcgcggtaagtcggttcgttgcggttttatttttttcgtgggtcgcgtgtatcgttggatggtggatagtcgcgtggcgttgcgtatttacgagtacgtcgttatttatttgatagtttgtatggagagtttttttcgggatatttattcgcgggtcgtggttttcggggtgtttcggagttgtagtggttttgggt

SEQ ID NO: 4195 - DNA, 201 bp, synthetic construct
  misc_feature 1..201: note = Description of Artificial Sequence: Synthetic polynucleotide
  source 1..201: mol_type = other DNA
ggagttttcgggcgcgttttgggcgtattggggaggttttcgggcgggtaggcggacgttttggggcggcgggcggcggttgtcggggttcgtcggggttcggtcgttcgttgtttatcgataggtattaggaattgatttcgtcgttgttttttgttcggtttagttatcgattagttgtcgcgattatggagaagcgtt

SEQ ID NO: 4196 - DNA, 328 bp, synthetic construct
  misc_feature 1..328: note = Description of Artificial Sequence: Synthetic polynucleotide
  source 1..328: mol_type = other DNA
cgtagggagggagggggtatcgtttgtttttttgttcgaaaggtggaggtaaagagggatttcggattttagagaggtttataattttttataagtaaggcggggggcggaatttagagaggtaaagtgattcgtttttaaatcgtaatattaggaggatagtagggttagatggaatttttcggtttatagttttcgatttcgggtaagtgttttattcgggcgtacggtttgtttttagattagaattaggcgcgttcgtagttaaggaagtttggcgggagattttttcgaggttttcggtttttaggttagcggggttaaggag

SEQ ID NO: 4197 - DNA, 201 bp, synthetic construct
  misc_feature 1..201: note = Description of Artificial Sequence: Synthetic polynucleotide
  source 1..201: mol_type = other DNA
cgttcggtgaagtcggtgtatttattatattttttgttgtttttagtagggaagtcggcggtgaggcgggggagtaggtatggtggtttcggggtttatgcggggtttattgtttatttagaatagcggttattgttgtttattagggcgtatttatcgttggagttttcgcggcgattgtttatttttaatatatatttt

SEQ ID NO: 4198 - DNA, 319 bp, synthetic construct
  misc_feature 1..319: note = Description of Artificial Sequence: Synthetic polynucleotide
  source 1..319: mol_type = other DNA
tggagtcggcggtcgcgttcgcgtcgttgttgtttggttcgttggcggcggggtcgggggttgtcggagttgattttatgtttttttttaatgtagagatcgttggagatggcgagtttcgagattttttttattttttgtttttagagtaattttatggtattaaaaaaaaaaaaaaaaaaaaaaaaaaaaaaaaaaaaaaaaaaagaaggagaaggcgatcggcgaaagtaggagggaaaaagtaggcggcggcgggcgggtaagtaaaagcgcgagggagcgcgcggagtgtttgggtggacgtgtgtgtgcgttc

SEQ ID NO: 4199 - DNA, 201 bp, synthetic construct
  misc_feature 1..201: note = Description of Artificial Sequence: Synthetic polynucleotide
  source 1..201: mol_type = other DNA
atcgcgggaggagagcgtaaggaggtttttcgtaaagttggaggttaggtcggagcgatgtttcgggagcggagtttttttagtttcgggtttttagtcgcggatagttggtagtgttaaagatttcgttattatttgcggttcgtagttgcgattcggtcgtagagtcgggtatcgaggaaggcgtaaagttgagtttgg

SEQ ID NO: 4200 - DNA, 370 bp, synthetic construct
  misc_feature 1..370: note = Description of Artificial Sequence: Synthetic polynucleotide
  source 1..370: mol_type = other DNA
agggcggttcggggtgggggcgttttatttttgttttttatggcgtgtacgaagtttttttggtatagttggttgcgaagttttttttttaggttgaagtcgcggacgttgacgattttttttacgttcgataagttttcgttttcgtcgtatcgttggcggttaatcgggcgttgcgaggatttaaattagagagttcgggatattattgtgggggttggaggtcgttttttaatttgggtttagtattaataggtgtagtagtcgagcgttttttgtattttattattgtaatttaagtaattttgcgtaattgttaaagatgttgaaaagtaggataaggagaggggttcgtatttcgagggtttag

SEQ ID NO: 4201 - DNA, 201 bp, synthetic construct
  misc_feature 1..201: note = Description of Artificial Sequence: Synthetic polynucleotide
  source 1..201: mol_type = other DNA
gttatgttggaatttggaggggaggggggatgttggagaggtatacggtgatggatatggaaggattcgggaggtgtggagtggtgggttcggttcgtcgcgggaaggatatagagggatataggttgttttggagaggcgttttcggatatttggaggggcgtatagtgttgggatttggcggcgtttggggcggagggg

SEQ ID NO: 4202 - DNA, 201 bp, synthetic construct
  misc_feature 1..201: note = Description of Artificial Sequence: Synthetic polynucleotide
  source 1..201: mol_type = other DNA
gtttttcgtttttacgtcgtagttcgggttagcggggttcgtcgcggtggcgttcgcggatgttgtcgtattggtcgttgcggtacggacggcgtagtttcgggcgcggttcggtataggcgtcggcggttttcgttagttagtagttcggcgaggcgttggtttatttatggttttcgggcggcggtttttgcgtttagt

SEQ ID NO: 4203 - DNA, 201 bp, synthetic construct
  misc_feature 1..201: note = Description of Artificial Sequence: Synthetic polynucleotide
  source 1..201: mol_type = other DNA
attcgttcgttcgtgggtgagttgggaggggcgcggcgagggagggtgggttcggggcgggggcggcgcggggcgcgtttgcggttatgcgatattgtttcgttcgcgtttcgtttttttttttgggttttttgggttttttgggttgtaggattcgtcgacgcggcgcgttggtcgtacgggggttgggcgtcgttgtat

SEQ ID NO: 4204 - DNA, 263 bp, synthetic construct
  misc_feature 1..263: note = Description of Artificial Sequence: Synthetic polynucleotide
  source 1..263: mol_type = other DNA
tgggttattcgtgtcgtatgtcggcgtagttgttcgttgtggtaaggggggggcggtcgggtttcggagcgggtcgggagggcgcggggcgcgtatttcgcggtaggtgagcggcgcggttgtaggtgagtagtagtttcggttcgcgcgtttagtttttttcgtcgcgttcgttcggtttatacgtttttcgcgcgcgcgtcgttttcgtttcgcgcgcgttcggtcgttcgttcgttcgtgggattttcgcgaggtcgcgc

SEQ ID NO: 4205 - DNA, 201 bp, synthetic construct
  misc_feature 1..201: note = Description of Artificial Sequence: Synthetic polynucleotide
  source 1..201: mol_type = other DNA
gttttgttttttttgtttttaacgaattggtaagtaaaatattagttgtttattttgaaatttgttttaattattttcgtattttttgaagttcgttgggcgcgttttgggttgtttttttttgagtagtcgggtttagagttaaggcgcgatgattgtcgcgtaagttagggtttacgcggtcggggtttttttttcgtt

SEQ ID NO: 4206 - DNA, 201 bp, synthetic construct
  misc_feature 1..201: note = Description of Artificial Sequence: Synthetic polynucleotide
  source 1..201: mol_type = other DNA
ttttttatttcggtatttttttttggtgacgttaaggggttttttattttttattcgtttttttatttattttttttttttttttaggttcgtttttttgcggttacggagaggggcgggggtcgacgagggcgggtggttcggggtcgagcgcgcgtggggaggtgttggcgacgcgggttcgggagcgcggtttcggta

SEQ ID NO: 4207 - DNA, 201 bp, synthetic construct
  misc_feature 1..201: note = Description of Artificial Sequence: Synthetic polynucleotide
  source 1..201: mol_type = other DNA
ttatttagttttgggggtcgttcgaaattggggaagggataaggttgaagtttcgtcgtttggttttaggggcggaaagttcgatttaagggaagttggtcgcgttttcgcgacggtgtttttggtacggaggattgaggcgtagttcggttgtttttttttgtttgtttttttcgcgttgtttcgtcgtttttgattttt

SEQ ID NO: 4208 - DNA, 201 bp, synthetic construct
  misc_feature 1..201: note = Description of Artificial Sequence: Synthetic polynucleotide
  source 1..201: mol_type = other DNA
cgcggggtcgggcggggatcggtcgggggcgtcgcgcgttcggtcgggttgattgtcgggggcgattttcgcggggtaaggcgggggcgcgggagtagcgcgtagttgcggggttattttatttgagcgttttgaggttagggtcggggtttgaggatacggcgttgggtttcgggggacgcgggtttacgtcggcgttcg

SEQ ID NO: 4209 - DNA, 215 bp, synthetic construct
  misc_feature 1..215: note = Description of Artificial Sequence: Synthetic polynucleotide
  source 1..215: mol_type = other DNA
ttatatttatcgtttcgggcgcgtcgttcgcgcgcggtttcgtttcgggtcggtatttttcggttcggttgttttcggttttcgtttcggtttcggttttcgtttcgtagggttcggtttcgcgatggtggtcgcggcggcgagcgcggtagggagggcgtgtgtatgcgcgtgagagcgcgtagcgtgtgtatgtgcgtgtgcgcgggagggtt

SEQ ID NO: 4210 - DNA, 201 bp, synthetic construct
  misc_feature 1..201: note = Description of Artificial Sequence: Synthetic polynucleotide
  source 1..201: mol_type = other DNA
cgcgagtgttttttaatggtagcgcgggcgtttttaatcgcgaggggttgcgttattatcggcgtttgttggagcggttgcgggagttgggcgtgtagttcgtggttattttgtattattgggatttgttttagcgtttgtaggacgtttacggcggttgggttaatcgcgttttggtcgattattttagggattacgcgg

SEQ ID NO: 4211 - DNA, 201 bp, synthetic construct
  misc_feature 1..201: note = Description of Artificial Sequence: Synthetic polynucleotide
  source 1..201: mol_type = other DNA
gtgttagtagtttcggggtcgttcgtacgtaacgttttcgggtcgggttaggttggttagggtagggcggtcgtttttcgaggaattgcgggcggggcggcggggttaagttgagcgttcgttttgttttcggcgtttcgcggttgcgggcggagcgggttttgcggagtttttcggtcgtttttttcgtagttttcgttt

SEQ ID NO: 4212 - DNA, 201 bp, synthetic construct
  misc_feature 1..201: note = Description of Artificial Sequence: Synthetic polynucleotide
  source 1..201: mol_type = other DNA
ttaggttgtttgtagcgtcgttttgtttttttattttagagcgtaggtgagtggttatttttttaggggatcgcggttgagagcgtttatttttttttttcgtatttggaaattgagtttggcggtagggttgggttatttagagtttgtatatttcggaagggaaagtgattttagaagggagagaggaagtgttgagtt

SEQ ID NO: 4213 - DNA, 217 bp, synthetic construct
  misc_feature 1..217: note = Description of Artificial Sequence: Synthetic polynucleotide
  source 1..217: mol_type = other DNA
tgtagttggtgttgtttttgggacgatgtagacgttttatatttaggcgcgggtgttaggtcgtcgggtattagtttatttttagggtttgtgagttgcgcgtattttttcggtcgcgtattttttgggaggttgtagttagagcgtttttgaagggagggcggtagaagatattttttttcggtttatgtaaatcgttgggggaattttagttaat

SEQ ID NO: 4214 - DNA, 317 bp, synthetic construct
  misc_feature 1..317: note = Description of Artificial Sequence: Synthetic polynucleotide
  source 1..317: mol_type = other DNA
aagcgagcgattttttgagttcgggtggttcggcgggtaagggcggcgcgggagattcgtagggcgcgggcgcggattcggggaattagggttatcgttgcgggcggatgggggttatcgaggcggttcgtttttaggcgtatatttcgtatatttttttgttaagtgaaggggttaaaatgtatagatgggggagtttatttaggaatagaggcgcgagacgtatagttatttttgggttgggagtacgagttagtagattttcggagcgcgttaaacggataatatgttcggtgttgtaaatagaggtttttgtt

SEQ ID NO: 4215 - DNA, 201 bp, synthetic construct
  misc_feature 1..201: note = Description of Artificial Sequence: Synthetic polynucleotide
  source 1..201: mol_type = other DNA
tatttttgtgggggggagggtgtagcgaaggttgttagggatttcgcgatcgcgttttaatacgtattggagcgagtgtgcgagtgattatgagtgtgagcgggtgcgagcgttcggcggggttgatcgttacgttggcggggtcggcggggttaggtagtttttttcgcgttttttttttttcgtttcgtgttttttttt

SEQ ID NO: 4216 - DNA, 201 bp, synthetic construct
  misc_feature 1..201: note = Description of Artificial Sequence: Synthetic polynucleotide
  source 1..201: mol_type = other DNA
acggtgttaagggatttagtttggcggatattttttattaggagatcgtaggtaagcgcgggcgcgttgtaggggtaggttgtagttttcggttgtcgtacgttttattggtcgttcggcgtttttttttttttttttgttgttgagttggtgtttattttttgttatcgttatgggatttcgcgttttcgtgttgggcgg

SEQ ID NO: 4217 - DNA, 201 bp, synthetic construct
  misc_feature 1..201: note = Description of Artificial Sequence: Synthetic polynucleotide
  source 1..201: mol_type = other DNA
gcgtcgtagtttttcgggtatcggcggcggtgattaatttgtaattttagcgtttagagttgttatggtgttcgcgggcggcggcggcggcgatagtgggcgatcggtaggattagtgttaggcgcggcgtttagggcgggcggggacgcgggttttttatttacggcggtttagtttaggtagcgcgttcggttcggttg

SEQ ID NO: 4218 - DNA, 201 bp, synthetic construct
  misc_feature 1..201: note = Description of Artificial Sequence: Synthetic polynucleotide
  source 1..201: mol_type = other DNA
gcggtgtgtacgggagttcgtcgggtatacgcggggtatatttaagtgtattgttaggaggtcgggagtttagcgtgcgagcgtgaggttagattgtgtacggtatcgaggattagttttatttttgagtatgaaagggtgaaatcgtttattttaagttttatttcggagttattaaataatgaatgtattagttatatt

SEQ ID NO: 4219 - DNA, 201 bp, synthetic construct
  misc_feature 1..201: note = Description of Artificial Sequence: Synthetic polynucleotide
  source 1..201: mol_type = other DNA
gggttggtcgcggattcggacggtcgggagcgggcgcggcggtcgtagagacggttttttttcgcgcggttttagcgtagattttagatttggagtcgtgcgggcggagacgcgcggggttttttttcgtttcgtcgtcgttgggtttttagcgttttcggattcgcgggaggataggaattattcggagtgaagttgcgt

SEQ ID NO: 4220 - DNA, 221 bp, synthetic construct
  misc_feature 1..221: note = Description of Artificial Sequence: Synthetic polynucleotide
  source 1..221: mol_type = other DNA
tcgagatataaagatcgaggttgagatcgttaggggttgagggtgaggtcgcgtttcggggtcgttggagcgcgggcgttatgcgagattgtttcggttgcgcgtcgttttagaggagttcgagcgttttttttagtcgcggcgcgttggttttggtcgggattgtagttaggtgggcgtcgcgcgtgtgagcgtcgcgcgtgtgagcgtagatttggatt

SEQ ID NO: 4221 - DNA, 311 bp, synthetic construct
  misc_feature 1..311: note = Description of Artificial Sequence: Synthetic polynucleotide
  source 1..311: mol_type = other DNA
gattattgtcgaatagtcgttggagattcgtagagaagggcgggttttgcgttcggggcgtttcggaggtaagttcggagagttcgggtcgggcggagggcgggagcgtacgagtgtgtgtgtgtgtgtgtgtgttcgcggtgtgttcgcggttcggtgtatacgcgcgcgggttgtaaagttaggagttgcgggagcgtttttttgtttcggtttggtttcggagtattgcgggtcgcggaggtgtgggggtttttgtcgttgcgtttagggtagcggcggaaaaggtgtgtgcggatgcggggcggggt

SEQ ID NO: 4222 - DNA, 308 bp, synthetic construct
  misc_feature 1..308: note = Description of Artificial Sequence: Synthetic polynucleotide
  source 1..308: mol_type = other DNA
ttgagtcgtagaaggtttttttcgcgtttttttttagtagggatttttggacggggagatcgacgggtttgtgggcgttttttcgggatatatttcggttcgttttgtttgggttgggtttatttacgttttgggtggggtttaggaattgcgtgcgggcgtagcgggtgagtatgttgatgatgattatttggttttatttttttacgtcgattagtaggttatagagttttcggtagtttttgtgaattaggtcgatgcgtttcgggtagatttttttaaaggttattattatattgttcgttatt

SEQ ID NO: 4223 - DNA, 201 bp, synthetic construct
  misc_feature 1..201: note = Description of Artificial Sequence: Synthetic polynucleotide
  source 1..201: mol_type = other DNA
aatgtgatatagatattagtttttcgtgtttttggtttttagggttttttttatcgcgttttagtatttgtagtttttttatttttatagcgttcgtcgtcgttaaggtaatagagggatgttcggtgatagattcggcgtcggttttcggcgtcgtaagagaagcgttcgcgcgggcgttttggattcgtagagttttcg

SEQ ID NO: 4224 - DNA, 201 bp, synthetic construct
  misc_feature 1..201: note = Description of Artificial Sequence: Synthetic polynucleotide
  source 1..201: mol_type = other DNA
ttattttatttgagcgtggttaaattgttgttatttagtggggagtaaaaaaaaataatttgtattatcgaaacgagttagtaattggttgggaggcgggcggtagttgggtttcgcgtgttttcggcggtcggggtttttttcggggagaggtatatatacgtatagtcggatcgcgtttcgttagggtcggagttattt

SEQ ID NO: 4225 - DNA, 201 bp, synthetic construct
  misc_feature 1..201: note = Description of Artificial Sequence: Synthetic polynucleotide
  source 1..201: mol_type = other DNA
ggtgggagtcgcgaggagcgtttagtggcgcggtttgtcgggtatggtggtcggttcggcgatcgttgattcgtcgggttcgggggttttggaagcgaggcgcgtttttcgatttcgagattttgtagggttgtaatagacggtggggaggtaaaaaaaaaaaaggaaaaggaaaaaatggtgttaaagttattaagtttt

SEQ ID NO: 4226 - DNA, 630 bp, synthetic construct
  misc_feature 1..630: note = Description of Artificial Sequence: Synthetic polynucleotide
  source 1..630: mol_type = other DNA
tcggttagtttattttcgcgtttcgtaaatttttttaatcgggtaataaagtgagtagcggtggtcgtcgcgatttttttaatttcgtatttcggaggttcgagggggttttgggatcgagcggtttcgtagcggcgatagaaatatatattttacgaaaaagaaaaaaaaaaaaacgagtcgcgcgaattcgttaagttagatgtgcgcggtttgaagcggaggaggttttgacgttagttttatttcgcgtagttcggtttggtcgtagattcgtcggttattcgtcggcggtttaggtcgggaggggttaggatagtttcggtcgcgcggtggacggaggggttattttttcgggcgttagtaaataaattttattcgagttaatatcgtttagcgaacggtgtttttttttagttattcgagaacgagaggtatttttaattagaaattaattaatgagtagttgttttttttcgttttattgtaattattcgttttaattataaatgagatttatgaaaggatacgttgaagatgtaattaatagttaaaattagttcggcgttgcgtaggcggtcggttcggtttcgcgttggcgcgttttgtttcgagtggtaggaaggggtt

SEQ ID NO: 4227 - DNA, 201 bp, synthetic construct
  misc_feature 1..201: note = Description of Artificial Sequence: Synthetic polynucleotide
  source 1..201: mol_type = other DNA
aaatgggattagagcgcggagggagtttggttaggaggttttttaggatttagtcgcgacgttgaaaagtatgaagggtcggaattaggtatttatttagcgagcgttattaattcgaagttatagcgttaattttttgattcggtcgtttttatacgtagcgtcgggattagaggcgcggtcgtcgttcgtttcgttttt

SEQ ID NO: 4228 - DNA, 239 bp, synthetic construct
  misc_feature 1..239: note = Description of Artificial Sequence: Synthetic polynucleotide
  source 1..239: mol_type = other DNA
gaagaaatcgggtaaatagttgtttttaggttcgtgttacgagttttggcgggatttttttttttttttgtattttttatttttcgattttttttgtgtgcgtcgcgtttcgttgtagtttcgttggagagatggggacggtttggtagaaggtggcggcgataggggttcgggacggtttggggagaggagggtgggggcgcggttgttgtggggtgttttcgggcggggtttacggg

SEQ ID NO: 4229 - DNA, 201 bp, synthetic construct
  misc_feature 1..201: note = Description of Artificial Sequence: Synthetic polynucleotide
  source 1..201: mol_type = other DNA
tgtttagtttttcggaggagtattatgttttgatattttcgttttatcgttttaaagttggtttggggtttcgtagggagtggtttgtatggggagggttcgcgtgttgtgtttttgggaggggtaagagagtgggggcgtagggggcgggttaggtttttgggcgcggcgcgggttcgggggattcgcgcggttgacgtt

SEQ ID NO: 4230 - DNA, 221 bp, synthetic construct
  misc_feature 1..221: note = Description of Artificial Sequence: Synthetic polynucleotide
  source 1..221: mol_type = other DNA
ggtagttggcgcgttcgttttggtcgtagttcggtttggggattcgttgcgtgttttggtattagtgcgtggtgaggaaagcggtggtggcgaatagtagcgttagtaggtttagggttacggttaggagcgttcggtcgcggcggttagtttttatgtcgttcgcgtcgtcgggacgggattgtatcgtcggggagtttcgcgcgcgaagttggtagttg

SEQ ID NO: 4231 - DNA, 201 bp, synthetic construct
  misc_feature 1..201: note = Description of Artificial Sequence: Synthetic polynucleotide
  source 1..201: mol_type = other DNA
tagttttacgtcggttcgtttttcgtttacggttcggtttttttttcgtttggttcggcgttttttcgtttcgagttttttattttttggatttcgggttcgcgggggcgcggagaagaggatttaggaaaggtttgggaatttgatgggtttgtggttggggggaggggtagttttttcgttattttatttttttttcgt

SEQ ID NO: 4232 - DNA, 246 bp, synthetic construct
  misc_feature 1..246: note = Description of Artificial Sequence: Synthetic polynucleotide
  source 1..246: mol_type = other DNA
tgggtttttttaggatttattttatgtagtttttatatggtttttagagttttgatttcgtggttggagtgtttgtttttttttaagtattggtagtatacgggtattttgtattgtacgtagtatatgttgtggttttttagttcgtggtttgtgtaggtggagattttgcgtgggtttagttttcggtttatacgattttgggtcgggggtattaggcggtgtttggttaggggttttcggggc

SEQ ID NO: 4233 - DNA, 223 bp, synthetic construct
  misc_feature 1..223: note = Description of Artificial Sequence: Synthetic polynucleotide
  source 1..223: mol_type = other DNA
tgatattgggggtaggtgatataggagttgcggggtatcggggttagggtcggtgataagtgggtggtcggtggcggtatagtcgggggaaatacgcggacgtcgttgggggatttttggtacggggtagtgggggcgttggcgaatttttcgtaggagttatagtcgttgttcgtttcgttgtataggtttattttgtttaggtttagatagttatagtcgg

SEQ ID NO: 4234 - DNA, 201 bp, synthetic construct
  misc_feature 1..201: note = Description of Artificial Sequence: Synthetic polynucleotide
  source 1..201: mol_type = other DNA
gggtttttcgttagcgtttgcgtttggtttttagttttgagtttcgcgtttatttatcgcgggcgagtgttgcgtagtacggaggacgttttttttttttcgttgttggtagttttcgtaggcgttttattcgggtttaggtttttgtacggtagtggggttttttttttttttcgtgaattcgttgacgtcgtgttttgg

SEQ ID NO: 4235 - DNA, 244 bp, synthetic construct
  misc_feature 1..244: note = Description of Artificial Sequence: Synthetic polynucleotide
  source 1..244: mol_type = other DNA
tgcgtttattcgttgtataacgcgtttcgtttcggtttttagtttatttttcgcgtcgcgttagtttcgaatttggattttcgcgggcgtttgggcggggcgggattttaggtttatttagtaagttaattggttgaggttttcggttggggattaattatcggttttgagaaagttcggtagtggttattatatttggttttcgttaatttttttaaggtagcggtcgttggagtagcggggt

SEQ ID NO: 4236 - DNA, 201 bp, synthetic construct
  misc_feature 1..201: note = Description of Artificial Sequence: Synthetic polynucleotide
  source 1..201: mol_type = other DNA
tttttatttttggttgtttggcggggtttgaaagggtaggtggttttggcggcgcgtttcgcgagggatgtggtagaagggcgtgcgtttggcgtcgaggcggagggattttcgatgtcgtgtggtagcggggtttgttatcgtagtttttcgcgggtattgtttttaggtttagagttagtttttagcgagtcgggtaaa

SEQ ID NO: 4237 - DNA, 457 bp, synthetic construct
  misc_feature 1..457: note = Description of Artificial Sequence: Synthetic polynucleotide
  source 1..457: mol_type = other DNA
tttttttaaatatacgtttttttgttcgcggttcgttattttcgttcgggtttcgggttgtgtagtttttttttaggtttgttcgggtttatgtttttttcgaagcggcgggagtcggtgtagttttaatttttattgcgtgttttaggtcgttaattagttttgttcgcgtgtcgttggttcggaggttgtcgcgttagtttttgcgtgcgtttgagcgcgttggagtatttgcgaggttagggttgtcgacggcgagaggatattttgaggaatacggtgttttagtttcgttttcgtttttcgttcgagttggaggttggggcgcgttgagtcgtagcgtttggataagtgcgcgggtcggagtcgtttaggtttgtattcgggggttcgcggtcgacgtatgcgtacgcgcggtggcgggtttgtaggttcgaaggttcggttttttttttaa

SEQ ID NO: 4238 - DNA, 244 bp, synthetic construct
  misc_feature 1..244: note = Description of Artificial Sequence: Synthetic polynucleotide
  source 1..244: mol_type = other DNA
gagcggtgattggaatttacgttcgggagaggttcggagtttcggtcgcgggcggcgggggatttttgtaggaaggggtaggaaggtaagtagttcggcgcgttttggcggtttcgagggatttgggttcgggtttgcggtcgcgtcgtttgggttttttttgggttgggagcgcgtcgggttttcgttttgtacgttgttatcgcgggagacgtttcggtttcgtcgcgcgtagaggggacgc

SEQ ID NO: 4239 - DNA, 206 bp, synthetic construct
  misc_feature 1..206: note = Description of Artificial Sequence: Synthetic polynucleotide
  source 1..206: mol_type = other DNA
gtttcgacgttgcgggcgatagggtttggttttagtagtcgtcgtcgtcgtcgtcgtcgttattcggaggatttagtaaaagtttggatttgggggagggcgcggcgttgagcgggattattattagggttggaaggagatttcgagaatttttgtaggtaacgcgcgtttttaattttttttttttatgtttcgtcgttgcgttt

SEQ ID NO: 4240 - DNA, 203 bp, synthetic construct
  misc_feature 1..203: note = Description of Artificial Sequence: Synthetic polynucleotide
  source 1..203: mol_type = other DNA
ggaagtagtggggggcgttcgaagagtagggtagttacggttatcgtggtcgtcggatcggttatgtgttaaagtttttggggttcggcgtttcgttgggcgcgtagcgcggggagtagacgcgtcgtgggtggggtagcgcggtgttgttggcgttcggttttcgcggggtgtagttttgcgcgtttttatgttgttttttt

SEQ ID NO: 4241 - DNA, 266 bp, synthetic construct
  misc_feature 1..266: note = Description of Artificial Sequence: Synthetic polynucleotide
  source 1..266: mol_type = other DNA
ttaggttatttcgattttggtttttaggttcgggataacgtgttagttttaagagagcgttgtttatagtttcgggtgggttgggtttaattgtacggggcggggcgttaatagtttaggatttgggttgtaggttggtttttgtattaattagcggggcggtttcgggttttagtttttttatttcgtttacgaagggaggcgattgcgagcgtttggggtttttgacggatttcgtttcgggggtggggcggggagtggttacg

SEQ ID NO: 4242 - DNA, 242 bp, synthetic construct
  misc_feature 1..242: note = Description of Artificial Sequence: Synthetic polynucleotide
  source 1..242: mol_type = other DNA
gtttagtagagatttggagttagaagtttagagatagtcgagtgcgtcgtgcggttttcggacgttcgttgtttagttcgattttcgttaattgtgtaggcggttgattcgtagcggtagcggtagtagcgaggattcgagcgttggttgtagcgatattatggattttttttttatggtcgcgtaggtaacggggcgttttttttacgcgtttcgggtcgttaagtttggggaggttcggg

SEQ ID NO: 4243 - DNA, 201 bp, synthetic construct
  misc_feature 1..201: note = Description of Artificial Sequence: Synthetic polynucleotide
  source 1..201: mol_type = other DNA
agtttagattcgcgcgaacgtggatgggtatatagtttcgtttttttttattttgttttttcgaggcgttagtaatttgttttttgtcggtgatttcgggcgttttttttgtcgtcgtttgaggaaggttttgagattcgttttgtgatcgtgattcgttaagcgtcgacgcgtcgcggtcgtttgttttgttttgttttg

SEQ ID NO: 4244 - DNA, 201 bp, synthetic construct
  misc_feature 1..201: note = Description of Artificial Sequence: Synthetic polynucleotide
  source 1..201: mol_type = other DNA
ttttgtttcggtttttgcggggatggatgttttacgtagtaagcgagtaagcgagttttggagatcggggttttgggtgtgcggtcggtttagtgttacgcggtgagataggtatggttattaatttacgttaaggcggttgtgtatttggtatagaaaatattgttgttgaatgttgtttttatagttattcgttagcgt

SEQ ID NO: 4245 - DNA, 312 bp, synthetic construct
  misc_feature 1..312: note = Description of Artificial Sequence: Synthetic polynucleotide
  source 1..312: mol_type = other DNA
ttttttaatattcggtttgtacgtttggcgggggcgtaatagtgttttacggttcgggagttcgtttttggtttttgagtaaggtattttttttatttgtcgtgtgtttagttgaatttagtatatttttttcgtatttttcgtttttttttttttttttttgaatttgtttttttgttttgcgggtttttaatttttttcgaatttcgggcgttcggttcggtttaggcgagcgttcgcggttggggacgcgggtggggacgcggcggtttgggcgttgtaggatgcgtttggtcgcggaggagacgatta

SEQ ID NO: 4246 - DNA, 203 bp, synthetic construct
  misc_feature 1..203: note = Description of Artificial Sequence: Synthetic polynucleotide
  source 1..203: mol_type = other DNA
cgttggttttggttgtttgtggggtttttttaggtttcggggggtttgcggcggtttgggaggtagattttcgcgggtaggtgtggtcgtgtttcgatcgcgcgaggatcgaagttggcggaagtttttgtgcggtgttttttagttcggaggaggttggtttgaagtttttaggcgttgtcgaagtttttttttgttagcgt

SEQ ID NO: 4247 - DNA, 201 bp, synthetic construct
  misc_feature 1..201: note = Description of Artificial Sequence: Synthetic polynucleotide
  source 1..201: mol_type = other DNA
cgtatgcgcgcgcgtaattagattttcgtcgtcgtttttagcgttttttttcggggtagggatttatttaataggttggggtttttggagtgcgcggggtcgcgtggggaagcggggattttattttttttacgcgtcgtttagtattgggtaagggcggggtattttttgggttttcgtttttcgtcgttcgtttcggga

SEQ ID NO: 4248 - DNA, 283 bp, synthetic construct
  misc_feature 1..283: note = Description of Artificial Sequence: Synthetic polynucleotide
  source 1..283: mol_type = other DNA
agcggcggcggcgggttttaggagtcgtagattttggttagtggtattgcgggttattttgagttttcgaggttttagggggatagcgttcgggcgttttcgttgcgcgtcgttttcgcggagtcgagcggcggtggttgcggaagcgattggggttgcgcggatattagcgttttagagttcgcgaggagtttggggttttcgggttggagtaagagtcgagtatcggcgtagtttgcgggattggtatttatcgggttttttaatttttagattttgttat

SEQ ID NO: 4249 - DNA, 201 bp, synthetic construct
  misc_feature 1..201: note = Description of Artificial Sequence: Synthetic polynucleotide
  source 1..201: mol_type = other DNA
gttttcggggcgttttgttttgcgttatcgcgcgttcgttcgttcgttcgtttaatttatttgttgaagattaggtagtttaggtggttgattttgtggtcggagcggtggcggttgtagtttttttataggtttttgaaggtcgtgatggttaggatgaagagtatcggcgttagtgttaggtcgggttggaaggcgttt

SEQ ID NO: 4250 - DNA, 247 bp, synthetic construct
  misc_feature 1..247: note = Description of Artificial Sequence: Synthetic polynucleotide
  source 1..247: mol_type = other DNA
ttgagcgcgtgatatggtttgtcgtttttgattaagacgggtacggttattcggcgcggcgagggtaggggcgttatttttatatttttttcggttcgggcgcgttttattttgtagcggtggttttggaattagattttgatttgcgtgggcgtgaggcggatgaggttggttaggtgttcgcgttcgggcgtcgataggtatcgttgttgtcgaaagcgtcgttttagttcgtaggtttgcgttt

SEQ ID NO: 4251 - DNA, 427 bp, synthetic construct
  misc_feature 1..427: note = Description of Artificial Sequence: Synthetic polynucleotide
  source 1..427: mol_type = other DNA
ggggcgtttttttaggggattgggggtggggaggagggcgtacgggtcggggagggggttatcggatttggatttcgggatatttcgggggtttggggggcgggtcgcgcgtttatttgcgttttcgtcgtcgaaggagtttatgtacgggaagtagatggcgagcgtttcgaaggaggcggatagattgaggcggttttgcgagcgttttatgttcgcgtcggcgtcgggcgtttcggtcgcggcggcggcggcggcggcgggcggtttgggtagtttggtcgttttatttttgacgcggagtacggcgcgcggcgtggtggcggcggttcggggtcgggtcgaggtttcgttgcggggttggcgggcgcggcggggtcggcgggcgggttaggagttggcggcgcgcggagttcgaggcgcgttg

SEQ ID NO: 4252 - DNA, 246 bp, synthetic construct
  misc_feature 1..246: note = Description of Artificial Sequence: Synthetic polynucleotide
  source 1..246: mol_type = other DNA
cggtttatagtcgggatgcgttttcgtcggggttatcgcggcggcgaacgtttcggatttcgtatttcggtgattttttgggatgaatcgaagtcggattcgtattttggtcgtaataagcgcgttttacgtcgttacgtattagcggtgattttcgagttttttgtcgttttggttttttcgtaggcgggtttcgaggttttcgtagggagtttagggttacggttacgtgtagtcgttttcgag

SEQ ID NO: 4253 - DNA, 384 bp, synthetic construct
  misc_feature 1..384: note = Description of Artificial Sequence: Synthetic polynucleotide
  source 1..384: mol_type = other DNA
tgcgcgtcggtttggtttgtttgcgggttttagagtttcggcgttcgttgtttttttcgtttttttttttttttttatttttttttttttttagtcgcgacgcgtagggggcgggttttatttttttttcgttttcgtttcggttttaagtcgcggaggcgttcggtgggatttcgttgttgtttaattaggggggatcgggtgagtttttttttttggagtcgggttttattagcgtcgtaggtttataggtcgggggtgggggttttggatcgaggggcggcgcggggcggcgcggggcggcgcgcgcggttttggagcgttagtatttgtttttcgatttttcggtcgtcgttttcggtcgtttcggggatttcgttatta

SEQ ID NO: 4254 - DNA, 415 bp, synthetic construct
  misc_feature 1..415: note = Description of Artificial Sequence: Synthetic polynucleotide
  source 1..415: mol_type = other DNA
tgggtagttttaggtcgtcgaattcggcgtttagcgggggtagttcgcggaaggcgcgagtcgagttagacgtcgcggggaaaggttcgggcggtggttgcgggggcgttaatttcgggagtaggaggtcgggttttagtcgtcgggttttgcgcgtttgttttttgcggcgcggtcggtatttgtagttggggtggtcgcgtaagtgttgtacgcgtagtcgttcggttttttttacgaagggtcgttttttcgtcgcgtttagttttttttacgttttgtttgcgggtcgtgggcgttagtgagtggaacgtcgtcgggcgggtgggcgtcgagtttttcgtgcgttcgggacgtttcgcgagggtttggcgtagttttcgtatttcgcggttcgggatttttgtttttttcg

SEQ ID NO: 4255 - DNA, 543 bp, synthetic construct
  misc_feature 1..543: note = Description of Artificial Sequence: Synthetic polynucleotide
  source 1..543: mol_type = other DNA
tgcgttttacgttttggagcgtgaagtcgggcgttaaaaagttgttgtcgggtcgtagttttagatttagttgttggttaaaggcgtgtaggcggaggcgcgtggtttcgtgtttcggggcgcgttttagtttcggtattattagtttttcgtttttttcggaggggcgttcgagtgcgttcgatacggttagtagcgtcgcggcgagtagtagtagcgtgggtattggtttaaagtttcgagatttcggagttcgtttcgcgttttttatgtcgttgtttagtttgcgtttttcgaatttttcgggtatagttcgttgtattggagttttaggagatatcgttcgtagtagcgtacggagcgagggatttttagttcgggtcgggagagtaaagtttcgttggtttgttttggattgttaaaattaataatttttattattcgttggaagggcgcgtagagtcggttatagtcgaagttttcggagttattaaaaggaggcgttgtagttttgtcggcgcgcgggaagttttttttttagcg

SEQ ID NO: 4256 - DNA, 227 bp, synthetic construct
  misc_feature 1..227: note = Description of Artificial Sequence: Synthetic polynucleotide
  source 1..227: mol_type = other DNA
ttaggagcgatggttgtaatgtttttttttttgttttgtttttcggtgtcgggagttttgtttttcgtcgttatttttggttagttttgcgtaagaacgtcgttttgtttggtagttaggtcgagacgtagtttgaatgtgagtaggaattcggagaagggaagggagagaattagaaagaaggttcgggagggattcgggaagtagtgggaggtttgcgttttgga

SEQ ID NO: 4257 - DNA, 323 bp, synthetic construct
  misc_feature 1..323: note = Description of Artificial Sequence: Synthetic polynucleotide
  source 1..323: mol_type = other DNA
tcgtcggaagagttttgtagagtgagtttttagggttatttcgttgttttttttttcgttttcgtagtcgttgtagttagcgtgggagtcgggtaggtcgcgtggggcgttggatttatcgagaggttagcgtcgtcgtcgggggagggcgtgtttcgtacgtgtgtgttcgcgcgtgttcgcgttcgcgtgtgttagcgcgcgtgttttggtcgtgcgcgtcgagtcgggtcgtattaattttttcggcgtcgacgggtttagtttatggtgtgggcgtcgggtttagggaggtttcggttttcgttaatcgcggagtaggg

SEQ ID NO: 4258 - DNA, 279 bp, synthetic construct
  misc_feature 1..279: note = Description of Artificial Sequence: Synthetic polynucleotide
  source 1..279: mol_type = other DNA
ggtacgagcgttagtagttcgtaaaataggtagagtacgtttttcgtgagggttatacgcgttttggtcgggttcggggttacgtaggtggtgtattgcgcgttcgttagggttacgaagagcgtaacgaacgttagtagtacggcgtttacggtgagcgttcgcgtcgtttgtatttcggtgtttagagttagtatcgagtcgtatattttgtattgtatgtgttcggtgttttgtattacgtacgatatttatagttttttttaggtggtttgcgtc

SEQ ID NO: 4259 - DNA, 261 bp, synthetic construct
  misc_feature 1..261: note = Description of Artificial Sequence: Synthetic polynucleotide
  source 1..261: mol_type = other DNA
ttcggcgcgcgtttttcggcgtatacgttttttattttcgcgtcgcgcgggtcgcggatttgtaggttgcgcgttttttgcggagtttgtttcggttttacggataggtttcgtagtgagtaggtaagggtcgtttcgtcgcggttgtttttttacgtttcggtcgttttttttttttttagaattttcgtttagtcgggatttcggatttttttttttggtttggcggttttcgttagtcgcgatttttatcgacggaga

SEQ ID NO: 4260 - DNA, 364 bp, synthetic construct
  misc_feature 1..364: note = Description of Artificial Sequence: Synthetic polynucleotide
  source 1..364: mol_type = other DNA
gttcgggttttgggcggcgagggcgtagcgagggttgtcgttttttcgggtagtttcggggggcgcggcgttgggtcgcgggttcgggggttgtcgtgttcgatcgtatgcgtcgatttgtcgttgggcgttcgtttttttttgttggggttgggcgcggtttcggagtttggcggcggtggtgagggcgtacggttagttgtagcggcgttgtgtttgtcgtggatttaggatattttaggtttggtggcggggttaggtggcggcggttttttgcgttcgggcgatggcgatagcgataggtttttaatttcgtttcgggttcgggtcggtcgggtttcgcgtcgggttacgcgcgcgtata

SEQ ID NO: 4261 - DNA, 242 bp, synthetic construct
  misc_feature 1..242: note = Description of Artificial Sequence: Synthetic polynucleotide
  source 1..242: mol_type = other DNA
ggcgttttttgagtttagagaagtgggttaagataagggaagaaaattttttatagaagaggagattttcgtttttagtgttggggattttcggtattcgcgtttttgtgtttttggtggtttcggcgttttttcggagcgcgcggtatgtttgtttttatacgtttagtatttttgtttttagagtaaatttattttttagggtatacgtagaggggtagttaggtatcgtttttattttg

SEQ ID NO: 4262 - DNA, 285 bp, synthetic construct
  misc_feature 1..285: note = Description of Artificial Sequence: Synthetic polynucleotide
  source 1..285: mol_type = other DNA
acggtcgttcggggtcgtattttcgttcggtggcggcgttcgaagacgttagtcgcgttacgtattgtttgcgtttcgcgttttagtcgtcgcgtattaacgtcgtcgttttcgtcgggagttaagttcgtcgggtcggttcggttttaggtgggtagttcggtttgtagttggttggaggtggcggtcgttgtagttttggtagcgggtatatttttaagtatacgtatttaacgttttttttttgagttacgaggatggagtagttatttcggttcgggattg

SEQ ID NO: 4263 - DNA, 222 bp, synthetic construct
  misc_feature 1..222: note = Description of Artificial Sequence: Synthetic polynucleotide
  source 1..222: mol_type = other DNA
ggtattgattttttagttttttgtttgttttttcgttttttttttttatttcggatatttttaggataattagggttgaagttttcgggagaagtagtttcgagttcgtgggataagggggcggttcggtttcgtttaggatttttttcggatttttttttcggttgtttcggttggttgtagggcgcgttatttcgcggggaggcggcggtagcggtggcg

SEQ ID NO: 4264 - DNA, 201 bp, synthetic construct
  misc_feature 1..201: note = Description of Artificial Sequence: Synthetic polynucleotide
  source 1..201: mol_type = other DNA
gcggcggcggcggcggcggcgggggttggggcgcgggggtcggattatgagtcgttgagtcgggtaaattttaggttatcgagttagcggattttcggagcgtagttttgcgtcgcggagtaggttttaattaggcggcgaggcggttatacgtatcgagttagcgattttcgggcgacgcgcggggttagggagcgttac

SEQ ID NO: 4265 - DNA, 298 bp, synthetic construct
  misc_feature 1..298: note = Description of Artificial Sequence: Synthetic polynucleotide
  source 1..298: mol_type = other DNA
gggattattttttacggtgttatcgtatttatttcgcgtttttttttcgttttttggagtttatcgggattaggtggcggcgggtgtttttttgggggtgcgcggttatgtaattggtggatttttttaaatcgttttggaggggggagcgcggcgttgggggcgggagagcgtttttggttgtgagttgtttttgtcgtttcgtttcgcgtttttttgtcgtttcgtttcgggtttttcgcgttttttttttcggttcggtcgagcgcgttgtttcgacgtcgttatttagagtcgg

SEQ ID NO: 4266 - DNA, 272 bp, synthetic construct
  misc_feature 1..272: note = Description of Artificial Sequence: Synthetic polynucleotide
  source 1..272: mol_type = other DNA
tgatagggatcgggtttagatttgttaaatgttgcggaggtagaatttgatagtgcgggagggtaggcgtttgggaggtaggagttggtggagatgatagcgtggaattcgtgagttttacgtaacgtttttttgtcgtttagggtgggtttttagaagtatagaaatggtcgggttgcgggatattatagcgaggaattagcggagtataggggttttaggagcgtcgggatatgttaggtcgggtagatagtttcgggtcggagtgagtg

SEQ ID NO: 4267 - DNA, 201 bp, synthetic construct
  misc_feature 1..201: note = Description of Artificial Sequence: Synthetic polynucleotide
  source 1..201: mol_type = other DNA
gagtatgagggagagtgttattttttagttgaaggttattgtgttttgtatttttggtttgggtaagtgaggagtttgttagtttttggtaggaagtgtacgtgatcggcggttggttaggggtatagagacgtattttatatagaaatttaggttggcggggtgggcggtcggggagttagttttgtagatgttattaag

SEQ ID NO: 4268 - DNA, 251 bp, synthetic construct
  misc_feature 1..251: note = Description of Artificial Sequence: Synthetic polynucleotide
  source 1..251: mol_type = other DNA
gtaggttgaaggcggagttggagatattcggggagtaggttcggagcgttttcgaggtcggggtcggcgagggagaggtagggagttcgaggaagggaggcggggcgggtagggatcgagttaggagagagcgggcgggggttttgggagcggttttcgagagtggggtttgtggggagtagggcggtttcggggatagaggaagtcgcggtggaggtttagggtagacgcgggcggacgcgaggagcgta

SEQ ID NO: 4269 - DNA, 249 bp, synthetic construct
  misc_feature 1..249: note = Description of Artificial Sequence: Synthetic polynucleotide
  source 1..249: mol_type = other DNA
attcgttttcggagtttcgttcggcggtatttgttttggttacgcgttttagtttcgttaggtttttcggcgggttcgaattcgtagtcgggaaggtatacgcgagtaggagggcgtattttatggttaggtgcggacgcggcggttgcgggtggttagacgcggtaggcggagcgtacgggcggcgcgtatttttttcgcggtttcggagttcggcgttttaggtgcggttttaggtgagagtcgtcg

SEQ ID NO: 4270 - DNA, 249 bp, synthetic construct
  misc_feature 1..249: note = Description of Artificial Sequence: Synthetic polynucleotide
  source 1..249: mol_type = other DNA
gttttcggtagacgtagggggacgttcgggcggcgcggggcgcgggtttcggagtggttgcgggaaggacgcgcggtattgtttgtgcggggattcgggacgggtcggggtattataggcgcgggaatttacgtgtggattttgcgttcgcgggcgcggtgattttcgcggggatttgttggtgtttcgagatttattgagttgcgggggttttggagatttttaggtttgaaaagttagttttagaga

SEQ ID NO: 4271 - DNA, 201 bp, synthetic construct
  misc_feature 1..201: note = Description of Artificial Sequence: Synthetic polynucleotide
  source 1..201: mol_type = other DNA
ttgttcgcggcgtcgggcgcgtcggtcgtcgggtggtggtggtggtcggcggcgtggtggtggtggtggtggtagtgcgggttcgcgtcgttttgcgcggcggtcgcggcgattacggcggatattacggcggcggcggggtttattttttcgtcgttgtcgtttaaggaggcgtcggtatcggtttcggtcgtcgcggtt

SEQ ID NO: 4272 - DNA, 201 bp, synthetic construct
  misc_feature 1..201: note = Description of Artificial Sequence: Synthetic polynucleotide
  source 1..201: mol_type = other DNA
acggtatttacggtcggggggttcgggggattcggcgggcggcggacggcgtatattcgcgattcggttcgggagtcgttgttttttttagtttggttttcgtttttacgatttaggggcggttgcgcgttgttttttggcgtcgtatcgggtttaggcgcgcggcggggttggggcgcgcggggcggtcgtttgggttat

SEQ ID NO: 4273 - DNA, 251 bp, synthetic construct
  misc_feature 1..251: note = Description of Artificial Sequence: Synthetic polynucleotide
  source 1..251: mol_type = other DNA
cggcgtcgggtagcgcgtagagttagtcgcgtgtgtagggtcgggtgtcgttgcgtgcgggcgcggggcgcgggttcggggcgggtgtagggcgcgggatcggggtagcgtaggagtaggtaggggttcgcggttcgcgtgggttttaggcgcgggatggcggcgtttagtagcgcgggttcgcgtagggcgcgtagcgttgggggtaatagcgtggggttcggtcggtagtggggcgcgggttgcgcggt

SEQ ID NO: 4274 - DNA, 201 bp, synthetic construct
  misc_feature 1..201: note = Description of Artificial Sequence: Synthetic polynucleotide
  source 1..201: mol_type = other DNA
tacggtggattttgtgggtcgttgagttttttgattttcggtttgttttattttgttttgttagtgggttttgcgttcgcgttaataattcgaatgggtacgtttttgcgttttagaacgttgttcgtttttttatatttagattgaggtggaatttacgttatataaatcgggtcgtaaggtttagtttagcggggtttt

SEQ ID NO: 4275 - DNA, 201 bp, synthetic construct
  misc_feature 1..201: note = Description of Artificial Sequence: Synthetic polynucleotide
  source 1..201: mol_type = other DNA
tggcgcggggcgtaggtgtacgtaggttggtcgcgggcgcgcggggttcggcgggagtttcggggtggttttcgcgtggggtcgggggcgttcgcgcgggcggggcgaggtcggggagggtagttgttcgtttttttcggtattgggagttttcggttggtattgcgggaggagttttcgggtgattcgcgggttttgaaa

SEQ ID NO: 4276 - DNA, 201 bp, synthetic construct
  misc_feature 1..201: note = Description of Artificial Sequence: Synthetic polynucleotide
  source 1..201: mol_type = other DNA
tgaggaattggatattaggcgttggtcgttttttatttttagtcgttgggtgtttagagtttatttttagcgattagagtagaattgtagagaagacgttcgcgttcgggtttcgtttggggagttagggcgcgcggggagcgttcgggtcgcgcggttattgatcgttggttgtacgggggcgtcgtgcggattcggttt

SEQ ID NO: 4277 - DNA, 337 bp, synthetic construct
  misc_feature 1..337: note = Description of Artificial Sequence: Synthetic polynucleotide
  source 1..337: mol_type = other DNA
tttagggttttcgggatcggtgttcgttagtgggtataggacgtcgggtgttcgaagggttgtttggagatgtaattgattttggcgggtattagaatgacgagtggtagtagtaggagcggggtgacgaataagattacgaaggatttgaatttggagatatagtttagcgtcgaggttatcgcgcgggagggagattggcgggcgagacgagtgaggggtagttagaggcgtcgcgggtttaagaaggggttatagttttcggggattggggagggggcggtgataatttcgtttcgtacgggggcgttttttcgcggttttggggcggggttat

SEQ ID NO: 4278 - DNA, 201 bp, synthetic construct
  misc_feature 1..201: note = Description of Artificial Sequence: Synthetic polynucleotide
  source 1..201: mol_type = other DNA
ggttcgtgtagagtcgtttattttttttcgtagcgtcgggttgttttaaattgtttttggattttatttgtgagtcgcgtggttgggttgggttgggttgcgcgggatttgttagcggttttcgttattttgttcgtaggcgtttatcggttgttttttgggtcgtcgttggtcgtcgttatacgtgggacgtcgagggta

SEQ ID NO: 4279 - DNA, 201 bp, synthetic construct
  misc_feature 1..201: note = Description of Artificial Sequence: Synthetic polynucleotide
  source 1..201: mol_type = other DNA
atatggcgtatgatagggaattggtagggttatagtttcggattattcggggtagggtagggaaattacggtagattgcgtagcgtattttgttcgggtgcggtgagggttgcgtttcgtttggttttcgttataatttatagaaagttttcgcggagtattggtgtttttgaatttattaggcgatttcgtcgtaaagaa

SEQ ID NO: 4280 - DNA, 201 bp, synthetic construct
  misc_feature 1..201: note = Description of Artificial Sequence: Synthetic polynucleotide
  source 1..201: mol_type = other DNA
tcgattttgtttcgggtaatcgatgggaaatttttcgagagcgcggtttttttggggattcggcgtttttgacgtttttaggcgttttttcgggtcgttgcggttttttttcgtcgttcgttagcgtttaaggtcgcgttttttttattttcgtttttttttttttttcggcggttttcggatttggatagagttgtagga

SEQ ID NO: 4281 - DNA, 1216 bp, synthetic construct
  misc_feature 1..1216: note = Description of Artificial Sequence: Synthetic polynucleotide
  source 1..1216: mol_type = other DNA
gaagygaagaggggttttttgatttgtaatatagaggaaagygtygttttygtttagtttggtatttaygygtttataygtattyggygtyggtygggtygtttatttgagttttaaaagttgttgaatttatatggttaygtttyggggagyggggttttagatttggttygtttaggttatttgygyggygttygygttygttygttttygtttygyggygtyggttttyggttttyggttygtygtttttygtygttygtyggtygyggggygtatagygagttagagygyggtygygyggggttttatgtyggtyggygygtygtygtygttggggygtatggtttaggttgggyggttygygggggygtatatttttyggtyggggygyggggttygyggtttttttygtyggyggtatagygaaggyggtagygaggyggggygtgtttyggygttgtygyggygtagtaaagggttggggagtygyggtttygtttttyggggyggygaggagggaggtyggyggygttgtygtttayggtgygtgtttttyggygygyggtttttgtttttagtyggagtttygygtygatggggyggygttgtttagggtttggggtgaygygaygyggayggaygygagtttttttygygttgtygggtyggggggttttgttagaggtttygtygtygatyggygttatttaagttgttygggggtttygtttgagygttygttttgtagayggtygyggttyggagattggtaggaggygggtaygagaggygygyggggygagggygtygtggagygyggggygtggggaygygyggyggyggygtygygyggaggaggygygyggggatttyggggtttygtygttygygtttatygygttygtygtagagtygttygygttgtttagtygttttttttttygygtttgttttttygygygttygttttygtttttyggagtyggttttaatttygttygttyggttyggtttaygttattygtttttttygtttttygaaygggagttygagtttttggtttggtttyggtttttgttygtygttttattttgygggggtyggggtygtygygggtggtggggggygttgtgtttagtaggggygatagygtaggyggggttttttgtagtttttttttttattttyggtygygtttyggtttttattttg

SEQ ID NO: 4282 - DNA, 365 bp, synthetic construct
  misc_feature 1..365: note = Description of Artificial Sequence: Synthetic polynucleotide
  source 1..365: mol_type = other DNA
ggtyggtggygtttatttygtatygygttgtttygttyggggtattatggtttggggttggattatgttttttttattttagtyggygttttttatttaygygygttgagggtgyggtgagttgagtgyggggttaagtatgttttggygtygatttygtttaggggtttaggatttggygtttaaggggttttttggygayggagattttygaygtagtagygattygyggttgtttaagttgatttygttygygtttygagyggttttgggygygyggggtttyggggattggaggatttyggggggyggygtygygtggtggtyggaaggggaygttaagttyggggtgggygtyggaygtt

SEQ ID NO: 4283 - DNA, 201 bp, synthetic construct
  misc_feature 1..201: note = Description of Artificial Sequence: Synthetic polynucleotide
  source 1..201: mol_type = other DNA
gyggaaagtaaggygygtttatagtygtttttttttttggaagttygygtttatttttgygyggyggtygtttyggaggygtygggttgggygtgaggaygtygtatttattattgggttygygagygtygttagtttagtygttttttttygtaggttygggggtagygtatttygtaggttttataagtygttaygtta

SEQ ID NO: 4284 - DNA, 201 bp, synthetic construct
  misc_feature 1..201: note = Description of Artificial Sequence: Synthetic polynucleotide
  source 1..201: mol_type = other DNA
gygttggttgggtagtttttgggagatgaagygaygtaggygttttaggtattggttgtagagttygatgtygttgtgttyggygttttttatttatagyggttttatygttttggggtagygttygtagagygttagttygtgygagaagtygattatttygtttttygtgtygtggatgatgagtaygggygaygtgat

SEQ ID NO: 4285 - DNA, 201 bp, synthetic construct
  misc_feature 1..201: note = Description of Artificial Sequence: Synthetic polynucleotide
  source 1..201: mol_type = other DNA
tygttttggtygaagygtagttygagygtygygaygygttttaygygtaggaagtygtyggggtygyggtygtatatttygaatatttygygtaggyggygtayggagygtagtagagtygygggggygttygattagttygygtygttygttattygggtyggttygtagtttagttyggatttttygttygtygygttc

SEQ ID NO: 4286 - DNA, 201 bp, synthetic construct
  misc_feature 1..201: note = Description of Artificial Sequence: Synthetic polynucleotide
  source 1..201: mol_type = other DNA
ygtttygygttatgtatatttattgtggtgatgagagttygygtttygtgttygttayggttattgtgygtttaataaaaataaatattgtygaggagtygtygygatgyggggyggaygygyggttyggaaaggggagggggttttaggaagagttatattygygagtygggtttgggttaggggygaggggagagygtt

SEQ ID NO: 4287 - DNA, 201 bp, synthetic construct
  misc_feature 1..201: note = Description of Artificial Sequence: Synthetic polynucleotide
  source 1..201: mol_type = other DNA
gtggttttttggtttttttaggtagttaatattataattttttttgggagggggttygtagaagggygygygttgtttttttygttttttaagttgtagyggggygggtygggagttagggttagggtttggagatttgggaggggatyggtgttagaagygaagagttagggttagaaagttaggttaattaaggggggg

SEQ ID NO: 4288 - DNA, 201 bp, synthetic construct
  misc_feature 1..201: note = Description of Artificial Sequence: Synthetic polynucleotide
  source 1..201: mol_type = other DNA
ggagaagggggttygtgtaaattttaggttgaygatygygtaygygtttttygggttattagttttgtygtttttggtggggtatatygaggagatygtygtggggaatyggggatyggattgtttgatagtygagygttgaagattattttttttgagtttagggaggtttggttgttttgagttttttatttttgggtt

SEQ ID NO: 4289 - DNA, 213 bp, synthetic construct
  misc_feature 1..213: note = Description of Artificial Sequence: Synthetic polynucleotide
  source 1..213: mol_type = other DNA
ttttgyggttggttaggaggagtttttygtygtttttattttagtygygtygggygttgggttygatttttagtatttttggtattgatgtgtttggtgygygttgagaygygaaygttttgtaagatgagtttttatttattygtttttttttttttttatttgtttattttataaattgagtgtttggttattttggtttaggtaagaggt

SEQ ID NO: 4290 - DNA, 201 bp, synthetic construct
  misc_feature 1..201: note = Description of Artificial Sequence: Synthetic polynucleotide
  source 1..201: mol_type = other DNA
gtttagyggtttgtatygagagttaggagaggtttagatyggatttygatttttygaggygygggagtttayggagygyggtgggygyggygttygggtygygtagttaggtggggagyggygygtagttttagattygtaggtaggtagyggyggattgtatttgtttygtttygtagygttttttgtttgtygtttttc

SEQ ID NO: 4291 - DNA, 201 bp, synthetic construct
  misc_feature 1..201: note = Description of Artificial Sequence: Synthetic polynucleotide
  source 1..201: mol_type = other DNA
gygttygaggtyggygyggtggggatygygggtttattattagttaagtttagttatttaattatttgtagagttgttgtaggtataggtttaggttttygttttttattttttygygggtgatgygttttgatagyggtygygggagygggggtaaaggyggtagttggggyggyggyggyggtayggtygagtgtttyg

SEQ ID NO: 4292 - DNA, 201 bp, synthetic construct
  misc_feature 1..201: note = Description of Artificial Sequence: Synthetic polynucleotide
  source 1..201: mol_type = other DNA
tygtaaggggtattyggttttgtgygygggggyggygggggttttgygyggggtygggttgggtygggttgagttggttygtttyggygtyggggattaygygygattggttagattttgtygtgatttttggaaaattgtgattattttatatgttttgtttagttyggattttttgygttaaygagttaggtttttttt

SEQ ID NO: 4293 - DNA, 324 bp, synthetic construct
  misc_feature 1..324: note = Description of Artificial Sequence: Synthetic polynucleotide
  source 1..324: mol_type = other DNA
yggggttygggttgggatygyggggtgggyggtttygagagygtttygtagtggttggagttttgggygttgtaaagygtgtttygtygggttttygagygtttygygttttygtttygttatgtttttgttgttggggttgtgtttggggttgtttttgtgtgtggggtygtaggaagaggygtagagttggggttatttttyggagtaggtaagtggagtygaggggagtygggtttygggygyggtygttttttttttttygtyggttyggtygyggagtttttgttygggtttttttygatygttttttaggtttttatt

SEQ ID NO: 4294 - DNA, 201 bp, synthetic construct
  misc_feature 1..201: note = Description of Artificial Sequence: Synthetic polynucleotide
  source 1..201: mol_type = other DNA
gagggggyggttggaggattyggatttttaagaatttggttttgggttttgattygggyggtyggagagaaggygaagaagaggtygagtagataggygygyggyggaygygagagaaggaygygggygaagygtttaagaygttygtttttagggtygtygagttttttttttttttygtttggygyggtagtatygygg

SEQ ID NO: 4295 - DNA, 330 bp, synthetic construct
  misc_feature 1..330: note = Description of Artificial Sequence: Synthetic polynucleotide
  source 1..330: mol_type = other DNA
agtttagtttagttaagtagtagagagaataggayggaggtttttattttttagggattgtagygtttttaaatygtttatttgygayggtttygygagygtgygtagtttagtttttttyggaygttttygttttygttygggtatatygtgtttygtatygaggtagagaggggtaygyggattttagtttttgygagtttttttgttygtygttattttatatttygtattgttttagttgtygttttagaagatgtatygtttggygygtaaagyggtgtayggtttttagttygygygtagtagtttggaggggygttagagttt

SEQ ID NO: 4296 - DNA, 293 bp, synthetic construct
  misc_feature 1..293: note = Description of Artificial Sequence: Synthetic polynucleotide
  source 1..293: mol_type = other DNA
gygttttagttygtggygttgtyggygtagatttygygtggggatyggygaggttaattttttttgyggttyggggtyggtagagtaygtaaggggtygygggtygygtgggtttgggygygtygtggtgggtaagyggggttagyggagygggaattygtatatttttygagyggagtygaggataggttygtgygggtygyggggtttttttggygttaggaagyggyggtygaaggagataaygagaaygtagtttyggtttagggaggtttaaaagttgagatgttgaa

SEQ ID NO: 4297 - DNA, 201 bp, synthetic construct
  misc_feature 1..201: note = Description of Artificial Sequence: Synthetic polynucleotide
  source 1..201: mol_type = other DNA
atygtyggygtyggtagttagagygggatttagtttttatygygttttttattggagtttttttyggtttttyggygagtgyggttygtggggagtgggygtyggygygaggaagtttttyggttygggygatttyggtttttgagyggtttttttttaygtygtygttygttaggtygayggaggatyggggyggggayg

SEQ ID NO: 4298 - DNA, 201 bp, synthetic construct
  misc_feature 1..201: note = Description of Artificial Sequence: Synthetic polynucleotide
  source 1..201: mol_type = other DNA
yggygttttaygttttttttttggagtaaattygtttygttttttttttggagtaaattygtygtattttygtttgtatygaaattttgagygtygtttygygttatttttagttygygttygygttgttttttttttygggtygtaggttgagaggttgggtygtattttggttaygttttgttyggttttagygggata

SEQ ID NO: 4299 - DNA, 226 bp, synthetic construct
  misc_feature 1..226: note = Description of Artificial Sequence: Synthetic polynucleotide
  source 1..226: mol_type = other DNA
tyggggttgttagggygtygggttygtgygyggatattgggggygtattyggttttygggttaggygyggttggagatttygaggttggggttttgaagygygtaagtatttttttttttatygygtttttgtaagtagtttgaagttttaagtygttgtttayggattttygtttttaattttttaattgaaaaaatttgtygaggagagtggaggtatygttat

SEQ ID NO: 4300 - DNA, 363 bp, synthetic construct
  misc_feature 1..363: note = Description of Artificial Sequence: Synthetic polynucleotide
  source 1..363: mol_type = other DNA
tattygggygygggagtaygggygggtygggggygtttgggtyggtttgtygtggttygggggttyggggyggygygatttatttggygttttyggggtygygatttttttygggaggtgtttgygaaggyggttttgtygyggtgggggtggggaggttagggtttyggatygttggagttggggtygtagttagtttttggygagtgttttttggttgttgtygtaggggtttgttttttyggattttttttttaatttygtyggatttttttttttttttttttaygttygttaagtttatggtttttgtaatgyggtgggtgtggttatttagtaaattgtaattgtggttttttgtaa

SEQ ID NO: 4301 - DNA, 201 bp, synthetic construct
  misc_feature 1..201: note = Description of Artificial Sequence: Synthetic polynucleotide
  source 1..201: mol_type = other DNA
tttttyggagtgggggattgygagggggtttyggttttaygaggtgyggaggaagagttygaggtttggggygaggygygygggatagtggggttgaygygtggtttyggygtygygyggtttttygaatttygagtttygygttyggygyggtyggggtttttaatygttttttygttygtygggatttttatygggtyg

SEQ ID NO: 4302 - DNA, 201 bp, synthetic construct
  misc_feature 1..201: note = Description of Artificial Sequence: Synthetic polynucleotide
  source 1..201: mol_type = other DNA
ttygttyggygttgtattttttygtggttyggttgtaaggatttgyggtggaggtttggyggaggygggttygygttttagagagagygttaygttattygagaaggygaygttgggggttgttgagttttttaattttttttggygygttttgtttagaagtyggggagtttttggtyggyggttggyggggaagygygg

SEQ ID NO: 4303 - DNA, 267 bp, synthetic construct
  misc_feature 1..267: note = Description of Artificial Sequence: Synthetic polynucleotide
  source 1..267: mol_type = other DNA
ggtgagttattgggatttygttgttagggagtaagttggtaggtaggaagtagttaagatttgggggaattttttttagggaaygaatatagagaaggaygtatttgaaaatttygtygtagttattttttttttatgggaaagtttygatttyggygggtttagygttattyggtttttyggggtgtggaatattgagygaggtaggtgyggygggagtatgygygyggggygggtagggggyggttttygygtttttatttygyg

SEQ ID NO: 4304 - DNA, 707 bp, synthetic construct
  misc_feature 1..707: note = Description of Artificial Sequence: Synthetic polynucleotide
  source 1..707: mol_type = other DNA
agggaatggggagggttaygtatattttgtgyggttygagtggttyggatggtatagtttaggtgttygggttaaagttggtatttttaaagtttagaaygtaatttgggygygttagtataaattyggttttyggtttttttgaagttagttaagttygtatagggtttttagygtttggaaatttgagaggygtggaagggtggggagtttygygaagtttttagtttttgggtgtttttyggtttygygggggagygggtttggagttaaatyggtyggtygtaggttggagtagygggygtyggagygygyggtggggatgttygaaaaggagttagaggtttagtyggagagttygagaataygagggatgtttattttgtaatatggttttaagtttttttttgtttaygyggaagygtttttygttttatttygggttgtgtagggtygtttyggygattaagtygttttyggagtygggtattggggagtyggtgttgygttygttgttggagtyggggttygattgygtygttaggtagtygggttttttttgggyggttatggtgggygygtagygttygggttttygttgtygtygtygttttgtttgygttgtygttttygttygtyggtygggtttaattggtttttagygtygyggygttagttygtttttttgtagtygtygaygttatygt

SEQ ID NO: 4305 - DNA, 201 bp, synthetic construct
  misc_feature 1..201: note = Description of Artificial Sequence: Synthetic polynucleotide
  source 1..201: mol_type = other DNA
tggtgttgagtgygggtygggtygtttttyggyggyggtgggtgggygygygagggyggagggggtygggagttttggtttygaggtagygaggagagaygggtaaatagtagagygttaagttaagtttttaaagtgttaatagttgtagaagttygaattttagyggttttaggggygygggtatagggttttgggttt

SEQ ID NO: 4306 - DNA, 201 bp, synthetic construct
  misc_feature 1..201: note = Description of Artificial Sequence: Synthetic polynucleotide
  source 1..201: mol_type = other DNA
gttgttyggggttgttgtataagtyggtgatattgttttgygggtttayggtttgtgagygttgygtggagttggggttygygyggttaygggygygggygygggygygggygygtgaaygtagtgttgagtygtttgttggagaggtttttttyggtygagtgttygttgygtaggttggagggttaggygyggagtttg

SEQ ID NO: 4307 - DNA, 201 bp, synthetic construct
  misc_feature 1..201: note = Description of Artificial Sequence: Synthetic polynucleotide
  source 1..201: mol_type = other DNA
agttagygyggttttygggtttttgygtttatggygagggtygygggggaatagtttttggtaggtaatttgtygggtatttatttgagtttttygtatygyggttygaaaatttgggagygttttaggataaagggttagttttttggaattagtygtgtgtgattagtgtgtgttagttygtatgtgggggttttagtg

SEQ ID NO: 4308 - DNA, 201 bp, synthetic construct
  misc_feature 1..201: note = Description of Artificial Sequence: Synthetic polynucleotide
  source 1..201: mol_type = other DNA
gttgygtaggtatygggtttygttygggygtyggggtagggttgtyggggttagtaggtttttygygttttttttggyggggttttaggggttggattgygggttttttttgtttttttttyggggtygagtaagttygyggggggtgtttttaggtagtaggagggtgaggtaggataatttttaggttttgtagttttt

SEQ ID NO: 4309 - DNA, 203 bp, synthetic construct
  misc_feature 1..203: note = Description of Artificial Sequence: Synthetic polynucleotide
  source 1..203: mol_type = other DNA
atttttaaagaatgataaaataaagaagygtaygttaggtttttaaggagatatygtttttttttttttattattttttatttttattagattttttatygyggattaaagatgaatttgttattaattaagtttttgtttaagttattttatttttygtagtttttttatttgtyggggyggtgttyggygtattttaggtt

SEQ ID NO: 4310 - DNA, 201 bp, synthetic construct
  misc_feature 1..201: note = Description of Artificial Sequence: Synthetic polynucleotide
  source 1..201: mol_type = other DNA
tgatygggygtygaaaygtygggagtygggggttaagggttygagttaggaggtttyggagtagtagtygttygttttttaygtygtygtygtygttttygyggttgtttggataygggataatygatttggggtttygatygtagtagagtyggaggggtgggtaggygygggttygggagaygygyggggaaaygygyg

SEQ ID NO: 4311 - DNA, 201 bp, synthetic construct
  misc_feature 1..201: note = Description of Artificial Sequence: Synthetic polynucleotide
  source 1..201: mol_type = other DNA
ttattttaaagyggtagygtatttttagagttggttttttttttygtttygggttttyggatyggttgtaggagttttttttttygggtygggyggyggygtttggygttttygggttgggttattgttttatgtttttttttgggygtttggygygtgttttatygtygttatygygtttaaaggttaggttggaagttc

SEQ ID NO: 4312 - DNA, 208 bp, synthetic construct
  misc_feature 1..208: note = Description of Artificial Sequence: Synthetic polynucleotide
  source 1..208: mol_type = other DNA
gggggygttttattgattttttttggygtttgtttttttttttaggttgygttttttttatttattgygagygtgagttagygttgaaggtttagagygygttgtaygagtagaagattttgttyggggtaagtggygttygtygtggygtaagyggtygaygygtygatagggggygatttygggaggtygggyggyggygyggygc

SEQ ID NO: 4313 - DNA, 201 bp, synthetic construct
  misc_feature 1..201: note = Description of Artificial Sequence: Synthetic polynucleotide
  source 1..201: mol_type = other DNA
tattgatgaatgygygttyggattttygggyggattttttttaagtyggttygtttttttagtttaaataaataaataaagttagatggaagaaaaaagygtttattttattttygtygtygtttygttygttatttttgtttttgtttygttygtttggygttttaatagagtatagtttggtggataaagtttttttat

SEQ ID NO: 4314 - DNA, 201 bp, synthetic construct
  misc_feature 1..201: note = Description of Artificial Sequence: Synthetic polynucleotide
  source 1..201: mol_type = other DNA
gaaaggaaaaagygatatttttgtttygtatagagttaaatattggaagtaygagatagtygaygtggattaggattattttggtttttygtgyggyggyggyggyggyggttgygygygggttttttgtggygyggttttggggygygggygygggyggyggyggggttgygggagtygtyggggygggaggyggagygc

SEQ ID NO: 4315 - DNA, 595 bp, synthetic construct
  misc_feature 1..595: note = Description of Artificial Sequence: Synthetic polynucleotide
  source 1..595: mol_type = other DNA
tttggttttyggygttyggggttagygtagttyggggygagyggggygygggtyggggagggggagttgttygygtattttatttttttttttttygggygggyggyggyggttygttgtatatatttyggygtatttygttaggtygygtatagygtttygagtttaggygttttttygtttttttttygygttttgyggyggyggyggyggyggtagtagtagtagtaatatggttgttgatgggtgtttggggtggygttggyggygggaggagttttttygagtttttgygtyggttgttygttgttagttatggtaaatggtggyggyggyggyggyggtagtagyggyggyggyggyggyggyggaggtagtagttttagaatgagtagtaatatttaygygaattattttagtttagaygygttttttttttttttttttttttttttttttttttttttttttttttttttttttttttygtttttggtttaygagtttaagatggatgygtttattatttyggtgattatggaggtgtygtgygatagtyggggttaaygtatgtggtgggtttttttggtttttt

SEQ ID NO: 4316 - DNA, 201 bp, synthetic construct
  misc_feature 1..201: note = Description of Artificial Sequence: Synthetic polynucleotide
  source 1..201: mol_type = other DNA
tttttttttttygtttttttttttttttggagaagagagttggtgttaagagttagggattttggttgtgtgtttgyggatttgtagtggyggyggyggyggyggyggyggggaggtagtaggygygggagygggygtaggagtaggyggyggyggtggyggyggyggttagatatgaaygtygtttyggygtyggyggtg

SEQ ID NO: 4317 - DNA, 269 bp, synthetic construct
  misc_feature 1..269: note = Description of Artificial Sequence: Synthetic polynucleotide
  source 1..269: mol_type = other DNA
tttatygatygtattatttgatygygggaaaygaaatttgagtttaggaatttgaattgttttaygtaygttygttttyggataaattttttagaggatygtgatttttttatttagagattatttagggagatgttttggatgggataagtagataaatggyggttygaggaaaatgtaggaaattttatattgtagaygtttaagtattaattgtttgggtttyggggtagggaaygggagatattatttatyggaaatattatatt

SEQ ID NO: 4318 - DNA, 201 bp, synthetic construct
  misc_feature 1..201: note = Description of Artificial Sequence: Synthetic polynucleotide
  source 1..201: mol_type = other DNA
ygyggtygygaggyggggttggagggygttgygggttgygyggaggttgygggaagygyggggagtaygyggagttygattagtagggagatygygtygygtygggtataggtaygggattygygttttaggagggygtagygagaggygtattgygtatttaggggttgyggtttyggtygtygtgyggtgataagttga

SEQ ID NO: 4319 - DNA, 267 bp, synthetic construct
  misc_feature 1..267: note = Description of Artificial Sequence: Synthetic polynucleotide
  source 1..267: mol_type = other DNA
tgaaatttagaggaaaataaaaatgtagyggtttttayggaggtttttggtttgtaggatatttgagggtggagataaggatgtygyggagggaggattygggagttyggtygygttttttagtttyggtattygygtttagygygtygygtttygygtttttygygygtggtygtttttygygggtygggtyggggttgygttgttatttagyggtygygygtttagygtygygttatygtttttgtaggtygtyggggtttttgt

SEQ ID NO: 4320 - DNA, 287 bp, synthetic construct
  misc_feature 1..287: note = Description of Artificial Sequence: Synthetic polynucleotide
  source 1..287: mol_type = other DNA
ggtttagatttygygagtttygggtttygtttattyggtyggyggttttttyggggyggagygyggygtttttggagtyggtatttyggatttyggygtygtttygygtatygttttygttttagtttttagtggygyggygttttttygygatattygygggtttttaggagygagtygattttyggttgggtttggagtyggggttaagtttattyggagggagtayggagtttatttagttgtttttgggggtaggaggtttaggttttattttgtatatygtt

SEQ ID NO: 4321 - DNA, 201 bp, synthetic construct
  misc_feature 1..201: note = Description of Artificial Sequence: Synthetic polynucleotide
  source 1..201: mol_type = other DNA
ygatttggtattagygyggaggttattttgygtagtygggtaggtayggyggtttttaggtattttygtagtagttttagtttttggttygyggygtygygagggygagaattygtgggygtyggttttttttttygtygtyggtgttttgtaaagtggaggtyggygttttyggygttttygtygygttyggggtaggtc

SEQ ID NO: 4322 - DNA, 201 bp, synthetic construct
  misc_feature 1..201: note = Description of Artificial Sequence: Synthetic polynucleotide
  source 1..201: mol_type = other DNA
yggaggtttaygttgagttygygtagygygtayggttygtyggyggyggtggttttygygttgygttgtgttygattyggttygygyggatttygttygygttattttaygygtaggttttgtagygtttttaggagtagtagygttygtaggggatygtygaggtygtyggggttatttgggtagagygygagtaggygc

SEQ ID NO: 4323 - DNA, 286 bp, synthetic construct
  misc_feature 1..286: note = Description of Artificial Sequence: Synthetic polynucleotide
  source 1..286: mol_type = other DNA
gygygggaggygtygggggtygyggaggyggggyggggaggggtyggyggyggyggyggygygyggaggagatygtagtgyggtyggygttaggattygygggggttttttaggtygyggygtttttygtttttttttatttttygattttttttygtttttaaaatgaggaaayggagtaattygttttaagttgtgtagtygggatygtttyggggtgtgtagtyggttygyggaggtttttttgggggygggygyggggygyggttygggggygttttttgag

SEQ ID NO: 4324 - DNA, 244 bp, synthetic construct
  misc_feature 1..244: note = Description of Artificial Sequence: Synthetic polynucleotide
  source 1..244: mol_type = other DNA
aatgtttagtattatttaaaaagaaaattatatatattagttaatgatatattttaatttttaataaagttggtatttttttttgattatagattttgtygtggtaaattygggtttygaygatagaggtagygtagaagttygtttttaaatgagataattttattaaaattataattttttgtatttttatagygtttttttagtggyggagattttaggtgttttaygttagggtttatta

SEQ ID NO: 4325 - DNA, 201 bp, synthetic construct
  misc_feature 1..201: note = Description of Artificial Sequence: Synthetic polynucleotide
  source 1..201: mol_type = other DNA
gttttaattttttttygagatttygggyggyggggattttttttygggtggttgygtgygygtttagtaattyggtgggtggaggtttggagtttygttygyggtygttttygttgattttttagtgtttttgtttgttttttagagtttaggtagttagtttttygttaggaaggtagagtagygagattttyggtttac

SEQ ID NO: 4326 - DNA, 372 bp, synthetic construct
  misc_feature 1..372: note = Description of Artificial Sequence: Synthetic polynucleotide
  source 1..372: mol_type = other DNA
ggattygtygtttaggttygygtggggatygtagggaattygygttaygtygggggttattgtttatygygaggtgttgaagtggtttygtgatygtygygggtygtggttgatatygyggagaagttaggatttttatagtttttgttagatttgaaagtaagttggaaatygatagttgttttagttgttttagattttaatttggtttgggttttttttttttttatttgaaaatagatttagggtaatgtttaagagaattttaatygayggaagtggtygggaaattttgttttyggtattgagggatgttatyggagatttttttgttttaggtttgtyggagtttattatattygttaatgttat

SEQ ID NO: 4327 - DNA, 201 bp, synthetic construct
  misc_feature 1..201: note = Description of Artificial Sequence: Synthetic polynucleotide
  source 1..201: mol_type = other DNA
aattttttygtgttttttgtataatttgggagagaygtagygttgtgggtgtagagttgtttagagagggttttaggttagggtagggaagagataggaygtygyggggttyggttgtyggygttgttgttattttatggttgaaggggattgaggtygaattgggtaaggagaagtyggtygtagattgtggagttgatt

SEQ ID NO: 4328 - DNA, 247 bp, synthetic construct
  misc_feature 1..247: note = Description of Artificial Sequence: Synthetic polynucleotide
  source 1..247: mol_type = other DNA
ggggtaggattttagaagttatttaattagggaygttgggttggaaatygtttaattaggtayggggtaggagaggatagggyggttttygggatgtggyggggtttttgtttttggttgtagttggagttttgygtttygttttygtttttttgtgttttttgttgttagaggtttagtttttgtggttttgtgatttgygggtattgggggatttatagttaagaygttaggatttttyggaagt

SEQ ID NO: 4329 - DNA, 201 bp, synthetic construct
  misc_feature 1..201: note = Description of Artificial Sequence: Synthetic polynucleotide
  source 1..201: mol_type = other DNA
tygttttttttttygggatgtyggatyggtatttttattatttttaggtttttagggggttttggygttttagttgtggattttttaatattygtaggtygtagggttatataggttgggtttttaygtgtagaggatataaagtagatagaygaaaattggagtttyggyggtagygagaaataaaggtygygttaaatt

SEQ ID NO: 4330 - DNA, 201 bp, synthetic construct
  misc_feature 1..201: note = Description of Artificial Sequence: Synthetic polynucleotide
  source 1..201: mol_type = other DNA
ggattttgagttggggatygtttaattaggtaygtaattggagyggatagggyggttttygggatttggyggggtttttgtttttygttgtagttggagygtttggtttygttttttttgttttgtgttttttgtttttagaggtttagtttttgtggttttttgatttgtaagtattgggagatttatagttaagaygtt

SEQ ID NO: 4331 - DNA, 235 bp, synthetic construct
  misc_feature 1..235: note = Description of Artificial Sequence: Synthetic polynucleotide
  source 1..235: mol_type = other DNA
atttygttttttgtaagtttgtaatatttygtatttagattygtaatttaggyggaggataaagggttgtagyggagggygtagagtagatgtttagggyggggtagagggggygggaagttggygttayggtygyggygagggygagtagtygygygttttyggtgttaggaggaatgttygtagagyggaggttggtaggygygagaggttttaagygygtagttygattaag

SEQ ID NO: 4332 - DNA, 201 bp, synthetic construct
  misc_feature 1..201: note = Description of Artificial Sequence: Synthetic polynucleotide
  source 1..201: mol_type = other DNA
gyggtatttygttttyggttttgygygtttatttyggggygygtygaggttatygtagggtatttatttggtatttgtttttgagtgtgtagatygtygyggtttttatttgggtttttaaataagttttagggagaaagaaggaggtaaaaaaaaaaaatttaattatgtaaatggatttyggattgggaggygygggat

SEQ ID NO: 4333 - DNA, 201 bp, synthetic construct
  misc_feature 1..201: note = Description of Artificial Sequence: Synthetic polynucleotide
  source 1..201: mol_type = other DNA
gtygygttaaygaaygtaggyggygggaggttyggyggyggggttygygtttttgtatygygatygygttagaaaatatttyggggttgggyggygtttyggagaygtatttttttgttatttttatygtttttggtaaygattattaatgttattatgttttatttttttttattttttttygtttttagagtygygttc

SEQ ID NO: 4334 - DNA, 201 bp, synthetic construct
  misc_feature 1..201: note = Description of Artificial Sequence: Synthetic polynucleotide
  source 1..201: mol_type = other DNA
aaagagggagaaagagattaaaaaaagaaaaagataaggggagggggaaggaaggaaggagagaaggaggaagaagtttggggtttgttgttttaggagygtttaggtagtyggtgttggagygyggggygttygttttygtygggattgtyggtttyggggtttgygagagygttagagttttagtyggygygttygggc

SEQ ID NO: 4335 - DNA, 201 bp, synthetic construct
  misc_feature 1..201: note = Description of Artificial Sequence: Synthetic polynucleotide
  source 1..201: mol_type = other DNA
gtttttgygygyggaaaggygttggaggyggttttatagtyggggaggttagyggyggygtatttgtattttgggagaygtttggatttagtttaagttygtaggttgggygagyggagatttttgattttatygtgtgggtgagattattgtttttyggtttaaaagaaaagaaagtatgttgtgaatttttgaaataaa

SEQ ID NO: 4336 - DNA, 201 bp, synthetic construct
  misc_feature 1..201: note = Description of Artificial Sequence: Synthetic polynucleotide
  source 1..201: mol_type = other DNA
tggaatttayggygtttygttygtttygygtttaggaatattgtgygtttagygtagatgygtttttaygattttttgtttggttyggggttatgtggtygygtatyggtttttgaagtttttatttgattgttggggaaggygtttagaattaggagygggttggttggggattggttttygygttgggtygtttygttt

SEQ ID NO: 4337 - DNA, 296 bp, synthetic construct
  misc_feature 1..296: note = Description of Artificial Sequence: Synthetic polynucleotide
  source 1..296: mol_type = other DNA
tygggggtgggggtaagygttaygtgygygttaggtttttggtgtgttyggtaggyggygttgygtggttgyggttggtttygagggtgyggggggyggygattygggagggaaaatttttgttttttttyggggtttgttttgttygttttttaaattygttttatatttttttygattttygtttttgtaagygttatttgtagttttatyggttttygtaayggtggtggtggttggtggggggtttygaagtttgtttttggttagtyggatttyggtgggagatggaggta

SEQ ID NO: 4338 - DNA, 201 bp, synthetic construct
  misc_feature 1..201: note = Description of Artificial Sequence: Synthetic polynucleotide
  source 1..201: mol_type = other DNA
gtyggtygagtttygggagtygaggttggaaaygttggagygggygttgtttatygaaggyggttygggatygggaygygggttygagygatyggagygygggttgtygtggygttggtygtagtttaggttgatgtygttggatygggygttgtygttatygtygtygtygtyggatttygttaggttggttygtgggtt

SEQ ID NO: 4339 - DNA, 201 bp, synthetic construct
  misc_feature 1..201: note = Description of Artificial Sequence: Synthetic polynucleotide
  source 1..201: mol_type = other DNA
attygttattgtgtatttggaygttatttgtagatttagygtttgyggggatttyggaaaygggagagygggttttyggaaayggtgattaatgggaaaygtgattagatgttattaggygaatagttygtttttaggtaatatagaaggaagagaygtttttagttattttaaaatagayggagtttttagttaatggat

SEQ ID NO: 4340 - DNA, 266 bp, synthetic construct
  misc_feature 1..266: note = Description of Artificial Sequence: Synthetic polynucleotide
  source 1..266: mol_type = other DNA
ggaaatygttagttttgagygtyggattttttgtgttgggtgggagtgggggttygyggttttggtgttttaatttttggaggaggaygtygggyggggygatgtttgtgtttgtggttttttgaggtagtgggagtggygtgtgaaggattgtgagagtttggygtgaagtgattgttatttgttagatattygtttggttgagtgtggtttygggatygtgttygtaagyggatttygtggaggygtttttttttttatttttt

SEQ ID NO: 4341 - DNA, 201 bp, synthetic construct
  misc_feature 1..201: note = Description of Artificial Sequence: Synthetic polynucleotide
  source 1..201: mol_type = other DNA
taaagaagtygygggtatyggtttaataaggtgtagygaatagtygttygttttygttttaatttatagttttatattttayggtgttattgattttttygtatttagttatataggaygtggataggtatayggggtgatagtttygtattgaayggtattaatttttattygtatyggagttatatagatggtttgyga

SEQ ID NO: 4342 - DNA, 228 bp, synthetic construct
  misc_feature 1..228: note = Description of Artificial Sequence: Synthetic polynucleotide
  source 1..228: mol_type = other DNA
aggataygttggatagtttygaaaagatatagtgggtggtttygggygtgggtaatygggtgyggaattatagygtattyggagttgygaatttagaygygggtgattgttgattttttgttttgtygtttttatttgtgtatgtaggtggyggttagttggggttagggaagygtggagggtgggttttaatygagttaagaaaagtttggggtgttttgaattttg

SEQ ID NO: 4343 - DNA, 248 bp, synthetic construct
  misc_feature 1..248: note = Description of Artificial Sequence: Synthetic polynucleotide
  source 1..248: mol_type = other DNA
tygggattgagtttttgtagttttgaggtttggaggttygggyggtagtaattgtgtyggattaggttygtgggtgyggtttgtggtgtagttggagatygaggtttygygtattttygttygygttttagttatttaggttyggtygtagygaaaaggtttaagagggaagttagaggtgaaygttttaggatgaaggttttttgtaaaaygttgggatttagatttggggtgggtgtttggggttt

SEQ ID NO: 4344 - DNA, 387 bp, synthetic construct
  misc_feature 1..387: note = Description of Artificial Sequence: Synthetic polynucleotide
  source 1..387: mol_type = other DNA
aagtygaggtgttggaggaygtgttgygggagtagttygggtygttgttttagttggtygttgtttgtyggtttaagyggttgttttygggyggttattygtttattgaaaatttttagttggtgttggagyggyggygtgtggttaaygttaaggagygtgagygggtgagggatttttagggtygaygttygttttttttttttttgttttattattaaatatttggttaatattygggggttygtttatygtttattttygttygaggygatttygagttttygaggttttttaygtttttagtttgttaggagaatggtagtggttttttttttttgtattttygtgtagttgttygttggyggtygttgyggtggtygtttc

SEQ ID NO: 4345 - DNA, 203 bp, synthetic construct
  misc_feature 1..203: note = Description of Artificial Sequence: Synthetic polynucleotide
  source 1..203: mol_type = other DNA
ygatttaggttttttagttttygtttagtttttygygtgygggygtygggatygtagtatttgtgaygtygaagtttagtaggtygtagaygggagttaygygyggttttggtatagggtaaaaatttaygtttaggtaggygggtagttaygatgtygggtaagtttagggtagattttyggtggygtatagggaagtagyg

SEQ ID NO: 4346 - DNA, 203 bp, synthetic construct
  misc_feature 1..203: note = Description of Artificial Sequence: Synthetic polynucleotide
  source 1..203: mol_type = other DNA
tgygaataagattaaggygaggtgaggtttaggttttygggattgatagygtygyggtagggggttygaggygggagttggggattttagygttttttaygygygttttaygggggttgtygttaataaaggyggagggtaagggtgygtttatttaagtaagggggayggtgggtygttygggttgagtagyggagygtagc

SEQ ID NO: 4347 - DNA, 312 bp, synthetic construct
  misc_feature 1..312: note = Description of Artificial Sequence: Synthetic polynucleotide
  source 1..312: mol_type = other DNA
ggtttaggaggagtygygtygggttyggttataagaggtyggttagtaggygtttygttagtattygttygatttyggttyggagtatygggygtttagygygggtgaaggyggagtygtagggttggtttttaaagggatgttttygttygagyggygagattagtttygttygtttttygtygyggtygygtygtagtygtttayggtygtygatatggttttttattgyggygataatttyggagtgtattygtagttyggtttgttttygttygtygttatygtygtygtttygggygttttttyggt

SEQ ID NO: 4348 - DNA, 407 bp, synthetic construct
  misc_feature 1..407: note = Description of Artificial Sequence: Synthetic polynucleotide
  source 1..407: mol_type = other DNA
tttyggttygygggaggtagttgtattaagaaggtgaggaygttgagygggggttygtgtttttygtygtygtagtttttattgtyggygygygtttttygygttygttatagtagygygttaggyggaygtygygggaatttgaygttygaggttygyggtttttaatgagagttttagaatatttttygtttttgayggttagyggtagygtygtygtttttygtagagygttygttttttygtttttagagttttagttttttttygagygatttygtagtttttttttygtttttattygtygtyggttttgtagttyggttttttttttagtttaggygygygggttgtagtgggygatygttttttttygatttttygtygtgtttttgggtttttygaag

SEQ ID NO: 4349 - DNA, 295 bp, synthetic construct
  misc_feature 1..295: note = Description of Artificial Sequence: Synthetic polynucleotide
  source 1..295: mol_type = other DNA
attttgggtygygggagaagtgygtgtagttygggtaaggtygggyggggtygggygygggygggyggtygagggatgygatagggtygggtayggtttygtattttttygtattyggygtygtygtttygtygttttttttygtttgtagggtygtttygggtattttagggttgttgaggggygggygggtygtaaaagttaygagagaggggyggtagggyggygyggtttgygagygtygygggatttygaggagyggygyggggagtataggggygygyggggygggygc

SEQ ID NO: 4350 - DNA, 435 bp, synthetic construct
  misc_feature 1..435: note = Description of Artificial Sequence: Synthetic polynucleotide
  source 1..435: mol_type = other DNA
ataattttggttttatatattttatatgtttygtataaagaaatagaaagygggygataygttttgggagggygggttggyggtttttttagttyggagygygtggaggttgygygtaggggttygggaygygggatagggatttygygtagtttaggygtyggggaatyggggttggagtyggggatttgagtttagyggaygtttttttygtttggaggttyggtayggatygggatattagggygttygtggtygtggttyggtttttggttgttgygggtygyggtttttagtgggtttttaggatttttttttayggygggtatttatygaggttgagaggttaygtygtgttgttggggtttttygtygattatatttttgggygttagttygggtagagatygyggggattggttaggtygggttagg

SEQ ID NO: 4351 - DNA, 410 bp, synthetic construct
  misc_feature 1..410: note = Description of Artificial Sequence: Synthetic polynucleotide
  source 1..410: mol_type = other DNA
tggttgtgttagtygatatgagtttttttttttttaggaaggygtaggattyggggaagttttygyggttaggtygtttgtttattygtagatttygggygtygttygygttttttgttttttattttttaatttttgygtggttttagggtttatatttttggagtttttttttttagtaaatagtgttgttttttatttaatagtagaggygtttaggagtttaggygatgtgtttaaggtygaatagagggatagtagtgagttgtttaatttttttagttgygtagttaggatayggttgggggygggtggagatgtggygtagggttagggttygggtttygggaagtaatgatygagggyggtgattattgtttttagtttttyggygggtttttttttaaggg

SEQ ID NO: 4352 - DNA, 392 bp, synthetic construct
  misc_feature 1..392: note = Description of Artificial Sequence: Synthetic polynucleotide
  source 1..392: mol_type = other DNA
tggaagtattygttttatygyggggtttggtatttaggttttgggatttttgttattgttaaggattttttyggggattygagttttygggttgaggatygygggggattttaggtygggayggagttttttttggttygttgtgygygtaygtttggaaaggygggatttaaggtagygatgttgygggaggttttgtagtgttaaygagttttygaayggtttygttttattttttttttgtgtgtttygtaagtttttgtttagtaaatygttatagtttyggygygygagagtggygttggtaygtttaaatttyggggtttttggttaggttaggggggygggygtgyggyggggtygggtygggtygggtgygtttagygggtttc

SEQ ID NO: 4353 - DNA, 203 bp, synthetic construct
  misc_feature 1..203: note = Description of Artificial Sequence: Synthetic polynucleotide
  source 1..203: mol_type = other DNA
ttygattttagttygtygtygttttttaggyggattttttagaggtaggttttagttttyggygyggggaggyggygygttttagaggggygtagggtgygygggggtygttggtttttygggtattttttttttgyggttttttygttttttttyggagttggtgtttgaggtygttgggattttagtttggygtttttttt

SEQ ID NO: 4354 - DNA, 398 bp, synthetic construct
  misc_feature 1..398: note = Description of Artificial Sequence: Synthetic polynucleotide
  source 1..398: mol_type = other DNA
gggttyggggataaagggtgaygtgtggttttggggaaggttygggatgagggagttgaatttagttgtttygygyggtgtttagagtgttttatygygygtaataaattttygtagatatygtatttttaatgyggtgtttttttgtgttagtgtttyggyggtttttgtagggtgttaatgttayggttgtatatygttttttttttttattatttttatttgaatagatttggaggaggyggaaatggaaattagggtatgtttataagttggattygttagatttttttgttyggyggtatgtttgtgtatgtttgtatgtyggtaaggagttayggatagggaaggtttaagagttggttatttgagygtagtagatgggttttygtagtttt

SEQ ID NO: 4355 - DNA, 286 bp, synthetic construct
  misc_feature 1..286: note = Description of Artificial Sequence: Synthetic polynucleotide
  source 1..286: mol_type = other DNA
gtyggtttttttatatttaygtgtttttygtgtgygygttttyggtttgtagatgttataaggttggygtygtttggattttygggyggttttatttttygyggtygttaygtttygttttttgtatttagtttttttggygttttygttgtagtatttaagattaggygtygtttttgttagtygtgttgtttagtaygtttgagggtygttgtyggtaggttttatttttygttygggttttttatttatttttttttttggayggtggggtttaagttttgta

SEQ ID NO: 4356 - DNA, 267 bp, synthetic construct
  misc_feature 1..267: note = Description of Artificial Sequence: Synthetic polynucleotide
  source 1..267: mol_type = other DNA
ttttattttttttttttttttttagtttggttgaagaaygtttttaaggaaattygggttgtttttttttatttggaagtggttttttttatatyggttygtaaattgattatgaaatataygatgttaattyggagttgtattttttagttgggtattttygygygttggttttyggggtttygttttttattttttgtttttttttttygygttttgtttttattttttatttttygygttggttatttygtttttttggtagtt

SEQ ID NO: 4357 - DNA, 260 bp, synthetic construct
  misc_feature 1..260: note = Description of Artificial Sequence: Synthetic polynucleotide
  source 1..260: mol_type = other DNA
gaaattaygataggtttgtattatygtttttttttttaygttttygtttaggtttgtaaagtyggttgtttttggttaataggygttttttttgttttayggtgaaaattagtttgtggtgtattgagatttgtaaattattttttgaatgttaggggygttgtaaaatagtygtygggtgtagtgggtygggygttyggttattttggttgygattatygtagttttttaaaggatgygggtagatgtagayggttttg

SEQ ID NO: 4358 - DNA, 239 bp, synthetic construct
  misc_feature 1..239: note = Description of Artificial Sequence: Synthetic polynucleotide
  source 1..239: mol_type = other DNA
gtgagyggggtaygagagtgtagggtttygttggtgtttttttttyggygttygtyggatttatygtttttatygttgyggtgttygaattygyggattyggatyggyggtagtagaagyggtagyggtaaagtattygtagaatggggtatygygaaatagttttttttttttttttttttgttggtggtgtagtygygatagttygttttttaggtaggggtttggagtttgttttt

SEQ ID NO: 4359 - DNA, 846 bp, synthetic construct
  misc_feature 1..846: note = Description of Artificial Sequence: Synthetic polynucleotide
  source 1..846: mol_type = other DNA
ggtggtttttggggtagatagagtaggatttgtttttgttttttgtttttttygtttttttttttttagyggyggygatygtagtaatagyggtagtggyggttgttgttattgttttgtygttgtygagtyggttatttgggtattygyggagtygygtygttgttatygtttyggyggtttttyggagtgygyggagggggyggyggaggagygagatatttatagtaatygaggatgygaggggygtttagtagtagygagtgtttgggagttaggaggaggttttygygygtyggtaatttttagtgttaggygttttgtagttttygygygtygygtttgggttygtatygttttygtagtgagggttygttygagyggtaagtttttttyggyggttaagtygatatttttttttygtttygtygtttatttygggtagtagtygyggaataatggagagygtagttagtagttttggagayggygttygggggaggaygygtygtygtygtygtygttgtygttagggtaggygygygtygygtggagtygggygggtgygagggygygyggyggggggtggggggtaygygtygygyggggggygggggtagtggggggygygygygygggttyggggagttygyggggagagttyggygttyggygtagygyggygyggttaagtttygygtttttttygttttttttyggygygttygttttygtttygtygttygtattygttgggggygtttagaaagatgtatagaggtaayggttaggggagyggaggtttaagttatatgtttgygttttygggggttagagttygttagt

SEQ ID NO: 4360 - DNA, 526 bp, synthetic construct
  misc_feature 1..526: note = Description of Artificial Sequence: Synthetic polynucleotide
  source 1..526: mol_type = other DNA
agttgtgaagaggygtgggggtygygggaatttttttttggtyggtgygatgaaagtygggyggaygaggtggtttaayggggttgagagtggttyggtygaggygygggttgagtttttagtatttggtttgagyggygtgggtagtagtttgtatygyggatatttttaattttgtygygtttgygtygtattttggtygtggtagygatttttygggtatttttgaggtygtttttagttttataagtatttagtygtttattttagagtagyggygtygatygttttaagaggagttagttttygatatygttttttatttatttttttatatttttatygttggagggggtgagtgtygtggataggygttttygttyggggatagtttagyggyggtagttagttygattttttttygygygggtygtttaaatttgattagtagagygagyggtttagygtagtagtygttttygyggtttttagttgtagaaaagtaaagygtygggaggaagtagta

SEQ ID NO: 4361 - DNA, 201 bp, synthetic construct
  misc_feature 1..201: note = Description of Artificial Sequence: Synthetic polynucleotide
  source 1..201: mol_type = other DNA
gtttttygtagataagtaaataatttggaygtgaaatggaaatggtaattaatgtagtaatgttgttatatttygagtgtgtaaattttattgattygtygygttayggggggtgtygggygtayggggatyggtggygtgygtttaggttgtttattttttttttttttttttttttttttttaggttttygggyggggc

SEQ ID NO: 4362 - DNA, 523 bp, synthetic construct
  misc_feature 1..523: note = Description of Artificial Sequence: Synthetic polynucleotide
  source 1..523: mol_type = other DNA
ttttaygagaagaataagaagggttggtaaaatagtattygttataattttagttttaaygagtgttttattaaggtgtygygygagggyggyggygagygtaagggtaattattggaygttggattyggtttgygaagatatgttygagaagggtaattatyggygtygtygtygtatgaagaggttttttyggtygtygttygygtatttttagttyggtaaggggtttttyggggtyggaggygtygtaggygggtgyggygtggygggygtyggggtygayggttayggttatttggygttttttaagtatttgtagtttggtttttttaataattygtggtygttatygtagttttttttatttatgttttatgttttttgttagatggyggtagtygtagyggttgtagtagttgyggttgtagtygygggtttyggtagttttggygyggtygttgtggttaaggggttggygggttyggtygtttygtaygggtygtatataygygtgtagagta

SEQ ID NO: 4363 - DNA, 276 bp, synthetic construct
  misc_feature 1..276: note = Description of Artificial Sequence: Synthetic polynucleotide
  source 1..276: mol_type = other DNA
tygtttaggtagtattttygtagtagtygttaaygagttgtagtygtygtttattgttygygtyggttttygtttttyggtgtttgtygtatygtgggtygtttygtygtgttygatgggtgygtttttagygttgtygtygyggygttyggtttygggttttygtygttgygtygttagttygtyggtagtagtygygtttattggygyggattyggagyggtttaggygtttatttygggayggttygtgaygttayggagggagggaggtggt

SEQ ID NO: 4364 - DNA, 357 bp, synthetic construct
  misc_feature 1..357: note = Description of Artificial Sequence: Synthetic polynucleotide
  source 1..357: mol_type = other DNA
attttttttttaggtaggagtagatatttgtttgtttttayggygygttagygttttgttttagtygtttttgggttagagttygaaatttatttattgygtttttatttyggtatagatagtttttaaagttgttygtattttttagatttygttttttgtttagttttyggatttygtttaggggttgagttgaygttygygggtggatttttttggttygttgygtagggaattgatttygggaatttagggygtatagaggttaaagaagttgyggtaagggagggtgggtaaatttagtttgagtttaggtttttgtygtttttatttttaagtttgttttgtttttttttt

SEQ ID NO: 4365 - DNA, 278 bp, synthetic construct
  misc_feature 1..278: note = Description of Artificial Sequence: Synthetic polynucleotide
  source 1..278: mol_type = other DNA
tgtygygttgtygtygtagttagtygygtygtygtygttgtygtagygygggyggtygygygtyggtagtaggggtttggygaggaagtygttgagtttygygygtttygygtttttggyggtygtagygttgtttattaattgatttttttattgatttatttaatttttaggagyggttgttyggaggtaygggtttttttttaaatttgtagygaygttttyggygtgggtataaaggtttygayggyggtyggygggggttgtttagygttygg

SEQ ID NO: 4366 - DNA, 336 bp, synthetic construct
  misc_feature 1..336: note = Description of Artificial Sequence: Synthetic polynucleotide
  source 1..336: mol_type = other DNA
ggtgatgaagtttgggtagaaattttttgtyggtygttygttttaygtttttttyggggtygatattgttaattttttygggtattgaggatatttttgygttttggagyggtgggaggaygyggagygtygttttttggttttygatattttgttygttttttttagtgggtttgtggttgygttttttygaaggaagtaataaatttttttgattttgggggttagaggagaygttttagtttttyggaggggtgtgygggygggatygttttttygttttattggatttttggtyggggttgtttttgttttattgtgttttatatgyggagt

SEQ ID NO: 4367 - DNA, 311 bp, synthetic construct
  misc_feature 1..311: note = Description of Artificial Sequence: Synthetic polynucleotide
  source 1..311: mol_type = other DNA
gggagggyggtaaggagtgyggaggtttaaaygggtatgagtayggggyggttyggtyggaggyggttttgggygtttttagttgttttyggttgttttygttgyggtatttagyggtttatyggggttgtattgttgtagyggttttttgtgttatttgtagtttaggaggttgagtatagtgagtattagtagtagtgtatagttygygtataatattagygtttttttayggaatatttttatttygagaggggaygygggttagyggygttttgggygtyggggttattgygggagtagggtaygyg

SEQ ID NO: 4368 - DNA, 201 bp, synthetic construct
  misc_feature 1..201: note = Description of Artificial Sequence: Synthetic polynucleotide
  source 1..201: mol_type = other DNA
aaygtyggtatyggttgggaagtttyggtgtttygggttttttttggygagggyggagaagtyggyggtttttgtttagaattttgtgattgtagggatygagatattaagggygggggtgtagaggattataagttttttagygygttttatttgtatataaatgtgttttgttttttaattttgtttttgttatttgtg

SEQ ID NO: 4369 - DNA, 201 bp, synthetic construct
  misc_feature 1..201: note = Description of Artificial Sequence: Synthetic polynucleotide
  source 1..201: mol_type = other DNA
tttttatttygygtttttyggaattttagaattygggtggtyggtttttggaaagtygtagtyggygygatgtattttgtagattttattttgttgggayggattttttaatttttagaatygygggtygtagggagttaaattgttgtttttttttttttttttygtgyggttggtggtttgttttttaaaggaaygttt

SEQ ID NO: 4370 - DNA, 481 bp, synthetic construct
  misc_feature 1..481: note = Description of Artificial Sequence: Synthetic polynucleotide
  source 1..481: mol_type = other DNA
tyggggtygtatygttatggygatttgtttatttgattygtttygggtggattygtygygatttttgggygtttaggtttttgagggtttaaygggygayggttttttagttttagttgtgygttttygttygggygaggtggggttgatygyggtygtttgtataygttttttttggttygygttttyggtttgggagggyggattygtttattttaygatggtttyggttttggaagggattgttttygtgattygtttttttaatagtygttaataattttttttaaygttttttgygyggttygtttttgagaattttggttygggagagygaygyggggttttyggggttgygtaggttgyggygttttgtttaygttggttygagggygyggttygtttygggtyggtttatatatttaygttttttgtygggaggyggttgggaygyggyggggttgttttaagtgtagtygyg

SEQ ID NO: 4371 - DNA, 280 bp, synthetic construct
  misc_feature 1..280: note = Description of Artificial Sequence: Synthetic polynucleotide
  source 1..280: mol_type = other DNA
gagttagtyggaggggyggyggyggtttygygygtttagagttttagtttatgaatgggattttattttgagygttttttttygggtttggggaggyggyggygyggyggyggggggygtttygtaagttygyggttttgagyggttattygygtagtaagttgggygagttggtagtygtttgtatttgttttttggtttyggtttttgatttygttttyggttttaagygttygggttgygttttyggttgtttygygaggtagttttaggaggttta

SEQ ID NO: 4372 - DNA, 252 bp, synthetic construct
  misc_feature 1..252: note = Description of Artificial Sequence: Synthetic polynucleotide
  source 1..252: mol_type = other DNA
gygtggggagtttggtattttatttaattagagygttggattgagaattgtttaattaggygygtagtyggagaggagggggyggtattygggatttggygyggtttttgttttttgygttagygtgagttyggttagggtttttayggtygtgtttttattttttagggaggygtyggtgattyggttatagttttagttttygtygttttgtgatttgygggtattggatgattygtagttgagatttyg

SEQ ID NO: 4373 - DNA, 239 bp, synthetic construct
  misc_feature 1..239: note = Description of Artificial Sequence: Synthetic polynucleotide
  source 1..239: mol_type = other DNA
ataggygatggatttttygggttttygggggygttttaygtgggtgttggtygggggttttttggtagtggttttggygttggggggtygaggttgtttyggygttagtttaygttttygttggygttttttyggygygtagttatttygggatttttaggtggtttttaggtttgggttyggtttgaggattttttyggggyggagyggggyggggttygagagtagtaygtaggtaa

SEQ ID NO: 4374 - DNA, 405 bp, synthetic construct
  misc_feature 1..405: note = Description of Artificial Sequence: Synthetic polynucleotide
  source 1..405: mol_type = other DNA
agtttttaattaggtttaaggagtygtagagtyggggtttygggttygtaggatttagaagttaygygtttygygtttttygtttygtygttgtttgttyggtygatttatttggtgtygygtgygttggyggttygygyggtagttaagttaaaggtygaggtygaggtygagygyggygtttagtagtayggygggggttagtagggygggygtyggtygtagygygtttygttttagtagtagtygygygtygtttttgtaggtygtttygtygygggttattyggggygtttaggttgtygtttygtygtatttygtygtttgttgtatygttttygttagggyggygaygygggatttggagttygggygggttaggggygyggttygtttygtagattt

SEQ ID NO: 4375 - DNA, 237 bp, synthetic construct
  misc_feature 1..237: note = Description of Artificial Sequence: Synthetic polynucleotide
  source 1..237: mol_type = other DNA
ttaagttgttgtygtttaaggttattaagtagaatttttttaaygaygagggttgttagagygatttggaggataaygtttygtagggtagtagygaygygttgttgttgygyggggyggyggtygtygtgttttygggttygggagygtayggtggtggyggyggyggyggygygtaggataagygttygggtttttttaygttgggttatyggggtttttatattatygtgygyg

SEQ ID NO: 4376 - DNA, 204 bp, synthetic construct
  misc_feature 1..204: note = Description of Artificial Sequence: Synthetic polynucleotide
  source 1..204: mol_type = other DNA
agtygagtagtagttttagagtttttygtaagttttttttatattttttygttttygttttaaaggagtagtagtttttttttgtttttttattgtygtygtygtatyggyggagtttttttttygygygtttttttttygatggagttygggygtygtygaygtygtygttgtttygaattttgagyggggtygtttyggtyg

SEQ ID NO: 4377 - DNA, 224 bp, synthetic construct
  misc_feature 1..224: note = Description of Artificial Sequence: Synthetic polynucleotide
  source 1..224: mol_type = other DNA
ggtyggggtgygygygtgtgtatgttgtgaatgygttgygygatgtgygtttttattttatatttagtyggttttttgtttgtgttgttygagtgtggaygtgtgtaygygttgtattygttyggtgtggtagygtttygtgagtttttggaggtagggaaaggttatttgtgtttagaggttttgttgagggygggaggggtttagttttagtggggagtttt

SEQ ID NO: 4378 - DNA, 278 bp, synthetic construct
  misc_feature 1..278: note = Description of Artificial Sequence: Synthetic polynucleotide
  source 1..278: mol_type = other DNA
agygggtttgttttttatttttttagtttygygtygtyggtttatagyggttttttttggggatagtttttttygggtgtygttttygttttttttgtgygttttttttttttttttttttttattaaatattatttgggaattgtttaaattttttttttaaaaaaagagagaggyggggaggagtyggagttgtggagaagtagagggatttaggtaagtatttgtggatttaaaygggygtttttggaaattttggagaaygtyggatgggagac

SEQ ID NO: 4379 - DNA, 232 bp, synthetic construct
  misc_feature 1..232: note = Description of Artificial Sequence: Synthetic polynucleotide
  source 1..232: mol_type = other DNA
gggaaataggtyggygtgtygaaagatatygagtaggtagaaataaggtaaatttatagaggygtaataggttyggtttttygtggttagggygagtygyggtttygygtggygtttyggtygttgttttyggattttgagyggttattgttggggttttygaaagaggtgtyggttttttgggagtyggaagagttgtttgggtgggtttygttttgttttttattttatc

SEQ ID NO: 4380 - DNA, 331 bp, synthetic construct
  misc_feature 1..331: note = Description of Artificial Sequence: Synthetic polynucleotide
  source 1..331: mol_type = other DNA
tgttttgtttggattttatygtggtygagaaggaggaatggtatatygttttygtgaatattatttaygtygagttygygtyggatttyggggtyggggyggygggyggyggyggygyggagttgtatayggagaagayggagtgygggygttayggagagtattygtttaagtaggaygttygyggggaggtggttatggttagttyggtttaygatygtttggtttgygattttaatattaagttygtygtttygattygyggtaagaattggatagtttttatttttaagggtaattgtaygtatagggataagattyggaaygygtt

SEQ ID NO: 4381 - DNA, 231 bp, synthetic construct
  misc_feature 1..231: note = Description of Artificial Sequence: Synthetic polynucleotide
  source 1..231: mol_type = other DNA
gttgygttttgggygtatttgygygtttggtttygygtttygyggagagggygatgggtttyggttaggattgagtttttttttttttttttttagtttygtttggtatttttttttttgtttygagggygagttayggtttgygtygtygttttttttttyggtgttttyggttygtygttttttygygtttttttttttyggattygttttyggggttattatggtygc

SEQ ID NO: 4382 - DNA, 201 bp, synthetic construct
  misc_feature 1..201: note = Description of Artificial Sequence: Synthetic polynucleotide
  source 1..201: mol_type = other DNA
tgttyggttttgggtttagttygtyggygttgttgggggyggtaagtttygtattagtttttattygttttatttttttyggttgaatgagtgttagttygygtattggggttatttagaggagaygggtaaagtygyggttttaygggttgtattattggtygyggagtttaggggagttgtaggagaaattattgygag

SEQ ID NO: 4383 - DNA, 201 bp, synthetic construct
  misc_feature 1..201: note = Description of Artificial Sequence: Synthetic polynucleotide
  source 1..201: mol_type = other DNA
agttygatgattaggagttttyggttttygaagttgygttttatygtgtaaattttgttgatggyggtgtattgtagttatayggataygagygtttygygtagttyggggtagyggtggtattygaaggagatgtygtttttttgttgtagtygtyggygtygttttatgttygtygygggygtttygggtttttgggtt

SEQ ID NO: 4384 - DNA, 219 bp, synthetic construct
  misc_feature 1..219: note = Description of Artificial Sequence: Synthetic polynucleotide
  source 1..219: mol_type = other DNA
tygttgtagttatgaggagaatttttatttttatggttggtttatyggttatttygagatgtygtttttygattatagtatggttttgttttatagtttygagtatgttagyggygtygtyggtttggattatttttattaygggggggtgtygtygggygtygggttttygggtttgggggggtygygttyggtgaagygtygaggtatygttaatyg

SEQ ID NO: 4385 - DNA, 284 bp, synthetic construct
  misc_feature 1..284: note = Description of Artificial Sequence: Synthetic polynucleotide
  source 1..284: mol_type = other DNA
gtygggggaggtggggtygtyggggaggaggygagggaaayggggagttttagggagayggttttygagggagagtgagaggggagggtagttygggttyggtaygttttttttttyggtygtttttttttatataagygtaggtagagggygygttagttatgttttgtttttgygttygtygtygtygtygtygtygtttagttyggygygttttggaggattttgygtygyggygttttygggtttygtygtygttagtygtttygtygtttttttttygt

SEQ ID NO: 4386 - DNA, 429 bp, synthetic construct
  misc_feature 1..429: note = Description of Artificial Sequence: Synthetic polynucleotide
  source 1..429: mol_type = other DNA
aaagtattttttttttaatttatgaayggatttygatttttgttttgttattatttatgygtttygtattygaggtgtygtttttatttataygttttayggtttygygaaattyggttttttagttygygggaygygttgtttgttaggygggttyggyggtatttygggggygggaggggtyggtygtagggtttttagtttggygttygyggggygttygtagygaaggggtgggtgtygttygtgaaygtagtagggattagtttagttygygttygtttttgggtttyggttatygttttttygttattttttyggtttttgygtggatyggttygtggygggggttgttttgygttttygttttygtagtagtygyggatttttattaaygttgaygagttagtgtygygattyggggagaga

SEQ ID NO: 4387 - DNA, 283 bp, synthetic construct
  misc_feature 1..283: note = Description of Artificial Sequence: Synthetic polynucleotide
  source 1..283: mol_type = other DNA
aaaagatygyggtggagaagatggggygtttttygygatattyggttgtttagaggtgtaaagtyggtgggygtaygttyggggyggttttatagttttygggtygttagttttagggtgtygggttttaattaaggtttygaagtttttaygtatttgagggtattttgattagtttttgygggttgttttgyggtygtagtgggttttgaaagtttatttyggygtagggtggaaatyggygggaggygttgttgattttygattaaataatagtgaygag

SEQ ID NO: 4388 - DNA, 241 bp, synthetic construct
  misc_feature 1..241: note = Description of Artificial Sequence: Synthetic polynucleotide
  source 1..241: mol_type = other DNA
ygygggtggyggyggttgtggggtygtttgggatttttygtagtattgattttgtaattttttgtgtttgygtttygtggtgaggggyggygggatgygygygatttttttttgatttagttaaayggaaaagttygygygtttyggttggaaggtggaggttaggtaggattyggtaaaggtatattttaaaygaagtagattttattttttatttgtagagggaaggyggtgtggaygg

SEQ ID NO: 4389 - DNA, 244 bp, synthetic construct
  misc_feature 1..244: note = Description of Artificial Sequence: Synthetic polynucleotide
  source 1..244: mol_type = other DNA
gtagtagttttaygttgttggygtaggyggygygtaggagggtygtygttttygggaygtttttygggaygtttttygggaygtttttygygttttygaygtygtgttttttttygttttygaaagggtagaaagagtygttygaggygatgttgygggtgtttggtagattygagaagtttttaaatttttygtagttagyggggtttttttygatttgygygtttyggggtggggayggygg

SEQ ID NO: 4390 - DNA, 225 bp, synthetic construct
  misc_feature 1..225: note = Description of Artificial Sequence: Synthetic polynucleotide
  source 1..225: mol_type = other DNA
gtagggggygttgygttygtygagttyggaggggtygtygggtygggygttgygtattygygtygggagtygtttttygttygyggygttygtttttgtygttygttagtattttttgtttygyggtygygtttagataataaaagyggaagatgttgtagttgggtaaggttaggattttgttttgaagtygggyggygtygygtaygttttttttyggattga

SEQ ID NO: 4391 - DNA, 249 bp, synthetic construct
  misc_feature 1..249: note = Description of Artificial Sequence: Synthetic polynucleotide
  source 1..249: mol_type = other DNA
ygtygttttygyggyggtattgggtatgtttygtattyggggtyggtttyggyggyggggyggaygtttttttattagtygggygttygggtyggtygtygaggtttaggtggaggttgaggttgtygygygtygygggaggagtttygttttyggyggttgaggyggyggyggtataggtggygygggtygygygyggggygtagttygggagygttyggygtygggygtygyggyggttttaggttc

SEQ ID NO: 4392 - DNA, 255 bp, synthetic construct
  misc_feature 1..255: note = Description of Artificial Sequence: Synthetic polynucleotide
  source 1..255: mol_type = other DNA
ttygatygggagtttagagttttgttagygtygtattgtgygtygygtaagtygttygatttttttagyggtatyggttttaagtagtaaatatttgtgygtttttgagttagggaygygygtggggggtgggygtgtaygygggtgggttagygtagagtgggagtttgtgggtgtttttygtygggatttttaatttagttgttttygagagtttaagttgagygtygtaygtgttygtgttatttgttgtat

SEQ ID NO: 4393 - DNA, 243 bp, synthetic construct
  misc_feature 1..243: note = Description of Artificial Sequence: Synthetic polynucleotide
  source 1..243: mol_type = other DNA
aygtttgtttgagtygtgttgtyggggattagygattttttatttttttttttttataggagygtttyggttttygttttygttttaatygtyggygygygtttttatygygtaygygtttttttygygygygtataygttygygtatataygttttttygttttygttygyggagtttttttttattttttagtygtttygtyggttgaagtatyggygttgggaggyggyggygttgttga

SEQ ID NO: 4394 - DNA, 201 bp, synthetic construct
  misc_feature 1..201: note = Description of Artificial Sequence: Synthetic polynucleotide
  source 1..201: mol_type = other DNA
yggtttgttttgggttygtgaggygaggtygtagygtttygaygtygggtgggygtgtgggtggagtggagatttgggtttttyggygtatgggagtttygtygtttgyggtagggaatygttttttatttttggttyggttygggtygggagtygtgtttygygttgattyggtgtaattttttagtttattttttttta

SEQ ID NO: 4395 - DNA, 208 bp, synthetic construct
  misc_feature 1..208: note = Description of Artificial Sequence: Synthetic polynucleotide
  source 1..208: mol_type = other DNA
gagaattgaaaaggaaggygaggagtaggggttgygggtygggtttttgttgttygyggttttygggggtygygtygygtygggttaygtgggggttttygtttttygagygggygtyggtgggaaatttgygyggygagagatagggggatggggygtttttgaygygattgtggggtgygggtagttttggaggaggatgttyggt

SEQ ID NO: 4396 - DNA, 257 bp, synthetic construct
  misc_feature 1..257: note = Description of Artificial Sequence: Synthetic polynucleotide
  source 1..257: mol_type = other DNA
tagygttttygttttggttatggagyggtyggygttyggygaggtggttatgagttaagttatttagtyggygtaygttattgygygyggygagttgagygyggggtagttgtttaagtggatygatattatygtttgtttggygggtaggygggygtyggggttgyggggaggygygggatyggggttgygggagyggyggyggttgggggttggggggggtaggaaggygaggaaggtatttgyggagagttgaa

SEQ ID NO: 4397 - DNA, 350 bp, synthetic construct
  misc_feature 1..350: note = Description of Artificial Sequence: Synthetic polynucleotide
  source 1..350: mol_type = other DNA
aaagtgtttgtaaagtttgagtagagtgygyggggtygagyggggagaagggtgyggggtatyggggtgagatataggaaagaggaggayggtggggagyggtagaagatagygtttttaggattagygattttgtggtttattyggttattgggtttyggygtaaattttttttaggtagtgygggygatgttgattgtagaygtygggtagggttttygtgygggygggagygggggaagttagtgygttygggygttagttagttgatgygggaagaggttggggagttgtagggtygttygttttygggtgyggtgttttggygtagggtttgggttgagtygttc

SEQ ID NO: 4398 - DNA, 216 bp, synthetic construct
  misc_feature 1..216: note = Description of Artificial Sequence: Synthetic polynucleotide
  source 1..216: mol_type = other DNA
ttattttgttygttagtatattttagagtttttaatttttttttgtatgtaagtttaggtagagttttgttaggttttatattagagtatatttttgtayggattttttaggatygyggygtyggttggttgtttyggtttttygyggtygygtgagtttttttttggtggtggagggygtattttaatttggaaatttttagtttttaatttggt

SEQ ID NO: 4399 - DNA, 269 bp, synthetic construct
  misc_feature 1..269: note = Description of Artificial Sequence: Synthetic polynucleotide
  source 1..269: mol_type = other DNA
tygygaagggtataatttgagaagttygtggtagtttttygtagygtygggtgatatagggtttttttatttttaggagaagtgggtaggagagagggtygttygttgtttttygttgygtttagggatggagggttttattatttatggaattgttggtttttttgygtggttygggattttagtygtggtttygygttaagagggtattttttttaaaygaaatygtttygttygttygttygttygttygttygggtagtaatgtc

SEQ ID NO: 4400 - DNA, 258 bp, synthetic construct
  misc_feature 1..258: note = Description of Artificial Sequence: Synthetic polynucleotide
  source 1..258: mol_type = other DNA
agtaaaatttttattattttttyggtgtttattagttygtttttttaggtttttgggattattttatttaaaagtagttttttttagyggggtttagatygtttttgagatttygttgagaaatttttagygggttagygtttgggygttgggygtygagttygatatggttttttggatgtygttgatttgttygtyggttgtttagtttttgttttatttyggggygtagaaaggggaygggtaggggttygattt

SEQ ID NO: 4401 - DNA, 224 bp, synthetic construct
  misc_feature 1..224: note = Description of Artificial Sequence: Synthetic polynucleotide
  source 1..224: mol_type = other DNA
agtttttagggatatttgaggtattatttttgttattgtygggtattygyggygttgttaayggtttggttatatgtttttyggagagttaygggagggygttgggtaatttttattygagtygyggtygygaggaggagggaaaaggygagtaaaaaggaagagtgggaggaggaggggaagyggygaaggaggaagaggaggaggaggaagaggggagtata

SEQ ID NO: 4402 - DNA, 256 bp, synthetic construct
  misc_feature 1..256: note = Description of Artificial Sequence: Synthetic polynucleotide
  source 1..256: mol_type = other DNA
ggtygtgtagttygtttygttttttttttygaagagagatttggtgttggtatgggtatttygyggttatyggagtggtttttyggatgagtttggtttyggygttgaygttttggttttgggggttgtttggttggtgttaggtagyggaagaygtttggagagttattygtttttttttttattygtttttatygttgttygtgttaggaygygtagtttgtagttgtagtttaggtattggygygggatggyg

SEQ ID NO: 4403 - DNA, 310 bp, synthetic construct
  misc_feature 1..310: note = Description of Artificial Sequence: Synthetic polynucleotide
  source 1..310: mol_type = other DNA
tttygtygtttyggaggttggyggtgagggtattygggyggtaggggttygtygaggggtygtggtataygggtaagggggttaattyggaatggttttygagtagttttaygttttgttaaggayggtaggtgtaagggtygggggattttttgayggggtygttttttygggtayggggaggtttttatygagttttaattttgaayggggtagggggtagagtttttggtaggtaaggttttyggaggagggaayggttggggagtggyggagtttyggagtggtggttttgttaaygttttttttc

SEQ ID NO: 4404 - DNA, 410 bp, synthetic construct
  misc_feature 1..410: note = Description of Artificial Sequence: Synthetic polynucleotide
  source 1..410: mol_type = other DNA
aaggatttatttagaygtaygttygygyggagaygtaygttggtataygygtttatataygygagtatatataygygtatattattyggttygtgygygygggtygttgtttttgttgtattatgtaaaggtggttgggaaagygygttgatttatatttatatagtttattttttttttatagtatgtgattaataygtatttyggggaggagggagygyggttgggggtgttaatyggaagggaatagatagtgagtgttattttgttgggaggttttagaagtaaagygttaaygaygatagtagyggtggttttagttttattagtaattgtygttggtaggagtattataygttttaggagtttttygggtattaagtatgggtttagttygttttagttatttt

SEQ ID NO: 4405 - DNA, 274 bp, synthetic construct
  misc_feature 1..274: note = Description of Artificial Sequence: Synthetic polynucleotide
  source 1..274: mol_type = other DNA
agatygagggaaygttgtttatgyggtgagagttagygygggaggyggygagggygyggggagatyggggagggggtgggtttygyggygttygtygttygtttttaygygygttgtyggtatttgttygttttgttgtaatttgttgtagtgtttgaaagagtagtaggagygtatggaggtggggtyggggaaagattaggyggagtggttgtggggtgagygyggagtgggtggggaggyggyggyggtggggaggggggattggttttag

SEQ ID NO: 4406 - DNA, 201 bp, synthetic construct
  misc_feature 1..201: note = Description of Artificial Sequence: Synthetic polynucleotide
  source 1..201: mol_type = other DNA
gtygtygtygtygttgygtygttttttatttagagttyggyggygtygttttttttttttttygygtggtggyggggtatggtattattaygggtatygygagggggtygttagygtttgyggygggggtagyggttttatgtgygtyggygggttttaaggaggaagtyggyggtygayggggygttygttagttagaga

SEQ ID NO: 4407 - DNA, 265 bp, synthetic construct
  misc_feature 1..265: note = Description of Artificial Sequence: Synthetic polynucleotide
  source 1..265: mol_type = other DNA
ggtygggaggygyggagttagtygtttayggagtttaattgtttgtatyggggatyggygggyggggygygttygagtggtttygtygggaaagggyggygggygttggagaaggygtttggygygaagttgggyggygtttygagggyggaggataggtggtygygygatygtagttaggtagygaayggttygggggttgygtagygyggttttaaagtttagttyggtttygggtttagttygttgtygtttgttaygggag

SEQ ID NO: 4408 - DNA, 201 bp, synthetic construct
  misc_feature 1..201: note = Description of Artificial Sequence: Synthetic polynucleotide
  source 1..201: mol_type = other DNA
gygtagggggtagttgygtataaygygtttttggtagygyggyggttgygggyggggygygttttaygtgtttgaaggyggaygtttttttyggggggayggagagtagagggaagtygygtagggttttagagtagggtaggttaggyggyggyggyggyggygggtttttagygagtaggtatttgggatggtggtggt

SEQ ID NO: 4409 - DNA, 362 bp, synthetic construct
  misc_feature 1..362: note = Description of Artificial Sequence: Synthetic polynucleotide
  source 1..362: mol_type = other DNA
ttttaaatygagttttygggtgtgtagattygtagyggagtygygggagygaggtgggaaattttggtygyggygtygggtttygttygtyggggggygyggggyggygggygtatgygygtgygyggtgyggttttagttttggttgtygtygtttgtygtygtygtygygatgtttattttagttaaagyggttgygggtttggggattyggttygggtagyggagttttyggattygtygattygtygaggagygygygtygggttttygtygagtagttgagttygtgtgtttygygtttygygtttygaagttgtygtttygaattttggtyggygttgtttaggtttttygttagg

SEQ ID NO: 4410 - DNA, 298 bp, synthetic construct
  misc_feature 1..298: note = Description of Artificial Sequence: Synthetic polynucleotide
  source 1..298: mol_type = other DNA
tagyggagayggttaagtgtttttttattaatttttttttttyggagtttaggggtgttgtatgggyggygtttggattygygttttggagttattaggyggagtaaagttagygygtttygyggttyggaatttagttggttygttatttttttatttttgygattttattttygatygygttttagggtagaagygtttgagttttygttagtgggtatttaaagtttatgttyggygggygtgttgaygttattygggggttgyggagygggagggggyggtggggggyggggat

SEQ ID NO: 4411 - DNA, 295 bp, synthetic construct
  misc_feature 1..295: note = Description of Artificial Sequence: Synthetic polynucleotide
  source 1..295: mol_type = other DNA
gaaggataygtaaatttgtygagggttygggggtttygggttgttgttgttgttagygttttgggaagtgataggtattaggatttgttggtgyggyggyggyggyggyggtagttttagtygygttygttatatatatttttattygttyggtgtataygtygygtygygggtagtgtygtttgyggaggygygttyggggttygtaggggtagtagyggtagtttggtagygtygtygygttttygggtatttggttygygaagtttygtttttgtygtttttygygtygttc

SEQ ID NO: 4412 - DNA, 203 bp, synthetic construct
  misc_feature 1..203: note = Description of Artificial Sequence: Synthetic polynucleotide
  source 1..203: mol_type = other DNA
ggatgyggtygygtaggygttygttttttggttttttggtygggtagygggygttyggttatyggagtttagtttaagggtttagtygaggttttttygygygaggyggttgygttaggtgagygggtatygyggtygygttttttttgttatttatttagyggttagaggtattttgygtttgggagttttaagtgttttyg

SEQ ID NO: 4413 - DNA, 215 bp, synthetic construct
  misc_feature 1..215: note = Description of Artificial Sequence: Synthetic polynucleotide
  source 1..215: mol_type = other DNA
agttttaaattttaygttataaagtttygaagaggygggttgggggygggggtyggggyggatttttaggggygtggttgygygtttgygatttyggatygtgttaatttygtygtygttttaaaatttgtgggaaattttagttttgttatttattttttttggaggaygtagataggatttgttttgtaggagtttaggtyggtygattygyg

SEQ ID NO: 4414 - DNA, 201 bp, synthetic construct
  misc_feature 1..201: note = Description of Artificial Sequence: Synthetic polynucleotide
  source 1..201: mol_type = other DNA
gggyggyggygygygggggatttatttygtttttatttgatttygggtgattgtttattgttatggtttgygatttygygtggggatygtttagggtttyggggttttggatgtttygggtggygtygtygtaattttygtgtttttygygtygtttttatttygtttttattygggtygattygagyggttgtagttttt

SEQ ID NO: 4415 - DNA, 340 bp, synthetic construct
  misc_feature 1..340: note = Description of Artificial Sequence: Synthetic polynucleotide
  source 1..340: mol_type = other DNA
tttttygagtattygtttygggttttttttaagtagttgtttyggtttyggatttttatttgatttttttaatygatttggtagggtaygtatatttgaygtttattttgtagtygagtatataaggttygtygaagttatygagtaggttttgtagttgtaggtagttttygtygtygygttttattaygtygtggaaggtaggtaygtagtygygtagygygttagttattagtygygttaggtagtagygtttyggtttygagtagygttttaggattagttygttggtgttygtygttttaaaattttttgaggatyggtattygttagygtygtt

SEQ ID NO: 4416 - DNA, 201 bp, synthetic construct
  misc_feature 1..201: note = Description of Artificial Sequence: Synthetic polynucleotide
  source 1..201: mol_type = other DNA
ggyggagggatagagttggattyggaagtygygggtgggagttgtttttygygagttygaggttgttggtattttgtygygggtagttygygttagtttygggagtttttgggtttygggagagygagtyggggtygtttggttataaagatgttygygygttygttttgygtaygggattygttttgygttttgagtttt

SEQ ID NO: 4417 - DNA, 236 bp, synthetic construct
  misc_feature 1..236: note = Description of Artificial Sequence: Synthetic polynucleotide
  source 1..236: mol_type = other DNA
aaygttyggttaggttttagagttttygyggagagyggggygtttgttgggggyggtygggagggtygggttaggggygygggagatttygyggggaygygaggtgttgygggttttgtgyggttggttgggaaygaggagaatgtgttattaatagtgtttaatygattgattattttgggtgttgtgtttttttttttatttttttttatttttgggaaaatgtattgtttagg

SEQ ID NO: 4418 - DNA, 251 bp, synthetic construct
  misc_feature 1..251: note = Description of Artificial Sequence: Synthetic polynucleotide
  source 1..251: mol_type = other DNA
gtgtttgaatttttygggatatttagayggttggagtttttygattttaaggygggygayggtaaagttaaaygttagygygttgyggttttygggtatygaggygttttygttttygttatttatatagggygttaagtgtttygattygygagtgaygaggaygtataggttagtgataygattygtagttagtattgagygggaygayggggttygagygtaggagggtgygyggggagttgaggagc

SEQ ID NO: 4419 - DNA, 201 bp, synthetic construct
  misc_feature 1..201: note = Description of Artificial Sequence: Synthetic polynucleotide
  source 1..201: mol_type = other DNA
tgagtagtttaggtagtygyggtggtygtgaayggggygggagtggggggtgtttaggttattagaggyggtttygyggtttgtatyggttggagtgggygatttagagtttgagtggagggggyggggggyggygatagyggggggttttggtagygatggtttgaatttgygttggtgggggatggggygggggygggg

SEQ ID NO: 4420 - DNA, 206 bp, synthetic construct
  misc_feature 1..206: note = Description of Artificial Sequence: Synthetic polynucleotide
  source 1..206: mol_type = other DNA
gygttggggaagggatttttyggaggtayggggtagygtgygggttgyggtagygatttygattygggttttygggttttgtygggttgagtttgygttygtttygtygtygttaagtttttttaattttgttygttgygttyggatygygygttaggtttgggggygtagtaggggttgggggygtaygttgygtattyggggac

SEQ ID NO: 4421 - DNA, 201 bp, synthetic construct
  misc_feature 1..201: note = Description of Artificial Sequence: Synthetic polynucleotide
  source 1..201: mol_type = other DNA
gtttyggtttygggygtygattaggtttttttggttttygtygygygttttttaatttgttgttgtygtygtygygttttttaggttttgttagttattygygttttgagttyggggttagatttttatggaagygtygygatgttygtttttyggttgttggatttttagaagaygaaataygygaggtgagyggyggtc

SEQ ID NO: 4422 - DNA, 203 bp, synthetic construct
  misc_feature 1..203: note = Description of Artificial Sequence: Synthetic polynucleotide
  source 1..203: mol_type = other DNA
tgggattttttttttaaaaaygtaggygttttttygggtygtagtygtagtygggagattgagggttagggygyggtygyggggttttttgggtyggggygyggtttaygttttaggtttttgyggttttgattagaagtygttgygtttttggtygttttttattygtttygttttygtaattttaggtttagggttatagc

SEQ ID NO: 4423 - DNA, 216 bp, synthetic construct
  misc_feature 1..216: note = Description of Artificial Sequence: Synthetic polynucleotide
  source 1..216: mol_type = other DNA
taggggagaygaatygattggttgttyggtygtyggaayggtaggtttygtygtttttttygtttttygtattttyggttyggtttttttttattatygygtttygttttaattygtagttagtattttttttttatttttttttygttttygttgttatttttttttttggatgttggaagygtagttggtattttygtttttttaattttttaa

SEQ ID NO: 4424 - DNA, 335 bp, synthetic construct
  misc_feature 1..335: note = Description of Artificial Sequence: Synthetic polynucleotide
  source 1..335: mol_type = other DNA
gtttattygttttttaggtgattyggygttttygtygygttygttggaagtttgtaaatttttttygggggtttygtygttaygttgggaagttggggaygyggggggaggtttttggttygtygttttygttgtygtttgatygtatttttggagggtttygtattttgttaggtttttggaggtaaatatatattttygatttataattggttttygygttaggggattygygygtttttatataygtaygtaygtygggyggattyggygtyggttttaygttagtatttttttaggygygyggygyggyggttatygagygtttyggtatt

SEQ ID NO: 4425 - DNA, 230 bp, synthetic construct
  misc_feature 1..230: note = Description of Artificial Sequence: Synthetic polynucleotide
  source 1..230: mol_type = other DNA
tygggygttgatagaygattttttttatttgttagttttttygtttgttagtagagttgttggtaagtgagagaaaatagaggggygygaaggtaggygyggttagggagtgagyggggygttgggygyggggyggagtygggtgygyggygttygggttaggttttatygttygygtyggttttygttttgtttagtygtygtttttttttttttttttattttttttt

SEQ ID NO: 4426 - DNA, 224 bp, synthetic construct
  misc_feature 1..224: note = Description of Artificial Sequence: Synthetic polynucleotide
  source 1..224: mol_type = other DNA
agygtagttatttgaaggtttttatggttttyggygtttgygtttgaagttygtttttaggttttggggggtatttgtagaaaatttttagtagyggttygttaattagattttagggtgtayggggggtggygtyggtaattatggtaatttttaaaataaaataatataaaataaagtaattaaygtttattaattattattttattttattttttgtattg

SEQ ID NO: 4427 - DNA, 211 bp, synthetic construct
  misc_feature 1..211: note = Description of Artificial Sequence: Synthetic polynucleotide
  source 1..211: mol_type = other DNA
gggataygtagggggataygtagggattgttygygygaatggtttygaaygtatgygttttattttatattttatagtygttatgaygatygggaggttygttygttaayggttagttaayggttgyggggataagttygttgaggttgttaggygagttaggtttttttggatttygtttgattyggatgggttgtgtttgaaattgatt

SEQ ID NO: 4428 - DNA, 205 bp, synthetic construct
  misc_feature 1..205: note = Description of Artificial Sequence: Synthetic polynucleotide
  source 1..205: mol_type = other DNA
ggyggtgttaggtyggggyggggggtttttttatttagtayggggtattaggtygggatgggatttttttttagaaagtygattggatgttaggagaggygtayggttgggggttttttttttttttttttttttttttttygyggttgaattaaattagaattgttatttagggtttgtgagttagaagggatyggattatayg

SEQ ID NO: 4429 - DNA, 398 bp, synthetic construct
  misc_feature 1..398: note = Description of Artificial Sequence: Synthetic polynucleotide
  source 1..398: mol_type = other DNA
ggygygggtttyggygygtttagtagttyggttagygttagygygttygttagtaggttgagaayggttagygtttttagygtggtygtttgttttagtygtagygtgtagtygyggaatagygtttttagttttgggtaagygaatttttygtygtaygttyggagttygygtyggyggtttgtttyggtygttygttyggygttttygggttygttygygtygttttygtygtygttttygtygygyggygttttygttattttagygttatgtagyggtygyggtygygggygygtttttygtyggttyggggygtyggggygygggyggyggygtyggggygggygggyggygggyggygaggygtyggggygyggggygyggggygggyggag

SEQ ID NO: 4430 - DNA, 290 bp, synthetic construct
  misc_feature 1..290: note = Description of Artificial Sequence: Synthetic polynucleotide
  source 1..290: mol_type = other DNA
tatygygtygyggtttygtaygggatgyggyggtyggygttgtgttygygggtygggtagttyggttyggtygyggygttgygggattygygygtaattygtgggggygyggygygggygataygtgygggtygttaggagggggagggggaygygygtygtygggttygttattttgtattyggggtygttggtyggtyggggtatttttaygttygtttygttggygagattggagggattygggatatygtaaagtattttttttagtgtttgggagygttygttgt

SEQ ID NO: 4431 - DNA, 307 bp, synthetic construct
  misc_feature 1..307: note = Description of Artificial Sequence: Synthetic polynucleotide
  source 1..307: mol_type = other DNA
ttatygtagtyggtttyggtyggatttaaatagttttttttttattttygggatatttattttaygtatttattattttttagtttttagatgtttygtygttttttttatggattttttagtatttgtaggttataggataatagaagttatagtagagttatygaggaattttaggaayggaggagatggaatagtggagaygygaattaggattagagttyggaagttaggagataaaggtttygttatattgaagaggtygtttttttttttgtagttgygtatttgattggatagttttayg

SEQ ID NO: 4432 - DNA, 212 bp, synthetic construct
  misc_feature 1..212: note = Description of Artificial Sequence: Synthetic polynucleotide
  source 1..212: mol_type = other DNA
gggggtggttgtgggttygaagtggaggaygagtatggtttgggagataaggaatygttttgagatagagaaggttttygggagyggatagagagtgggygaaatyggtgygtagtaatygyggygttagttttagygyggtttttggggygtagttttatttygttttagtagttgyggagttttttgaygagttttygtttggtagtatt

SEQ ID NO: 4433 - DNA, 375 bp, synthetic construct
  misc_feature 1..375: note = Description of Artificial Sequence: Synthetic polynucleotide
  source 1..375: mol_type = other DNA
tagggygttttygtttggattataggagaaagtttgggaggtaggtttaattttttaatttggyggggaattttttttttttttatatagtttgtagygygggggyggyggggtgatagttttygtgtatgaattagttattttttaggtttygtttyggygggggtyggtyggaygttygtttygtataaagygggtattygggtygtttggagtagaaagtygygtattttttttygttaggygttttttyggaygttttgtttagygggtygttygattttttgtattatggatttygttygttttttggggttgtygattttgttgttttttttgayggaggttgtattgggygatgttgtttaggagtta

SEQ ID NO: 4434 - DNA, 201 bp, synthetic construct
  misc_feature 1..201: note = Description of Artificial Sequence: Synthetic polynucleotide
  source 1..201: mol_type = other DNA
ggyggtatggagygtagtggttgggttyggtagattttttttttagygttgttgttgggggygaygttgagggygygygyggyggttggttattattttygtttttygttttttttttttttgtgtatttattayggggagttggaaggggatggggagtagggygaggtgtttatttttttgtatattgygggtaatttt

SEQ ID NO: 4435 - DNA, 356 bp, synthetic construct
  misc_feature 1..356: note = Description of Artificial Sequence: Synthetic polynucleotide
  source 1..356: mol_type = other DNA
gggyggggyggygygygggggygggggagyggtygggataygtgtggyggyggygggggggaygyggygttyggggttttaagaaggtgtggagyggggygggygtttttttaggtttggtygaggggygtygygtagaggyggyggyggygtayggaggyggtagaygaygygttttyggygttygtagtttyggtttygygttttygyggtttaaagtaattttgggagtygtygtttttygyggaatttttyggygggggttygtttttaggttygttttygagttygtttygttttygttygtttttttttygtttttttttygygtggttttttygtttyggygtttttaa

SEQ ID NO: 4436 - DNA, 265 bp, synthetic construct
  misc_feature 1..265: note = Description of Artificial Sequence: Synthetic polynucleotide
  source 1..265: mol_type = other DNA
atttttaggtattattygagtttgttaattttattttygtttaattttattttaaaattttttatagatgaggttttgtygttgtygygaggggtygggyggtygyggygggagggatagggggtttgggtgggaagggagygygagggtttttagyggttygyggtttygggyggatttttagaaygagtgygggtygttyggattggtagattgygagtttygaggggygygggaygtagtyggtttagataaagaaatyggc

SEQ ID NO: 4437 - DNA, 697 bp, synthetic construct
  misc_feature 1..697: note = Description of Artificial Sequence: Synthetic polynucleotide
  source 1..697: mol_type = other DNA
gyggggaggyggygggggygggagygggygaggggtygyggtyggtyggygttygggtttygattttygggtyggttaggggygygtygagtagtaggtygtgygttaggyggaaatgttttagtaggttttygygtatygggtygttyggggggtagtaggggtaggyggyggygggtaggtygagygygtygggyggtggygtagyggggtaygagtattttttgtgygttaggtaggtttygaggttgtggaagtttaygyggtaggtygtgtattygtggtagtyggttagygtyggtgtyggggtttyggggagygggygtygyggttttttgtttaggtygatggggtygtyggtygyggggtygggygagygygtaggggygaggtyggggtygttttygttttygttttygggtygyggygattygggygygggggygtggtygggyggyggggggggyggggygtyggtygygtgtagttygtagagtttgyggygtttgygygtgygtataggygyggygggagagggggtygggggygyggtyggtttagggggtttygggggygyggtyggtyggygyggyggygggtygtggygygaggygtagtagtatygtttgtgtayggtgtaggtttygtggyggttgaagyggatgttgtaggtttygtatagygtgyggttggggtc

SEQ ID NO: 4438 - DNA, 226 bp, synthetic construct
  misc_feature 1..226: note = Description of Artificial Sequence: Synthetic polynucleotide
  source 1..226: mol_type = other DNA
gtagaggygygtagaaaaygygygggtggygygygyggttatttagtgggtttygttygygtygtyggygtygtygtygtygtygtaygtgygtygtygtgagygygaagggygttyggattygygttttgttygttygtttgttygtyggggttattgtggatttttaggtaatagttaagtgagaagttttttttattatygaaaggtgtttgygtttttttta

SEQ ID NO: 4439 - DNA, 201 bp, synthetic construct
  misc_feature 1..201: note = Description of Artificial Sequence: Synthetic polynucleotide
  source 1..201: mol_type = other DNA
tttagggaggatgggggtygygggggaagtygggygtttyggggttttygatatttatattttygtayggygtaygttttgtttygagtttgygtttttygagttagtayggygagtttgggattttygtgttttttttttgtggttttygagaaaygtyggagtttygtgttttgttgggggttggggggatggagaaaa

SEQ ID NO: 4440 - DNA, 201 bp, synthetic construct
  misc_feature 1..201: note = Description of Artificial Sequence: Synthetic polynucleotide
  source 1..201: mol_type = other DNA
tttggagatgtgattttttaaaagtttagtyggygaatgggagattgaagggtgaygggaagggggtaggygygttyggygttttgattgggygtgyggyggtaggattttaaagygttttgtttyggatygtttgttttgggtgatttttyggatttgttttggtggaattyggatttgtttygtygagatgaygaggta

SEQ ID NO: 4441 - DNA, 215 bp, synthetic construct
  misc_feature 1..215: note = Description of Artificial Sequence: Synthetic polynucleotide
  source 1..215: mol_type = other DNA
agaggaggaaggaaggaggaaagaggaagaygggyggtyggaggygyggggttgygyggygtyggtyggygyggygttggaaggygtyggygttaatttygygaggtaggygayggagggggagyggygttaatatataagagtattgtattaygttaatttttttttagaatagtatgygttagtagtatatttaygttttgattgaaggataa

SEQ ID NO: 4442 - DNA, 252 bp, synthetic construct
  misc_feature 1..252: note = Description of Artificial Sequence: Synthetic polynucleotide
  source 1..252: mol_type = other DNA
tygtygttgttygggtttyggggttgggtggaggaaaggggtgttyggaatygatttttatttttygatttttttgttggatattaygtttattttggaygtygtaagagaagttgttaagtttygtaggttttgattyggygtttttygygtttttyggttgttttyggtttttttgtgtttyggtggagtatttgygttyggggttggggttggaggaggtagttataygygygtataygtataygttta

SEQ ID NO: 4443 - DNA, 203 bp, synthetic construct
  misc_feature 1..203: note = Description of Artificial Sequence: Synthetic polynucleotide
  source 1..203: mol_type = other DNA
ggygggggagtgagyggagttttttataatgtttyggtgyggtgtagtygyggatggatgttgygggaaggggttgttatttgttgtttttgttagyggygygyggatttgttygygtttttgtagtygtygtygtygtygtygttagttygttyggtttttgtagyggygtygtttgygtttttttygyggtygtyggagyg

SEQ ID NO: 4444 - DNA, 201 bp, synthetic construct
  misc_feature 1..201: note = Description of Artificial Sequence: Synthetic polynucleotide
  source 1..201: mol_type = other DNA
ggtyggttttatgyggggygtttygtygygtygygttygygtttttgtatyggggtgyggggtttagttygaygygtattyggygtttygygygttttgygggttttttaggtyggtttygggtgggttaggatygyggygttggtaggtyggggttgagttyggtttttygygttggagtttttgygtygggtgtygtyg

SEQ ID NO: 4445 - DNA, 201 bp, synthetic construct
  misc_feature 1..201: note = Description of Artificial Sequence: Synthetic polynucleotide
  source 1..201: mol_type = other DNA
tgaattttagagggttgggttttgatttgagtgtygattygttaatgaggaygggaggataaggttgtygaygtagyggaaggtaggggggaagygattygaggatttgaygattatttttaggtaggggttttttaagtaggtayggaaattaattttattaaatygyggagtggggattgggttygggyggtgtttagt

SEQ ID NO: 4446 - DNA, 201 bp, synthetic construct
  misc_feature 1..201: note = Description of Artificial Sequence: Synthetic polynucleotide
  source 1..201: mol_type = other DNA
ataattttyggaaggagggggttaaatgyggtagyggygggtttgaaaagggttaggagygtygtaggaattggggtgtataggttttygygtgtttagygtttygttttttttygttttaggtttgttaggggygygygtggygygggtagagtttggtgggtgggttggygyggatagaagttttgtyggggagygggg

SEQ ID NO: 4447 - DNA, 213 bp, synthetic construct
  misc_feature 1..213: note = Description of Artificial Sequence: Synthetic polynucleotide
  source 1..213: mol_type = other DNA
tygatygygttttttgygttygttygygttttttttgtygtttygyggtttaggggtgtgagttattyggygatagtttygttaggttatttyggggygygtaggtggataygtataggaagatygttatttttaagatttttatattgtttatygtggggygaaattttataattttttgtataaaatgtataaataatattaaatgagttg

SEQ ID NO: 4448 - DNA, 385 bp, synthetic construct
  misc_feature 1..385: note = Description of Artificial Sequence: Synthetic polynucleotide
  source 1..385: mol_type = other DNA
tttgtaygtatgagtaggtatttaatattttttggtttagttatatgtgatatgaggttatttaygttttttttaattaatttttatgataattatgtgygttatggagaaaattaatggaggaaaaattatagagttattygaaatagttgygttgtttattattyggtgtttgagtttgttttttttgtaattagattatatgtgaggtagttttagttaattgtttgtgttatttatyggggaattttagttttatttgtgaatatttaggttttttygtygtaggatagatgttgggtgaggtttgttttttaygtaaatatttgttttgttgtttygagttagttaygagagttagtyggtttagataagtaggggatga

SEQ ID NO: 4449 - DNA, 278 bp, synthetic construct
  misc_feature 1..278: note = Description of Artificial Sequence: Synthetic polynucleotide
  source 1..278: mol_type = other DNA
agggtattaagaaaagaggggtatgygagtttggaagttggagagagttyggggttttttagagygggtgggaygtygygtttttaggatttygygttaygygtattttttttatttygatatttattgttatttttatagyggagygaggggtttygtygagggygagygtatttygtgyggttgagatgttyggaaygttttttygygtttyggtttttttagaaggggttatagtyggttygygagttttygggygggggttgagtygtagtgtt

SEQ ID NO: 4450 - DNA, 248 bp, synthetic construct
  misc_feature 1..248: note = Description of Artificial Sequence: Synthetic polynucleotide
  source 1..248: mol_type = other DNA
tyggygtaggygagtttggtttaagggttyggatygggtttgggaaaagtttgtttttygagggggagagygagyggtygygttgaggygttygygttgygygggggygtttttygttgtttgtagggagygyggygyggaygyggygggyggttyggttatttggaaygggygttygttttggttttyggggttgtttttgtygtttygggaagtygtygatgggttttatygttggyggttygygt

SEQ ID NO: 4451 - DNA, 216 bp, synthetic construct
  misc_feature 1..216: note = Description of Artificial Sequence: Synthetic polynucleotide
  source 1..216: mol_type = other DNA
tygtygtygttggtgggtggyggyggttygggtgttttttggattgygtagtaaagaggtattttgggagatggggttaaggttttagggggtgttattygygaayggtttattygttagattaggggggttttttggttgtgygtttggttagaattggttttgaygatggaagtttttggaattaaagygttgtttttttttttttgtgttata

SEQ ID NO: 4452 - DNA, 201 bp, synthetic construct
  misc_feature 1..201: note = Description of Artificial Sequence: Synthetic polynucleotide
  source 1..201: mol_type = other DNA
gtatttattagggygtttygtaaaaaatttygttttygtttgtttttgggaattataggtaagttttgggttttygaggtgtagttttaggtagagtttygtgttgggaggtgggaagggggtttgattttggggatttaggtagtttggggatagttttattaggggtyggtgtttagaattggtgagggaggtatttta

SEQ ID NO: 4453 - DNA, 208 bp, synthetic construct
  misc_feature 1..208: note = Description of Artificial Sequence: Synthetic polynucleotide
  source 1..208: mol_type = other DNA
ygagayggataggaatygaggagatttttttgtagygttttttatttttyggatagaaattttgtagattaygtttatttttttatttygtgtatygttygtggttygtgggtagtagttgtttttttgggatttttttygtttgttygygagttttygtayggtygygtttttgttgttggggtygttygttggttttggttgttyg

SEQ ID NO: 4454 - DNA, 201 bp, synthetic construct
  misc_feature 1..201: note = Description of Artificial Sequence: Synthetic polynucleotide
  source 1..201: mol_type = other DNA
atttggtttaatygtygttagttttaagttayggtttyggttttttttttttaattgtgtgggatttygtygtttggtttyggtygggyggaggggtgaygttagtygtttatatagtgttttttggtygttggagttygggaaatttgtgygttygaatttggtttygttaagaagttgggtaaggattygggtttttga

SEQ ID NO: 4455 - DNA, 364 bp, synthetic construct
  misc_feature 1..364: note = Description of Artificial Sequence: Synthetic polynucleotide
  source 1..364: mol_type = other DNA
ggyggttagtagggttttygttttyggggagaagtgtttaygatttaagggttgtttgttttaggaattttttaaagaattatagatattgagagtattyggggtttggtaggaagtgtagtgtattttttagttttagggtaattaggatagtatgaattttttattttgtggtagaataaayggttagygtttygatgtggygygttygatttttttttatagagtttaaaagttaygtttaattaaattgtagygttttygttttagttgggtatyggtttggaagyggtttggaattagattggattygaggaggtaagatttyggtagygygaggttaattataggttttattygyggt

SEQ ID NO: 4456 - DNA, 213 bp, synthetic construct
  misc_feature 1..213: note = Description of Artificial Sequence: Synthetic polynucleotide
  source 1..213: mol_type = other DNA
ttttttaggtttttggygttttyggygyggttgttttygyggttgttttygtttatggtyggyggyggtgygtagygyggygttgttygtygtgttgagygttgattygygygttygttgttgttyggttttyggyggygagaatggaaagttgtygttttygttaatttygaggagagatagaagattttatatgttggggagaggttgggc

SEQ ID NO: 4457 - DNA, 201 bp, synthetic construct
  misc_feature 1..201: note = Description of Artificial Sequence: Synthetic polynucleotide
  source 1..201: mol_type = other DNA
ggtttgtttttggaagaatyggttttttagtttttygtygtygtagttgtgatataagtaagtgtagtygygttgttyggggttygttagggtttttygygttygttttttatygtggttygyggyggtygygttttygtttygtttygttyggtygtttygtyggtttttgtttttagttgggttgtygtgaygaggaga

SEQ ID NO: 4458 - DNA, 201 bp, synthetic construct
  misc_feature 1..201: note = Description of Artificial Sequence: Synthetic polynucleotide
  source 1..201: mol_type = other DNA
tttatttatygygtttaattattttgtatagttggtttttttttttttttaagtatagtttaagaaggtaaagggagataggaaagggtggtagtttgaygatttagygatgtattttagaatygtttttatttttttagtgtgaagttttttgggagaggtgagttaaatyggayggtyggtttttgtagtygtttagag

SEQ ID NO: 4459 - DNA, 296 bp, synthetic construct
  misc_feature 1..296: note = Description of Artificial Sequence: Synthetic polynucleotide
  source 1..296: mol_type = other DNA
tattagtygggttggttgggyggttygggagttygagyggtggyggagyggygagtagygagtagygtttgygggagyggtyggtyggtygggttttygygtttygtaygttygtaygtttagyggggttygtattgagtatgggygyggyggtygtgygttggtatttgtgygtgttgttggttttgggtataygygggyggttggtygggggtagygggtttttaggtaagttttygatygaggtggggggyggygggygyggggggttygggyggtygaggygyggtttygga

SEQ ID NO: 4460 - DNA, 201 bp, synthetic construct
  misc_feature 1..201: note = Description of Artificial Sequence: Synthetic polynucleotide
  source 1..201: mol_type = other DNA
gtttttagtaggtttttattttatttttttygtygttygtygagttgggttttattaagggtatgygaagtygtaaggaaggtaagatgtagygggygtygygygatagtgaygygggtygggagggttaggaattatagtygyggttttaggaygaatttygggtttagtagtttygggygtaggagtygttaggtaggg

SEQ ID NO: 4461 - DNA, 297 bp, synthetic construct
  misc_feature 1..297: note = Description of Artificial Sequence: Synthetic polynucleotide
  source 1..297: mol_type = other DNA
tgtattttygatayggagttggtgtttygggaaggttgttttttgaagttttttttgttttgttgtggttttgttttttygyggatttttttttygtgtygaggtttagtttttggttttaaggaataaattygttggtttgaaagggagttayggtagaagtttaggggtagagyggygggagygygygattygygyggttggagtttygggggtatttggagagtagygygtttaagyggggttattggtttygyggttgygtttttttttttttygygtygygttttttttttc

SEQ ID NO: 4462 - DNA, 268 bp, synthetic construct
  misc_feature 1..268: note = Description of Artificial Sequence: Synthetic polynucleotide
  source 1..268: mol_type = other DNA
gtgtagyggggtttggygtyggtttttttttattaygygttyggtttagggtygtttagtygtygttatygtygtygttttttgggtygatggagtyggygyggaaggttygygygttttgygtygtygtygtttagtgtygtygttagtatttttttygttttttygtttttygggtttatttygygggggyggygttattttttygttgtttaggttygggtatygygggygtttygygggyggtagtygtttttttygagygyga

SEQ ID NO: 4463 - DNA, 201 bp, synthetic construct
  misc_feature 1..201: note = Description of Artificial Sequence: Synthetic polynucleotide
  source 1..201: mol_type = other DNA
aaggagygggattgttttttyggttggaygatagygtyggggattygtagygtgygygggtyggaattaaaaaagtagttygggagygygagggttgagyggggtaagtatgggttgtttttygtagttttttttttgttygaggttygggttggtygtttgtttgtttatgattgtttagttgttttttygattgtttag

SEQ ID NO: 4464 - DNA, 201 bp, synthetic construct
  misc_feature 1..201: note = Description of Artificial Sequence: Synthetic polynucleotide
  source 1..201: mol_type = other DNA
ttaattygttygtagttgttygttttggattaagtygtttygyggttygtgttaggtagtgggttygtttttttttttttttttttttttaaattgggaygtgygaaggygtagttgttttttyggggttttttttattttttatatattttgttttygttttttgttttttaggttygtggyggagagatgttgatygyg

SEQ ID NO: 4465 - DNA, 201 bp, synthetic construct
  misc_feature 1..201: note = Description of Artificial Sequence: Synthetic polynucleotide
  source 1..201: mol_type = other DNA
gttttggagtttagtagagttggagygtatattttygttttttttttttygttttygagtattaggyggatatattygtatttygaatgttttagtgggygtagagtttattagaaatggatagtyggatttttyggygtttgttgggggtatygttgttaggtgtttggggttygttttttyggttttgttygtataggg

SEQ ID NO: 4466 - DNA, 201 bp, synthetic construct
  misc_feature 1..201: note = Description of Artificial Sequence: Synthetic polynucleotide
  source 1..201: mol_type = other DNA
ggtygtygggygttgtagtgggaygygygyggttgtgagtttgygggatatgtttttygygtyggttttttgttggyggttatgaagaggtagaaygtgyggattttgttttttatygtttgtatttttatttatttgttggtgggygtygtygtgttygaygttttygagtyggattaygagatgygygaggaggagaaa

SEQ ID NO: 4467 - DNA, 302 bp, synthetic construct
  misc_feature 1..302: note = Description of Artificial Sequence: Synthetic polynucleotide
  source 1..302: mol_type = other DNA
ygttyggaygtyggagggtttygattttygygyggtttatgygttygygttygtttygttgtttygygaggttygygggatttttttygtygtygtygtygygttygtygttttyggaggagygggttggtygatygttatygygtygtttttyggtygttttygaagtygttttatygyggtttttgtygttttggggtygygtttygttttygygttttgggggttgagtygagtaaatttygygtatyggtygaygttyggyggggatttygttgygtattygygygttygggtgggyg

SEQ ID NO: 4468 - DNA, 201 bp, synthetic construct
  misc_feature 1..201: note = Description of Artificial Sequence: Synthetic polynucleotide
  source 1..201: mol_type = other DNA
tttttttggggttttttatgttaggtttygyggttgtgttygtaagygtagatggtttygggattygggttattttgaygtygtagatttagtaygttgyggatygggtaygttggatttygggataagtgyggagggtygggggttggaagggattygagagtagagttygygtttttattttayggaygyggttatyga

SEQ ID NO: 4469 - DNA, 220 bp, synthetic construct
  misc_feature 1..220: note = Description of Artificial Sequence: Synthetic polynucleotide
  source 1..220: mol_type = other DNA
yggttygtygtttygtatttgygttygtagtygygygttygttygttygtygtygttaggtttygyggttygggygtttatgtygygttttgygttygtygtygtygtygttgagagtygyggagygtagttygagggagygtygggygggggagtygagygatygggggyggggyggggggygagagttggttyggggttyggtagtygttygtttygc

SEQ ID NO: 4470 - DNA, 347 bp, synthetic construct
  misc_feature 1..347: note = Description of Artificial Sequence: Synthetic polynucleotide
  source 1..347: mol_type = other DNA
ggyggtatatyggtagggyggtyggttttgttgggttttttgggygtyggtttygggggttygggyggtttttttyggttttyggtttggattygygaaygygygggygygaggggttgggaygygggagttttttgagtgyggagygyggagttttggtgtttyggygtattgtagttatattttygggtygygygttttygtygttttttattygygtygtagggtttttttttttgaggygtygttygygtatygtygggggggagggggtagygttaataaattggggagttyggttygtygygtttaggttttygtttggagtygtygtattygggayggtg

SEQ ID NO: 4471 - DNA, 201 bp, synthetic construct
  misc_feature 1..201: note = Description of Artificial Sequence: Synthetic polynucleotide
  source 1..201: mol_type = other DNA
ygtgtaygtttygtttttattggtttygtttygtgattaygttttygtaattttgatagattttattttygaggattttttttaggagtatagtgatttygtttttatagggttygtttygttatattgattttttygtgtygttygygggattttatttttgttygtttgtttyggtgtttatggggaagtttggtgtta

SEQ ID NO: 4472 - DNA, 201 bp, synthetic construct
  misc_feature 1..201: note = Description of Artificial Sequence: Synthetic polynucleotide
  source 1..201: mol_type = other DNA
tagattygggggaattaggaaaygygttyggygattttygggtagtagtatygggttaggtttgttttyggaatygttgaygttattygtygtttttttygtttgggtttttygygggtygtaggggtggaagttygatttgggttagggttyggatttttttttttyggtttttgygtygtygttttyggtgttaggayg

SEQ ID NO: 4473 - DNA, 225 bp, synthetic construct
  misc_feature 1..225: note = Description of Artificial Sequence: Synthetic polynucleotide
  source 1..225: mol_type = other DNA
ttgtagtttgggtaatygagygagattttatttaaaaaaaaaaaaaaaaaaaaaaattaaggttgaattygggttttygtaygttygtatttatttgygyggttattaygygttgtttttyggygattaggttgtattttttgtattggtagtygygttatatgtagaagygtttgtggtttttgagyggygaggygtagtygtggtttttgtagygtgygtatt

SEQ ID NO: 4474 - DNA, 318 bp, synthetic construct
  misc_feature 1..318: note = Description of Artificial Sequence: Synthetic polynucleotide
  source 1..318: mol_type = other DNA
ggttttggtagagygygtagygagtyggggatgaggttttttaagttttygttggtttgttgtyggygtagygttatttgygtagttatgattygttgtygttygatgatgaggatgtatttttygtaggtgtagtttttgaagyggtagtaaygtttgtggtttttgagttaggataggaygttatggttgyggtagygygygtatttgggygtgygttgtaggggygttygtggyggttgygatatygggtygtttatgtataggtagggggagtygtagtygtttatgtttygggttttygaatgagttggtagt

SEQ ID NO: 4475 - DNA, 265 bp, synthetic construct
  misc_feature 1..265: note = Description of Artificial Sequence: Synthetic polynucleotide
  source 1..265: mol_type = other DNA
gtggagggaaggagggaggaagttagttaagtttttagygatttagtttagtatatttygaattttgtaaagttttgttyggttttttgtagtttygggygttttattttgttgaggtygttttyggttttttttgatttaggttgggygggaaaggtygggtygttttygtttggtttagatygttggtttattyggygggygygygtagttgtatttagygtagygttattggttttagtttgtagattgygttttttttttt

SEQ ID NO: 4476 - DNA, 259 bp, synthetic construct
  misc_feature 1..259: note = Description of Artificial Sequence: Synthetic polynucleotide
  source 1..259: mol_type = other DNA
gggtygyggggtygggggyggtygtygtttggttgggggatyggggtygtgttgggygtygyggagtygggatagtagtagtggyggyggggatagygtygyggttggggtttygygttttttggagygttttttgtttagataygaygatttygttyggaggtatatyggttttggggataaagattagagagagatgttgtagattttggggttggyggtaaggatttttattyggtttttygyggtttttttttyg

SEQ ID NO: 4477 - DNA, 201 bp, synthetic construct
  misc_feature 1..201: note = Description of Artificial Sequence: Synthetic polynucleotide
  source 1..201: mol_type = other DNA
gagygtagattaggtttttagggygygggagtttgttgtttttttttgtaggggtygttttyggaygttttattygtygttaygtggtttygggatgtgygggttgyggtagagagtgggtagtaatgtttttggttttgygttttygttttagtygyggggatttygaggygagtygttaattggtatyggtgtttygtt

SEQ ID NO: 4478 - DNA, 323 bp, synthetic construct
  misc_feature 1..323: note = Description of Artificial Sequence: Synthetic polynucleotide
  source 1..323: mol_type = other DNA
aygygtttgtyggggaagggttygtyggygtygygttttygaggtttttgyggygaatygygttaygygygatttttggtygggggygggaggyggyggyggyggtaggagaagtttaaggttygagyggttygtagtttttaygtttgtatttttttattttygttagttygatggttygtttygyggygtgtattggagtaagtaggtttygtttygagygygygygttttgggaagtgttgtaagtttggagatttggagtgagtttygggygttgttggttygattgttygyggtgttttttyggtgaggtygyggggg

SEQ ID NO: 4479 - DNA, 201 bp, synthetic construct
  misc_feature 1..201: note = Description of Artificial Sequence: Synthetic polynucleotide
  source 1..201: mol_type = other DNA
tagyggyggyggtygagtttagttygtagggtgggaattgagataggygttttaygttgtttatygyggttgtygyggtygtygtygtygtygtygttayggtygtygttttttgtattttgtyggggtgagayggttgttgaggttgygattgttggggyggttgttgygggggttgtgaygggaggtgyggaggyggtt

SEQ ID NO: 4480 - DNA, 355 bp, synthetic construct
  misc_feature 1..355: note = Description of Artificial Sequence: Synthetic polynucleotide
  source 1..355: mol_type = other DNA
tagygtygtatagaagtygtagagtagyggygtgaagtygyggttyggygygtatygggtygtygygaagtatagtgttattattttgttttgtagygtygtttyggtttttatygtygygtttttataggttattaggtgtygttygtttagaatgttaattatggygtagataygtagttatttgagattygaggatatttgtaggaggatgattatttgyggggaggyggyggygagygtygyggtgtttygtttttgttygtattatygggygttggattttttaagatttgttttagatgygtttatattttggttaggtttygtttgtggttggagtaattgtgttygc

SEQ ID NO: 4481 - DNA, 201 bp, synthetic construct
  misc_feature 1..201: note = Description of Artificial Sequence: Synthetic polynucleotide
  source 1..201: mol_type = other DNA
tgtatttgygtygtttttggtttttttaggaatgygttgaagtttgtaattagttttgtgaagttattgagtgtayggttgagtgaaatttttaaagttygaggaaaaygggtyggttgaatgggagttagtatggggtttttttttaagttttygygttgttaaattttagtagagttttttataatygtttygygyggg

SEQ ID NO: 4482 - DNA, 290 bp, synthetic construct
  misc_feature 1..290: note = Description of Artificial Sequence: Synthetic polynucleotide
  source 1..290: mol_type = other DNA
ttgttatgygyggtagttygygtyggggtyggtattagtagygttygggyggatgtagygagtttayggaggggtatgtttttaygtattaagtataatygttttaggaatgattyggtgatatyggtygatgattttttttatagtttgtyggtgagyggyggyggaggtaaggtttyggyggygygygygatttyggyggyggttttttatttggtgttyggygaggygttgygtaaggygttygaygatgggttyggtagtttgggttatttgttttataaggtgtt

SEQ ID NO: 4483 - DNA, 201 bp, synthetic construct
  misc_feature 1..201: note = Description of Artificial Sequence: Synthetic polynucleotide
  source 1..201: mol_type = other DNA
ttattyggyggaaattygygagtyggttttttygygtttaagaagtttattttttaagtttttttattatgattttgaatgyggataattggggttaaaygaggaaggatatagatttaaaagttagatttaggttttagygygtttttgggttttaatttgggagattygtatttagttyggyggaagttatagttttta

SEQ ID NO: 4484 - DNA, 201 bp, synthetic construct
  misc_feature 1..201: note = Description of Artificial Sequence: Synthetic polynucleotide
  source 1..201: mol_type = other DNA
ttttagygtttaggtygattgygttttgatygggagttattgygtttagygtagttygagggygttgagttyggaggatgyggygyggggygggggtttygggagtaatagagattgggattygagggttyggttygygttgttgtttaygtagygtttttattttggaaagagtgtttttygygyggygggtyggttttt

SEQ ID NO: 4485 - DNA, 288 bp, synthetic construct
  misc_feature 1..288: note = Description of Artificial Sequence: Synthetic polynucleotide
  source 1..288: mol_type = other DNA
gtttaggagaattygtaagttagyggygtttgygttygagttgtagtygttttttgtygtttaygygagttygagagyggttttyggagttygggttagygtygagttgtaggygygygtttaatygttttgttgggtttaygyggtttgagaggtyggagygtttaattgttggtaygygagtaayggtttagttaagtttattyggtttgagaggtyggaggttgygagtgtygttgttgaaggttgtggtggatygggttggatygyggattttgagttatatyg

SEQ ID NO: 4486 - DNA, 212 bp, synthetic construct
  misc_feature 1..212: note = Description of Artificial Sequence: Synthetic polynucleotide
  source 1..212: mol_type = other DNA
ttttgygtggtagatatttagggataggttaattattatttttaattattygtttttgagaggtttaggatttgtttttatttgatggatagtggtgtayggattaaagaygaygtaggataggtaatttttttttttaatttttygggattagggtagttttgaagatttttagaggtagttaagtagttttttttygtagyggggagtga

SEQ ID NO: 4487 - DNA, 201 bp, synthetic construct
  misc_feature 1..201: note = Description of Artificial Sequence: Synthetic polynucleotide
  source 1..201: mol_type = other DNA
gaggtagggaggygggggtgygggaggtttygyggttgygygggygygtgttggtggtttyggyggaggtttagtttyggttygygttygyggygttttygttgyggttygagyggtttggttgygggatttgtgygtayggatggygyggtygtttyggtagtattygggggtttgggygtygttgtttttgttgttatt

SEQ ID NO: 4488 - DNA, 246 bp, synthetic construct
  misc_feature 1..246: note = Description of Artificial Sequence: Synthetic polynucleotide
  source 1..246: mol_type = other DNA
ygtttagtttygygtaygtttttttgygagttyggtygtttagygttttttttygttygagtygtygtttgygtttyggggtagtygttttgtttttagygygatgtggtttygtttggttttttgttgttggggtttggygttygtttygggttgggygattttttagtagatgttttygtygygtaattttagttttygtttttttttygagatygygttyggggttttygggagtattttygc

SEQ ID NO: 4489 - DNA, 201 bp, synthetic construct
  misc_feature 1..201: note = Description of Artificial Sequence: Synthetic polynucleotide
  source 1..201: mol_type = other DNA
ttttttagggatggagtagttaygtttttygagtgtgtttattttatygatggagtaaagtgaggtttttagttygttyggatgtttttgygtygttygyggggtagttttygtatagataygttygtaagttttygattygttygttattygygtttagatattygygagtttttggggtygtagggayggtgtagygtt

SEQ ID NO: 4490 - DNA, 201 bp, synthetic construct
  misc_feature 1..201: note = Description of Artificial Sequence: Synthetic polynucleotide
  source 1..201: mol_type = other DNA
attttagatatataggtagtygggattttygttyggtgygtttgtttatttatttttttgygttaggttgggaygygtttygtttgtaaaaggtttaaaygtatttttygtygyggggygggatttaggggtttaggtttyggggtttagaggygggtaattttgttaattttttttagyggyggggaaygtygygtaatc

SEQ ID NO: 4491 - DNA, 358 bp, synthetic construct
  misc_feature 1..358: note = Description of Artificial Sequence: Synthetic polynucleotide
  source 1..358: mol_type = other DNA
ttaaygggttyggtgtatygttatygyggtttyggtttygttygagttyggttgagtttttaggtygggtttygggtttygggygttygyggggtaggaygtttttygtygaggygtaggggtagttatattgyggggygtttgggygayggygttaaagttagggttataagggtaygggataagyggggyggggggagtaggagattaggatagaggtyggygttygtygygggygtttttaygtygygggtatygttygttyggttttagygttyggggygtaaagtaagggygtaaattttgttygaggyggygayggttgyggtyggggtttattttgaagtygttaggtgtt

SEQ ID NO: 4492 - DNA, 201 bp, synthetic construct
  misc_feature 1..201: note = Description of Artificial Sequence: Synthetic polynucleotide
  source 1..201: mol_type = other DNA
gttgygtgttygtygtttatagtygtagttaaagagaygtaggyggttttaygyggtttggtttatygtygtttgtagtgttygyggygyggggygtttygaggttgggtttatygtttttttygygtttttgaagatttttygggttttttygaaggagtattgtttttttttgtattttttttttagggagttyggtyg

SEQ ID NO: 4493 - DNA, 201 bp, synthetic construct
  misc_feature 1..201: note = Description of Artificial Sequence: Synthetic polynucleotide
  source 1..201: mol_type = other DNA
ygttttttygttttyggttygagyggtygttatygygggygggyggygttgygttygggtgyggtttttygtyggyggyggyggygyggtygagaggtgygggtttygygygggygggaygyggggygttgttygtaggagygattaggtgggygtygggtygatygtagtygtygtygygttttttttygygtttygggt

SEQ ID NO: 4494 - DNA, 201 bp, synthetic construct
  misc_feature 1..201: note = Description of Artificial Sequence: Synthetic polynucleotide
  source 1..201: mol_type = other DNA
gtygaggtttagagtyggtttttgttygtaggyggygaayggtattttgtttygttaggtttttgygggtgtgattygtgattygtagattttttygggygtttttggtttatgaygygggggttgttygttttaygtaggyggtttygggatgttttttygtttagattttagyggtagaaatagtttyggatttttttt

SEQ ID NO: 4495 - DNA, 277 bp, synthetic construct
  misc_feature 1..277: note = Description of Artificial Sequence: Synthetic polynucleotide
  source 1..277: mol_type = other DNA
aggggagtaaaayggagttttygggggtaygtaggtttygtttttgggtgttggttttgtttttggtttttttagtyggtgtagtgattyggaatagygyggtygttttttygaygttygyggttttttattgygtygaggygagygttayggttaaagtttaagtttyggygttygttgygtttgtyggagttttgtttgttygagtaggtagyggggtttaggtayggyggygaygtygaagggttagtyggtagatagggttgggtttttgygg

SEQ ID NO: 4496 - DNA, 201 bp, synthetic construct
  misc_feature 1..201: note = Description of Artificial Sequence: Synthetic polynucleotide
  source 1..201: mol_type = other DNA
tattttgtttttagttygattttttttgygttyggagtttgggttyggygygtaggagattgygtgtattttggygttttygatttttgttagggygtayggggattttagagyggattttttaygagttttaataggaggttagggagtygggatattagagataaattttttygaagttttttttyggttttattgatt

SEQ ID NO: 4497 - DNA, 247 bp, synthetic construct
  misc_feature 1..247: note = Description of Artificial Sequence: Synthetic polynucleotide
  source 1..247: mol_type = other DNA
gtygttatagtygtttygagttygygygtagttttagttgttaygyggattttttgtttagattgygttgttgaagtyggygtttygttttataygggtygygttaattyggtygttgtgtayggtygggtgygaaattttttygygggtttayggggttgtygaggyggggtygtagyggtygtyggggttggggttggtttyggtttgagatagttttatggaaggttaggttttyggtttttgc

SEQ ID NO: 4498 - DNA, 201 bp, synthetic construct
  misc_feature 1..201: note = Description of Artificial Sequence: Synthetic polynucleotide
  source 1..201: mol_type = other DNA
ygtygtttygygygtttyggttatygtygtgtttttttygggygttagggaaggtggttaggtggtttttgttygtygygttttgygtttygygtygttygttttgygttttgttttgttyggttgygttttttygggttttttygtygttatygggaagygtygttyggttttgagygttgygygggttgygygyggggg

SEQ ID NO: 4499 - DNA, 201 bp, synthetic construct
  misc_feature 1..201: note = Description of Artificial Sequence: Synthetic polynucleotide
  source 1..201: mol_type = other DNA
tttgaagtyggyggtgtttaggagygygtygtttttygygtagggtygtttgygggtataygttagygttttttagttygygtygggygttttygyggaygygygtagttttyggttygttaggttyggttygygtagygtagttygyggttatygygatttatygggygggygggyggtygggygggggygggtttggyg

SEQ ID NO: 4500 - DNA, 201 bp, synthetic construct
  misc_feature 1..201: note = Description of Artificial Sequence: Synthetic polynucleotide
  source 1..201: mol_type = other DNA
taggtttggttttagaatygtygggttaaggagaagaggttgaagaaggaygtyggtyggtagygttgggggtagtattttygtaatatgaagygttttygyggyggttttaagtyggataaggatagygtttaggaggggtaggatagygaygttgaggttttttttttyggtaggyggagggatygyggagttyggggg

SEQ ID NO: 4501 - DNA, 356 bp, synthetic construct
  misc_feature 1..356: note = Description of Artificial Sequence: Synthetic polynucleotide
  source 1..356: mol_type = other DNA
ttgatygtgatgataagaaggttggggaggttaagagaaaagggaagagagagtgtagttgtaaattttttttygggttygagaagtatygtttttttgygtgtttaattggtatttgttattaatatgtttgtttttatttaaatggtttagagtaaggttttgattaaattagtatttttaygttaatatttagtagygtttttggtttttggtagattttttttttagttgttaaagtaaaattatagaagygttttggttttatttaaggtttgttggggttttttgttttttttyggagattygaatagttygtagatgtgyggtatttgtttatgttygtgtttygtgtt

SEQ ID NO: 4502 - DNA, 201 bp, synthetic construct
  misc_feature 1..201: note = Description of Artificial Sequence: Synthetic polynucleotide
  source 1..201: mol_type = other DNA
agtygataygygygatgygygagaaagygyggtgtatygggtygttgtygyggtaaaattgtagtaygtggyggtataygttgtttaygyggtygtataygtagygygttttgtgggygttttagttttygyggyggtataggygygagtagtagtaggtgtagtagttgtggtaggatttgaagtagaggtaggygttga

SEQ ID NO: 4503 - DNA, 281 bp, synthetic construct
  misc_feature 1..281: note = Description of Artificial Sequence: Synthetic polynucleotide
  source 1..281: mol_type = other DNA
gggttttatyggggygtagggttggggaatyggagtttygttygtygattyggagtatygtttaygtagattygtttygggygagggaggggtygggygygtattygyggggagggyggygagyggggattagtygaagtygggagaggggygtttttayggggygggaaattggygygygattttgggggaagtgtaggatggggggataggggygttttygygggggtggatgggggattatagyggggttggyggggtaggggtyggygtaygaggtt

SEQ ID NO: 4504 - DNA, 222 bp, synthetic construct
  misc_feature 1..222: note = Description of Artificial Sequence: Synthetic polynucleotide
  source 1..222: mol_type = other DNA
tatygatttttygtgtagyggtttygtttygtyggattttaattattgttttaaggattgggattataatggtttttttgtgtttattattaaygttatyggttaggtgaggyggttaggygggtygygggtttgggggygggtagagagyggygagggyggggttttaygttygttgtattttttttatatttttagtgggatttggtgtgtgatttgggt

SEQ ID NO: 4505 - DNA, 237 bp, synthetic construct
  misc_feature 1..237: note = Description of Artificial Sequence: Synthetic polynucleotide
  source 1..237: mol_type = other DNA
gyggttyggaggyggttatgattatgtatatgaaggggyggtyggtgygtyggttygtggggtagatggtggtgggygtgaagygtttgttggtttygaygaattygtaaagttgttygtagaygygygggaattygtggygtaggaagaygtygygtagtygtagttygygttggatgtggatgaaggttatttygygygygygtyggttygtttygtygttttgatttaggttyg

SEQ ID NO: 4506 - DNA, 201 bp, synthetic construct
  misc_feature 1..201: note = Description of Artificial Sequence: Synthetic polynucleotide
  source 1..201: mol_type = other DNA
ggtttggaatagagattttagttgatttataaggayggggtttgagatttggggttttttgttatagtggtataatttagtttgtattgattaatatagttttttgtgaatttyggttttaatatttaaattaaggtattyggttgttttattaagttgttataygtttatttaaaagtattgttagattgaggaattagg

SEQ ID NO: 4507 - DNA, 364 bp, synthetic construct
  misc_feature 1..364: note = Description of Artificial Sequence: Synthetic polynucleotide
  source 1..364: mol_type = other DNA
gygttygggttttgtagttttttgttgttgttygygttygggtaygygtgtttygygggttgygtttgtatygattygtatatygtggattgtygygatygygggttgtttagygtgttagattttttttttttggaygtgygtaagttgttggtggtyggtaatygtatttagyggattttygaggatttttttattttttayggygatttggtttatttggattttaggaataattygttgygttygttggaggagggtaygtttagyggttyggttaagttygtgtttttygattttagttataataatttgatttagttgggygtyggygtttttygttyggtygggaggttggtgaagt

SEQ ID NO: 4508 - DNA, 201 bp, synthetic construct
  misc_feature 1..201: note = Description of Artificial Sequence: Synthetic polynucleotide
  source 1..201: mol_type = other DNA
tygggataygttttagggaaatygtttttgggtttggtagttgaatttagaygtygagtgtagttygttyggtgygygyggygttttattgttagatttyggaaattagttgttagggtggggtygygttttggygayggttattyggttatttttgtygttttygttttttttaagagatttttttagygggttaatttt

SEQ ID NO: 4509 - DNA, 201 bp, synthetic construct
  misc_feature 1..201: note = Description of Artificial Sequence: Synthetic polynucleotide
  source 1..201: mol_type = other DNA
gttttagaggggagtyggggtggatttttatggaagggagaygtttgygttagtttaggagtggagttygtgttttatyggttttttaaattgygagtaygaaatttttagaggggagttgagttggtgtttygygtgttttttattttttattttttattygtaggttagatttgygttgtttattttaggagggagygt

SEQ ID NO: 4510 - DNA, 201 bp, synthetic construct
  misc_feature 1..201: note = Description of Artificial Sequence: Synthetic polynucleotide
  source 1..201: mol_type = other DNA
tygttttatygatgyggagygygagttgtttattgttttttattatgtttaggattttggtttgggggygagagaggtgataaagagttgtatgatgygyggggggygygyggtygggtattttyggttttatttgttgtgtttttygyggttyggtttygttygygtttygatttttaggtatyggtagygtyggttttt

SEQ ID NO: 4511 - DNA, 222 bp, synthetic construct
  misc_feature 1..222: note = Description of Artificial Sequence: Synthetic polynucleotide
  source 1..222: mol_type = other DNA
agygtatatatatagatataggtttatatagatagattyggttttaaaaataygtattygtagaggtaaaggttagygtataagtaygtatagatatatygataggyggttttyggatatygygttttttgtygtatttayggtttaygtaagggtttatatayggttttayggaggatagttataaaatatttagatataygttatataygtaygygygta

SEQ ID NO: 4512 - DNA, 201 bp, synthetic construct
  misc_feature 1..201: note = Description of Artificial Sequence: Synthetic polynucleotide
  source 1..201: mol_type = other DNA
gtttatatatattagtgaaayggttaaatggtagtattaggtgttaagtgatygtataggygtgtttttgttagttgtgagtaagataaggtagtttatygtttttagggagtttagtttttatgggggtgtattygtttgttagggttgttgtatttaagtattattaattyggtggygttaataatagattttattgtt

SEQ ID NO: 4513 - DNA, 265 bp, synthetic construct
  misc_feature 1..265: note = Description of Artificial Sequence: Synthetic polynucleotide
  source 1..265: mol_type = other DNA
ggygggygtyggyggggyggttttttagtaagatgtgygyggygtygyggggygttttttatttgtagyggygttygggagtygggyggttgggttaggyggygttttyggggttgttgygygttygygtttagagttgtygttttagggagttygttayggtygygtttygggtaygttyggyggygtttaaygatgatygttttttggyggygttttyggagtttggtttgggaatattgggtygggtttttygtgtgygttt

SEQ ID NO: 4514 - DNA, 242 bp, synthetic construct
  misc_feature 1..242: note = Description of Artificial Sequence: Synthetic polynucleotide
  source 1..242: mol_type = other DNA
gttttygtyggyggygttgtattattattattattatatattgttyggtttagtgtagtgatttygygggtygggttttygtyggygygttgtagggygygggygygtagttygttygygyggtttggattttttttgttyggttgttttggattttataaaaaaaaaaaaaagtttagaaattttygaataaaattaaatattyggaygatttttttyggtgagyggygaagatagttygg

SEQ ID NO: 4515 - DNA, 201 bp, synthetic construct
  misc_feature 1..201: note = Description of Artificial Sequence: Synthetic polynucleotide
  source 1..201: mol_type = other DNA
ttttttttygttttttttttgtttttttttttgttttgtggtttttttttttttttttagagatatttgggagttgtttttaagttttggggygtttygyggggttttgttaagggtgygtgtgagagagggyggyggagtyggygtygggtgttaggggtygagggtgggagygggagttygtggttttgygttttggag

SEQ ID NO: 4516 - DNA, 261 bp, synthetic construct
  misc_feature 1..261: note = Description of Artificial Sequence: Synthetic polynucleotide
  source 1..261: mol_type = other DNA
ygggttgtaygygtaggyggtttattyggggggyggyggyggyggtttggtygggatgttggyggygggyggtggyggygyggggtygggtttgtattaygygttgtaygaggatggttaygaggygtagttggagtygtygtygtygtygtatttgggygtttayggataygtatayggatatgtataygygggyggtttgtaygyggyggyggygtatttgtattygggygygggyggyggyggtttatyggtgggyga

SEQ ID NO: 4517 - DNA, 201 bp, synthetic construct
  misc_feature 1..201: note = Description of Artificial Sequence: Synthetic polynucleotide
  source 1..201: mol_type = other DNA
ggggattygygtaggttagygtgtyggttttttttagtttatygttgtygtygtyggggttgttttaagggagttaagyggagtgggagygggtttgygygtttttgttttgygygtaggggygggggggtttaggayggggygtttttttttatttatatgttgatttaggatttttaagyggttyggtttaggatatyg

SEQ ID NO: 4518 - DNA, 337 bp, synthetic construct
  misc_feature 1..337: note = Description of Artificial Sequence: Synthetic polynucleotide
  source 1..337: mol_type = other DNA
gtaagagyggtgtagtygagtyggygttttagaagtygagaggttatataagtttaygtagagaggygtatyggatayggtaattaggagtaatttataygttttygggygtayggaaattatttgttaggaaatttttaaygttttttttygtttatttttttttattttttttttggygygttttttttttttttagaggtaygtagtggagtttttggagtttygaatttttyggatattgtagaatgyggggtttttygggygygggttyggttaattagagygtygtttgttttttttggttaatggtaggygttatattgttgtttaattt

SEQ ID NO: 4519 - DNA, 201 bp, synthetic construct
  misc_feature 1..201: note = Description of Artificial Sequence: Synthetic polynucleotide
  source 1..201: mol_type = other DNA
aagttttgggtggygygtaaaggygtaggygagggtygtygtatagagtygtttaagttgtggtyggagygttagggygatttttgggaattttttaagyggaatttttygagataagyggtttttgttttttgatattttagtygaggtygagttgaygygtagttatttaattttttttgtttyggggaaataatttta

SEQ ID NO: 4520 - DNA, 201 bp, synthetic construct
  misc_feature 1..201: note = Description of Artificial Sequence: Synthetic polynucleotide
  source 1..201: mol_type = other DNA
atgagtygagagggttgagyggagagtgtggttttyggyggttggaggtaggagaatatgttgygttygttygtygyggygtgagaggttygaggtgggygygtyggggtaggggyggtygygggygtttgttygtttagtgggygttgttyggatttggygaggtggtggtttgtaatattgtgttygtattgtttattg

SEQ ID NO: 4521 - DNA, 201 bp, synthetic construct
  misc_feature 1..201: note = Description of Artificial Sequence: Synthetic polynucleotide
  source 1..201: mol_type = other DNA
gtagygtygyggyggttagtagygtygggtagtggattygyggtggygyggygtygggtygyggtgtttagggygggagtagtagtaygaggtttagggygagygtttaggatagygttagtatgttygtygtgtggygtttttggtatagygtttggtaggtggygggygttygggtgatgagtaggtagyggtttaggg

SEQ ID NO: 4522 - DNA, 201 bp, synthetic construct
  misc_feature 1..201: note = Description of Artificial Sequence: Synthetic polynucleotide
  source 1..201: mol_type = other DNA
gttttaggagggaaggaggygayggtgtttaaggaygtyggaagtyggggattttygtttttttygggtttyggttaggttattagtgttggttygyggygygggtgtttagttgygtttgggatattgygggtayggttgtggyggtaayggtagyggtygtygygtygtygaygttyggtaggattgagygtayggagc

SEQ ID NO: 4523 - DNA, 386 bp, synthetic construct
  misc_feature 1..386: note = Description of Artificial Sequence: Synthetic polynucleotide
  source 1..386: mol_type = other DNA
ggtggtatgtaygttttatttaaaaagtagatttttttttgtaattgttagtaagtggaaggatagtaaattttatattatttygagatttgtgygtttygagyggttttaatttygtttygtttgttgttgttgttgttggtgttgtttyggttgtagttgttgtygttttaygatttyggggygttgaggtaatagggttttttttttttattttttatttttttyggtttttttatagaagygtygtttttagtaatttttygtgtattttttatttttgtygtygtttattttattttttttttttttgttttttttttaaatygtttttaagtatatttttygtygttggaagtgattataatgttgttttttaataagta

SEQ ID NO: 4524 - DNA, 201 bp, synthetic construct
  misc_feature 1..201: note = Description of Artificial Sequence: Synthetic polynucleotide
  source 1..201: mol_type = other DNA
tttttygtttttygyggygygygtygttttygggggtttygygttttygygtttaggttttttttttttggygggygtttataggyggygygggtagygygagtttyggagtttyggaggtttgtgygttttgagtyggtatggatttygagtattgygygttttttygygtggggtttgtattyggtttttatgtggttt

SEQ ID NO: 4525 - DNA, 201 bp, synthetic construct
  misc_feature 1..201: note = Description of Artificial Sequence: Synthetic polynucleotide
  source 1..201: mol_type = other DNA
ggggygattyggagttgygygtyggygtaygygatttygttygttttttattttttgttttattattagttttaatttggttttygttygtygygygttyggggtttaggggagyggygyggggatttaggttttayggyggagagagygygygggattgygaagattggggtygagtgtygttttttttgygttttggta

SEQ ID NO: 4526 - DNA, 309 bp, synthetic construct
  misc_feature 1..309: note = Description of Artificial Sequence: Synthetic polynucleotide
  source 1..309: mol_type = other DNA
aggygtagaygttggagttggagyggygttttyggtagtagyggtatttgtttgygttygagygygagtagttggygagtttgtttygttttaygtttaygtaggttaagatttggttttagaattatygttataagttgaagygygttygygttttaggggyggyggagtygtttgatttggtagtattygtygagttgtaygtygygttyggtttgttgygtygygtggtggtgtyggtgtttgttygygaygggtagtygtgyggyggyggyggyggtggygaggtgggaatygtygyggtttagg

SEQ ID NO: 4527 - DNA, 203 bp, synthetic construct
  misc_feature 1..203: note = Description of Artificial Sequence: Synthetic polynucleotide
  source 1..203: mol_type = other DNA
agygtatattgtygttagttagttagtygtygtygtattggtttagtttygaaaatttttaggyggygtagaggtgtttaattttggttattayggygtygygtygtyggtaygtygygtgggttttagatagygttagtygttygggtaygaagaatatttggtttggggattatagygggttatygatygagggtagggtg

SEQ ID NO: 4528 - DNA, 388 bp, synthetic construct
  misc_feature 1..388: note = Description of Artificial Sequence: Synthetic polynucleotide
  source 1..388: mol_type = other DNA
ggttyggttygyggagttagygtttttttygygtygatttygggtttygggyggtygtyggggggygtygggygtatttttygttgttaatttttygttygtgttttygttygygtttgggtttygtygtattttagtagaagttattatagagaataaattatttttttgttttygagatgggttttyggggaggaaggtaaattgtttgtttygtgtataataagttaggygtggagagtagygyggaggaggtygyggtagttatygagygggtagagtttttygtttttattygtygttygygtttgtygagttttttgtygagygggyggygygtaggttyggagaattttaaaaggtttggaatatygggttgtttttyggt

SEQ ID NO: 4529 - DNA, 241 bp, synthetic construct
  misc_feature 1..241: note = Description of Artificial Sequence: Synthetic polynucleotide
  source 1..241: mol_type = other DNA
agttttttatttagatygygttagtgygtttygggttttattagtttttattaggygttgtttttttygtttttatttagtttttttttttygttttttygygagtgtatttaagygttttygttttatttatttttagygtttttttaagtttggaggagygtttagagtagtagaaatagtaggtattttatatygttyggygtggggatttygyggagygtygttgygygtygttttt

SEQ ID NO: 4530 - DNA, 232 bp, synthetic construct
  misc_feature 1..232: note = Description of Artificial Sequence: Synthetic polynucleotide
  source 1..232: mol_type = other DNA
ygtttttttttttagygtttaggttgggggyggygtyggtgttagtttagtttagggygaagtttttagggtyggttygggtygggttgygggattygtygtggagygtaaagtgtttgaagttttygygygtattyggttttgtttttaaaggttttttagaaatgtaagaggttaggygtagaaatatatayggayggtagttttatgagaaaatgtagataaagagttc

SEQ ID NO: 4531 - DNA, 214 bp, synthetic construct
  misc_feature 1..214: note = Description of Artificial Sequence: Synthetic polynucleotide
  source 1..214: mol_type = other DNA
gtttttttgttttygygttttttggattagttttggtggggagttggaaggtatygagtgygtttyggttaagaagggyggatagttttgtgygagtagygttyggttggygyggygyggggtgttttttatgttaaaggaaaggatggattttttgtttgtttagggtttttattttttaaaatttttttaattgyggtattggaagggattt

SEQ ID NO: 4532 - DNA, 250 bp, synthetic construct
  misc_feature 1..250: note = Description of Artificial Sequence: Synthetic polynucleotide
  source 1..250: mol_type = other DNA
ygtagyggggtygttttattgtygtatttttatttygygttttgygygtttatttgtttaygaagttttygagtatygagtttttgtyggygttttggtygtttattayggygatttgyggtagttttagtaggtagttttgttttagygtygaaaaygygttttgtagayggtttattagygggattagtttttttatttttyggttttttattttgttygaggggtyggygattagttggtttttgtt

SEQ ID NO: 4533 - DNA, 201 bp, synthetic construct
  misc_feature 1..201: note = Description of Artificial Sequence: Synthetic polynucleotide
  source 1..201: mol_type = other DNA
tggtyggtgaagttttaggattygttygtttggggttaaggtaaggggtgyggtaygaggagygtagggagtttygagttttaggygtagatttagttgyggattygtygtatagttttggtgttgtaagygtggatygtgggygtaaggtttyggygggaggtattyggttyggtygyggtygggtttgtagggttttgg

SEQ ID NO: 4534 - DNA, 467 bp, synthetic construct
  misc_feature 1..467: note = Description of Artificial Sequence: Synthetic polynucleotide
  source 1..467: mol_type = other DNA
tygggtatyggygggagaggggggagaagyggygtggagaggatttggtaagggtttgtttttaaatttagattatgatttaatattttggaygygaagygaagatgggaaayggtygtttgttgagagggggtatttgtagtttttttagaaaaggttggggtaggagagygtgyggttagaggggtgggggtatyggagggggggttttattttttgttttatagtygggtttttttygygaggygttgggaagtatgaggtatgtagtatttaaaatgttttttgaaaaagayggatttgaagtttttttttataaataygttattgtatttattttttatttagagaygggttgygygtttygagttgtaygggtaggtatttttttyggttttgttttataaggtggggagagyggggttggaygygggagggggygggggggggagygtgagaagaaayga

SEQ ID NO: 4535 - DNA, 201 bp, synthetic construct
  misc_feature 1..201: note = Description of Artificial Sequence: Synthetic polynucleotide
  source 1..201: mol_type = other DNA
ygtatagttagygaagygattygagggttagygaataagygttggattttygtaggtttyggygattttagattyggtttttyggygaagataggaaaaygtgtgtygagagtygttggagggaatygttygtaaatygaagaagaaattaaattagtagygaatatttgtaaattagtgttaagttgtgagtttttygag

SEQ ID NO: 4536 - DNA, 232 bp, synthetic construct
  misc_feature 1..232: note = Description of Artificial Sequence: Synthetic polynucleotide
  source 1..232: mol_type = other DNA
tygggygygggggaggygtgggtgttggggygggygagtttagatttttygtgggttggtttgtgggtgttttttyggaaataaatgaggttgtaggagyggtgatyggtttgattgtttttgggggtttygaattygtgggtggagagggtaaggyggaggtygtggttagtatttttttagtgataatgtygtyggggatttttttttttattttttgggagtattttag

SEQ ID NO: 4537 - DNA, 222 bp, synthetic construct
  misc_feature 1..222: note = Description of Artificial Sequence: Synthetic polynucleotide
  source 1..222: mol_type = other DNA
taygattttaggttygttgatgatygttgtggtatgaatgaggttatygtattyggagaggtggatgtttagatgtggatttaggaaatggttttatttygaaagtttygggttagtgggygtgttttttggttagtgtttttaygttygygttagaagggtagtaggttttygtagggttyggygttttatttattygtgttttttttgttgtttttagtt

SEQ ID NO: 4538 - DNA, 239 bp, synthetic construct
  misc_feature 1..239: note = Description of Artificial Sequence: Synthetic polynucleotide
  source 1..239: mol_type = other DNA
tagygtygygttttaygttygttatygtygtygtygttttagtatatygtaggygtgagtttygtygygatygggagagtttttttagttgtgygttttygaggtatttggtygggyggggaggygtygggtyggggygtataggggttaggygggggygttgttgtttatttttygtttttygggygtgygtttygtttyggagttygtatttygygttygygtttygtttggaagtt

SEQ ID NO: 4539 - DNA, 209 bp, synthetic construct
  misc_feature 1..209: note = Description of Artificial Sequence: Synthetic polynucleotide
  source 1..209: mol_type = other DNA
gtttattygtygtagtagtttatttttgttygttagggagtttagggtagtttttgaagttgttagatttttttaygtaggyggyggygttttgtattgyggagtygygttttgggggagtagtatttttagtttyggygtttygtagttagatagttttttttagggtggtagtatttttyggttagggtgtagggattttyggggyg

SEQ ID NO: 4540 - DNA, 380 bp, synthetic construct
  misc_feature 1..380: note = Description of Artificial Sequence: Synthetic polynucleotide
  source 1..380: mol_type = other DNA
gtttagatagataaaattattttattaaagtgtaatgggagagaggaagaggagtaatgagaaggtatgtgagyggggagaaagaaaaagttygggaggygaaaaygaaatttatttttttgygtttatttttgttagaggtttgtaggaygtgttttaatttggtatttygagtttagaataaaagttaygggggttgyggtatgggtagggggaaggygygyggtggttgaygyggggtaggggttttggygagygygggaggggyggttagtagtygttygyggggttggattgggagtttygtgygatttygggtttggygtttgggtygggggtggttttygggtttttttygggggtygtygaggttyggtttc

SEQ ID NO: 4541 - DNA, 394 bp, synthetic construct
  misc_feature 1..394: note = Description of Artificial Sequence: Synthetic polynucleotide
  source 1..394: mol_type = other DNA
ggtttttttttatgagggtttygagtagatgaggtttaaaagtygttttaaggagttttttttaagtttgattygagtgggygygaatttttatagtagygttaagtagtaggattatagygttagygtttggtttyggaggaaagataagttggagtaygtaagggygattygttttygggggtttyggttaggtatttgtygtatgtatttttttygtggtggtggtatgagygygygyggggygyggggggtaggygaggggattttggtaggygtygaygttttaggtyggattygggggtttttttgtttgtagttttttgttttaatgatygggttgyggggaggggagggtaggtttttttttaggtttttggtttttgtygattyg

SEQ ID NO: 4542 - DNA, 201 bp, synthetic construct
  misc_feature 1..201: note = Description of Artificial Sequence: Synthetic polynucleotide
  source 1..201: mol_type = other DNA
ttyggtttttttatttyggttttttatggggttttygggtttgttygttgtgagtagttttattttggggtgttggygggatggttgtttygtgtagggygttygggagtttagatttygtggaaatgtttggggtttttttttgtttagaggggatagtgagtagttaygttgygatatgtttgagggattyggaygaag

SEQ ID NO: 4543 - DNA, 557 bp, synthetic construct
  misc_feature 1..557: note = Description of Artificial Sequence: Synthetic polynucleotide
  source 1..557: mol_type = other DNA
ygggggaaaggtyggygttttagggyggggaggatttgggagtggagttyggagataaaatyggggttaggtagaggagttagagggaaagttagtaaaygygagttygggtgagagttatyggaatgygggaaygtagtttagtygggaatagggttttygataggggtygttygtggttaggaygyggtygttgaatagaggtygygyggyggtttttgttygagggatttygtgggygggggttatayggaggtygygtayggttttyggggttggygggggtaggtgggaggatttttttygggttygygaatttgatttggtagyggttaggtgtttggaagygtttttaaatgatagggttataaagatatgttggttaggtttgtagttagygtagtaaygtggtttgtaggagygtagaaygaggttagatagggttattyggaygtygtgttgttagtgggtgggggtygggagtaagyggtattggtttggagatttygyggtaggtgattttttttatttgggtagygaggttgaaygatggygat

SEQ ID NO: 4544 - DNA, 212 bp, synthetic construct
  misc_feature 1..212: note = Description of Artificial Sequence: Synthetic polynucleotide
  source 1..212: mol_type = other DNA
ttggagggagttgggggattttggagggtgggaagtggttgattttyggtggtyggatatttatttagagtttgattygtattygtgtttttttggaagygttataattgyggggaaggagtttttagaaatygtgttagttttaatatggygggttaaggtggtttttaaaaattgaaaataaaggttttgaggtgggaaaaaatttagtt

SEQ ID NO: 4545 - DNA, 201 bp, synthetic construct
  misc_feature 1..201: note = Description of Artificial Sequence: Synthetic polynucleotide
  source 1..201: mol_type = other DNA
aatagtttttttyggtttttttagttttgtttaaggggtttggaaatgttygtagttttaagaaaggttttatttaagtataggatggggtggggygggyggggttaagattgttttggggattgaatttattttygtttttagygattttyggyggataaagygtaagtttgtgtatayggtygattgagttattggaaa

SEQ ID NO: 4546 - DNA, 201 bp, synthetic construct
  misc_feature 1..201: note = Description of Artificial Sequence: Synthetic polynucleotide
  source 1..201: mol_type = other DNA
gggggagttaggggtttttygtttggggattttygtgttgggtatttygtaygttttggaygygygtagttttatygggagygaattttgtttygtttgygggtgttayggagaggggttgggaagtygagttagttttggyggygattgggggygtttttggttttttgggggggygggggygygtattgttgtttagga

SEQ ID NO: 4547 - DNA, 294 bp, synthetic construct
  misc_feature 1..294: note = Description of Artificial Sequence: Synthetic polynucleotide
  source 1..294: mol_type = other DNA
tttgaaagtttttgaagyggttttttttttttttttttttttttygtaggtagagttgtggtgtggttgggtggtttgygtgggygttygggggattygygggtattygggaygaggygagggygtagaaaatttggagtttaattagtayggagttgagttttygygttttaatttttaggtgatttygtgyggyggyggyggtagtagtagtggtagyggygatyggagttygtagtagtttygagygttttygggaggataggyggygagttyggygaatygttatttgtt

SEQ ID NO: 4548 - DNA, 244 bp, synthetic construct
  misc_feature 1..244: note = Description of Artificial Sequence: Synthetic polynucleotide
  source 1..244: mol_type = other DNA
ggygggygtgagyggyggaggagtygggygyggygataygyggttatggagygggagtyggyggggatygaggagttygggttttygggayggyggaggygtygagagggtaggaygygtayggtgygttttaatttgttgtygttttygggygtygaggattttgyggttggygyggttaagggygagyggygayggyggygygggtgtgtttagtatttggtygataatyggtttaagatta

SEQ ID NO: 4549 - DNA, 303 bp, synthetic construct
  misc_feature 1..303: note = Description of Artificial Sequence: Synthetic polynucleotide
  source 1..303: mol_type = other DNA
yggggtagtyggggtygggagagygggygtagygyggyggggatyggagtygygggygtygggaaaggttttygttaggaggggagggaatttygggagygygagttagggggaggygygtyggaaagygagagtgataagtagtttataagtygaaaagtttttygygggaggygygygtygygtgggtttygatttagtygttgygygtygtygtggtatataggttgaaaagtttgygaagttatagaagttaggttyggygtttagggggttttgattttgtttttatggttttagatt

SEQ ID NO: 4550 - DNA, 286 bp, synthetic construct
  misc_feature 1..286: note = Description of Artificial Sequence: Synthetic polynucleotide
  source 1..286: mol_type = other DNA
ygyggaggttggttttggtagtggttagggagtggagaaagtaaattagagtyggttyggttatygattttgygaagttttttygattttagtttagygygggagggtggyggaaggtggtgtatygtagygtggttttygtygttgtygtygyggttttgtaaagtgttagygggggygaaagygagagtttaaaggaataggaggtttattgaattttttatyggagtttttaggggttttggttttttagtttgtttttgtttttttagttyggggatttgtt

SEQ ID NO: 4551 - DNA, 261 bp, synthetic construct
  misc_feature 1..261: note = Description of Artificial Sequence: Synthetic polynucleotide
  source 1..261: mol_type = other DNA
gggaatygagaagaggaagaagygaaygygagtaggagygtagygtttttyggatttttgaggttttttttgtaatttgttatattygtagtttttattygatattgaataataatygyggggaggagaggttatttgtagtygaggttygtaaattgtyggttttattygggtagygttaattyggtgttygyggayggtgattttygagttttagygatgygttttattgggtttaaaatagatttaattttatagtta

SEQ ID NO: 4552 - DNA, 201 bp, synthetic construct
  misc_feature 1..201: note = Description of Artificial Sequence: Synthetic polynucleotide
  source 1..201: mol_type = other DNA
tattgaaaggtagaaatggggagtaggtatttagttygyggtgggtagggttttaggaggtagttttygttyggygatagttttyggggygtaatttttygtaggaygygtatttgttaggatagttattaagaggatgyggaggttgggggttttttyggggataaaattagggtattttaaggaattttttgygygttt

SEQ ID NO: 4553 - DNA, 201 bp, synthetic construct
  misc_feature 1..201: note = Description of Artificial Sequence: Synthetic polynucleotide
  source 1..201: mol_type = other DNA
gttggattgggtgyggttgtatttgtggagtgggtggttyggtgattgttattygggttagtgttgttagtagatgtgtatattttgggygggggttggyggtygagtgttattagtaggggyggyggttaggtagttattygtygttttttaagttyggygttgygygtagggtttggagtattyggtgttgagaygyga

SEQ ID NO: 4554 - DNA, 201 bp, synthetic construct
  misc_feature 1..201: note = Description of Artificial Sequence: Synthetic polynucleotide
  source 1..201: mol_type = other DNA
taagttgttttttgttttgggtttttgatatttttatagtttttgaaagggttttyggagattttagagagaggygggtgtygaggggttaygagttygyggttgatattygygttgyggaagagaatggtattgattgagggttttggggatttgggttttggygttttggattttaggattatgtatttttyggggygc

SEQ ID NO: 4555 - DNA, 201 bp, synthetic construct
  misc_feature 1..201: note = Description of Artificial Sequence: Synthetic polynucleotide
  source 1..201: mol_type = other DNA
ygttyggttygygggttttaattttatygtygtyggtygaattttgttygttygyggygygtatagtyggygttygygtataygygygtataaattttaygtaattygyggtygtttygtttygtygtygtygtagttygtttgtygygygtttatagttyggttygagtygyggggttygagygatagygayggygtygg

SEQ ID NO: 4556 - DNA, 201 bp, synthetic construct
  misc_feature 1..201: note = Description of Artificial Sequence: Synthetic polynucleotide
  source 1..201: mol_type = other DNA
ygttyggygtagagtygyggtttttttgtttgygttygtagtttgygtygttygatatagtgggggtggaggtagttygtttagttgggygttttggtgyggtgtygygtttaaagttttatttttgygtygagggtttgtgatttgtagagagygatygtttgattttaagttggttgtagagygaggttagtygggata

SEQ ID NO: 4557 - DNA, 201 bp, synthetic construct
  misc_feature 1..201: note = Description of Artificial Sequence: Synthetic polynucleotide
  source 1..201: mol_type = other DNA
tttygaggtgagtygtygttgygtttatttgttttygtagttggattgtggagtygygttyggaggagygttggatayggatatttttaatttttttttygatttygttttttggttttttgtatatatattttygttaggaggggaggggaaggtttagtaattgtttggtttggttttgatttatyggttttttygtag

SEQ ID NO: 4558 - DNA, 201 bp, synthetic construct
  misc_feature 1..201: note = Description of Artificial Sequence: Synthetic polynucleotide
  source 1..201: mol_type = other DNA
gygtygtttaygttattygttatttygggtygyggtttyggttygggtttagtggttgygtygtttttygttagtaaygttygygyggaatgagygygtygygttgttygygtttttattygtagggttyggygtttttttttygttygtygtttttatagtygygygtttattggttyggttagtttayggggagtygyg

SEQ ID NO: 4559 - DNA, 201 bp, synthetic construct
  misc_feature 1..201: note = Description of Artificial Sequence: Synthetic polynucleotide
  source 1..201: mol_type = other DNA
gyggaatttygyggtygagagtyggtyggtttagttgggyggggatayggyggtttygggtttgtgttttagttttagtygggttttttygygtygttgyggttgttgygyggtgyggtygtgataagttatagtaaatttgtttttygygtygttttaagttattaggaagygtaatyggtgtttttggggatyggygaa

SEQ ID NO: 4560 - DNA, 344 bp, synthetic construct
  misc_feature 1..344: note = Description of Artificial Sequence: Synthetic polynucleotide
  source 1..344: mol_type = other DNA
ttttgattagatgaayggagtggtyggaggtaagtygygtgttttygtaggttyggatttgygyggttyggaggtggtggatggggtgtagtgggtgtgygggaatygtaggagaggattggggttttaggtggayggtgttgattgtattggttttgaagattggaagtgggtgtaggaggaatttgygatagttgagattagggygygygggtagatgygttaggtygttagtaaatyggygtgygtgygtttyggygygtttagtttygggygagygtagggatgggggtggaagaggygttttttygggtttygaggtttgygtaggttttttggtyggt

SEQ ID NO: 4561 - DNA, 201 bp, synthetic construct
  misc_feature 1..201: note = Description of Artificial Sequence: Synthetic polynucleotide
  source 1..201: mol_type = other DNA
ggygtttgttygaggygggagtygttgggttatgtttttgtttattaggtttttygaatttttggtagggtagygtttgttygtgttttygatttttttygtaggtaattygygygaatttggggttygtagagagygagygttygyggatatyggttgaatagtttggaggttgygygagggggygtygyggggagggat

SEQ ID NO: 4562 - DNA, 218 bp, synthetic construct
  misc_feature 1..218: note = Description of Artificial Sequence: Synthetic polynucleotide
  source 1..218: mol_type = other DNA
ygggtgtygtggtgyggggtggggatagttaatttagyggggayggaggaagttgggggtagttgggtgygtgttttgtatygtttatttgtyggggttyggtttttggyggtgggygagagggagtatattygtttatattttaggaatttgttggggagatgagttygtggggttagaaagaagggaaaaattttttgggtaagggagagaataat

SEQ ID NO: 4563 - DNA, 234 bp, synthetic construct
  misc_feature 1..234: note = Description of Artificial Sequence: Synthetic polynucleotide
  source 1..234: mol_type = other DNA
ygttgttgttygttatygtygtygtygttyggttatygtatygtatatattaattatttatygttygtttttagtttttygggygaagttaattataggyggaggtttygttaatggggtygtygtygtygtygtygaggaggtagttagtygygygttygggygtaagygatagttttttagggayggggatgggtygggggygygyggggggygggggygtayggggygygt

SEQ ID NO: 4564 - DNA, 201 bp, synthetic construct
  misc_feature 1..201: note = Description of Artificial Sequence: Synthetic polynucleotide
  source 1..201: mol_type = other DNA
tgaggyggagagaggtygtttygygtttggggttttygaaagyggttagttgtttttttgttttttttgagyggggagygttgygttttttgygggttgygggagatttttttagattttygggtgggaaaattatattgagygtttygggaggttgttagatataatattgtatttggtatttttgttygggtgttttyg

SEQ ID NO: 4565 - DNA, 201 bp, synthetic construct
  misc_feature 1..201: note = Description of Artificial Sequence: Synthetic polynucleotide
  source 1..201: mol_type = other DNA
agttagggtygggggygtaygtyggaatatttgggtygtygggtatygagygtyggggggttgygyggygygtatttggagagggygtagttatgygggyggyggyggygggggggggygtgyggayggtygygttggygttgttgttgggggygttgtattgggygtyggygygttgygaggagtaygattattatggtt

SEQ ID NO: 4566 - DNA, 235 bp, synthetic construct
  misc_feature 1..235: note = Description of Artificial Sequence: Synthetic polynucleotide
  source 1..235: mol_type = other DNA
gtaggggtgttttgttygtaygtatttaygatagtgagtagtatgttgtttagtagtagygttaggaataygatgaataggatgagttttygygagyggyggtttttttgtagttagyggattagygttagttygtttagggttatggtttyggggtttygttgygggygyggtgygyggtgaggatttaaggyggtygtggattttttattttttygttttttaggtygyggaa

SEQ ID NO: 4567 - DNA, 201 bp, synthetic construct
  misc_feature 1..201: note = Description of Artificial Sequence: Synthetic polynucleotide
  source 1..201: mol_type = other DNA
ttttttaatagggygygttggttygygagtyggaggaattttygtttaggttttgttaagygtttattyggagtaggtygggggtagtgaaggatgyggygggagyggygygttgtagtttygygaygtggtaygtattttggaagygatgatttagatatyggtagyggtggatgagttaggggtagaaggtggayggat

SEQ ID NO: 4568 - DNA, 241 bp, synthetic construct
  misc_feature 1..241: note = Description of Artificial Sequence: Synthetic polynucleotide
  source 1..241: mol_type = other DNA
agttttyggttygaggttgygttaattyggygtyggatgttaatgatgaaattaaaatgttatttaagttaaatgyggggagtatayggygattgggygygtataatggtaaatgggattaggtaggygaaggtttagtygagtttyggtttygtagtygttttygttatygtttttttttygttttttttyggattttggygttttggtttygggttataagagttygttygttattggt

SEQ ID NO: 4569 - DNA, 201 bp, synthetic construct
  misc_feature 1..201: note = Description of Artificial Sequence: Synthetic polynucleotide
  source 1..201: mol_type = other DNA
gaygatttgggtgatttgggtggaaggtggtgtagtaggtaggtagtggggaggggyggggaggaaatttagggggagggggygtygaggttggtgaggygtttttttygygttagggatatgtaggtatyggatggttgygtaggggtttttgttygtttggttttgggtgygttygtttagtttyggtgtaaatgtttt

SEQ ID NO: 4570 - DNA, 201 bp, synthetic construct
  misc_feature 1..201: note = Description of Artificial Sequence: Synthetic polynucleotide
  source 1..201: mol_type = other DNA
tygtttygatttattaggygygtagggttygttttygaaattygygygggttttygtagtyggtygygyggtttttagtygygaagagagygtygygtayggtggygtygttatagtygtgggtygtygygtttaggtagygttttagttgttygtaaagtttttgtagygtygtttygtyggggtttaygygygtyggtt

SEQ ID NO: 4571 - DNA, 217 bp, synthetic construct
  misc_feature 1..217: note = Description of Artificial Sequence: Synthetic polynucleotide
  source 1..217: mol_type = other DNA
ttaaggttggtttgtgttagaayggygygygygygygtaygtaygtatatatayggggggaaatttttttaaaaatgaaaggttagaagagtttagyggyggygygggygttgygygagggtttyggagttgattygtygaggtaggaaattttttyggtygygaygttyggtttyggttyggygttygygtgggatggtgtagygttygtygtygg

SEQ ID NO: 4572 - DNA, 201 bp, synthetic construct
  misc_feature 1..201: note = Description of Artificial Sequence: Synthetic polynucleotide
  source 1..201: mol_type = other DNA
ttatattgygtaagagatygtaatgaagttygtagatttttaggttggagtygtagagygaggtggygaggtggagaaygyggggttgggtttggatagyggttttggggtygtttggagttttygtttttttaattyggaaggtagyggattgatatttgygtygaagtygygygtattttayggagggtygggattttg

SEQ ID NO: 4573 - DNA, 201 bp, synthetic construct
  misc_feature 1..201: note = Description of Artificial Sequence: Synthetic polynucleotide
  source 1..201: mol_type = other DNA
gaggggtggttttgttttatttagggggtgtygtgggtaaaggttttggggttatttgtttggtgttttggagggygtagggtaggagtygtygaggttygygggttattgtggggygyggaattttagattaggtattygyggtttaattttygggttaggggattygygggggttttaygaatttgtttggtttatttg

SEQ ID NO: 4574 - DNA, 201 bp, synthetic construct
  misc_feature 1..201: note = Description of Artificial Sequence: Synthetic polynucleotide
  source 1..201: mol_type = other DNA
attyggggtyggaggtaggygygtaattatggggatyggggygggygatggyggygggygggtttttgtygtagggtggggatggtttttttagtygggyggtygtygttatattgtagagygtatttaaagagatatttygtttygygttygttttttagtattagattttygttygaaaaygtygtygggyggattgta

SEQ ID NO: 4575 - DNA, 317 bp, synthetic construct
  misc_feature 1..317: note = Description of Artificial Sequence: Synthetic polynucleotide
  source 1..317: mol_type = other DNA
tatygttygggttttygtttggttatagtattaggttatagtgygttggtttttgattatttttttggttyggtggtygtttttygtttttttttagttygygtygttgttttgttttaggtttyggtgyggttttaagttttagtttagggtttttaggtttttttaggyggyggtggyggtatttatttgggtygyggagtyggggtttggtayggtttygtaggtggtaaatgaaattttggtagttgtygtgttttagggttttaygggtatagagttyggttagtagttgtagygtttggtgatagagygyg

SEQ ID NO: 4576 - DNA, 221 bp, synthetic construct
  misc_feature 1..221: note = Description of Artificial Sequence: Synthetic polynucleotide
  source 1..221: mol_type = other DNA
atttatagygaygggtaattaygygggaggagtaggttaattttygatagtggaggtgaagatgygtgygtttygygtattttgtttttygygygaygtygttygygtygttygyggttyggtygggagyggtagttygtgtttyggtttyggtttyggtttyggttggygtttgtatttgygattatygtgagtagttatggygtattttatagtgtaga

SEQ ID NO: 4577 - DNA, 201 bp, synthetic construct
  misc_feature 1..201: note = Description of Artificial Sequence: Synthetic polynucleotide
  source 1..201: mol_type = other DNA
gtgggyggttattatttttttagagtatttggtatatygggttggggttygtattygtagggtattgyggggyggygttyggtgattgggtggggtygtygttgttttttttttygttgggggyggtagttttttgtttgygyggaggygatttagaaggtaygttygttagtaggagggygggygtygtagggttttygg

SEQ ID NO: 4578 - DNA, 201 bp, synthetic construct
  misc_feature 1..201: note = Description of Artificial Sequence: Synthetic polynucleotide
  source 1..201: mol_type = other DNA
gttttttygaaayggagatttgttatttttttagagggyggggaagtttatattattttttgttttatagtgttygtttygtttygtttgttggtttttygtttattygagatattttaggtayggttygtattggagagggtygygttgttgttgygatygtayggygttyggggtaggaatatgttygtttttttttgc

SEQ ID NO: 4579 - DNA, 201 bp, synthetic construct
  misc_feature 1..201: note = Description of Artificial Sequence: Synthetic polynucleotide
  source 1..201: mol_type = other DNA
atygaagttaggtggaagtaaatgagtttggattttgaggygygtttggtttggagtygttaaatttgttagygggyggygggggaggtggttyggtagygtygggtgttgygttygtatatgygttygggaaggtagtttyggtygtttygtttttagttygttttttatygttggygyggyggyggyggygtggggttc

SEQ ID NO: 4580 - DNA, 201 bp, synthetic construct
  misc_feature 1..201: note = Description of Artificial Sequence: Synthetic polynucleotide
  source 1..201: mol_type = other DNA
tgygttttttttttgttatttygatgttgggagtggygttttggttttggygttttttgggtaagtattagtyggyggtatttgyggaggtggttggtaygttgttattttttgaaatgagtgaggagggaggtttagatttaggyggttttaygygttygttttggtattagtagattgggaattgtygtggttatgttc

SEQ ID NO: 4581 - DNA, 230 bp, synthetic construct
  misc_feature 1..230: note = Description of Artificial Sequence: Synthetic polynucleotide
  source 1..230: mol_type = other DNA
tttttyggttgtagaaygtttttygttgtyggagaaggggtttagtaaaattgatttttttttatttgtttttatttataattgatggggagatgagaaygtaatatattttagtatygagtttttgtygtttggyggagattttgtttaagaygttttygtaaagtatttttagtyggggaataaagtayggaaagttgttgggtagagyggtygggaggagatatygg

SEQ ID NO: 4582 - DNA, 201 bp, synthetic construct
  misc_feature 1..201: note = Description of Artificial Sequence: Synthetic polynucleotide
  source 1..201: mol_type = other DNA
gatagtggtagaggygatygtttttttttttattatttatattttagttttagatttttttttttttttttyggtgatattaagttttagatyggyggtygtatttggttttatagtgtaaaatgtgtttggygaggaagtygaggyggygttgtagtagttgagygtgggggtttgtaagggyggttagttyggggaagc

SEQ ID NO: 4583 - DNA, 201 bp, synthetic construct
  misc_feature 1..201: note = Description of Artificial Sequence: Synthetic polynucleotide
  source 1..201: mol_type = other DNA
ygaaggttatyggttgygttttgaagygagattggygyggtygtygtagtyggtttyggtttttgggtagtttggygggtygtaygggttgygggaattygtyggttaggtataygaagtgyggtattatygtttggtaattggagtagatgtttattagttygtygggtttggyggttatggygttttyggygtttgygg

SEQ ID NO: 4584 - DNA, 201 bp, synthetic construct
  misc_feature 1..201: note = Description of Artificial Sequence: Synthetic polynucleotide
  source 1..201: mol_type = other DNA
tgttgttgttgttgttgttggygttggyggygygygyggayggtttggagttyggyggyggtttygggtagtgggttygttaygygygttgggygggygyggygagtagyggygagtttagttttagtttgygtattaaygttaygygygygttgttgttttatttggaygayggyggygattgygattttttggagttgt

SEQ ID NO: 4585 - DNA, 201 bp, synthetic construct
  misc_feature 1..201: note = Description of Artificial Sequence: Synthetic polynucleotide
  source 1..201: mol_type = other DNA
agtttygagtygttagtttttaggtttgggggtygtygttttyggagttgttggygtttattygtttygygttggagatgtttaatygyggtygggttgyggggaygygggtygtgttgggttttgtgygyggtygygttygtygggtgaggaygygtygggggygggggygttaggttygggtttaagggataggagttt

SEQ ID NO: 4586 - DNA, 201 bp, synthetic construct
  misc_feature 1..201: note = Description of Artificial Sequence: Synthetic polynucleotide
  source 1..201: mol_type = other DNA
ttttgaygyggggttggggaygtagatatttttggtttyggtagtttagygtaatttttgaggtygggygtygtttttygtttttagaaattygggtttygagygtygaattttagygttttygttygtgggtatagggygygyggtgtagttatagggggttygagataygygtttyggtttggtttaggttggggaatc

SEQ ID NO: 4587 - DNA, 201 bp, synthetic construct
  misc_feature 1..201: note = Description of Artificial Sequence: Synthetic polynucleotide
  source 1..201: mol_type = other DNA
yggygattatttgttgggtattaagyggttgyggyggttttattgtaaygtgggtatyggtttttatttttaggygtttttygayggtygtatyggyggygygtaygyggatattygygatagtgagtggygyggttaggygygaaggggygggggyggggggtaayggtygtygggttaattygtttagttatattttga

SEQ ID NO: 4588 - DNA, 201 bp, synthetic construct
  misc_feature 1..201: note = Description of Artificial Sequence: Synthetic polynucleotide
  source 1..201: mol_type = other DNA
gttgtattaagttataattttatttatatggtgtgagaattttttgggttttttttttttagtaagatttggtattttttgatatttattagtttaatgygtgggaaatggtgtttttttttaatttgtattttttttgatttatagaaagttgtttttagtttyggtttatygattatttagttttttattttttgaatg

SEQ ID NO: 4589 - DNA, 201 bp, synthetic construct
  misc_feature 1..201: note = Description of Artificial Sequence: Synthetic polynucleotide
  source 1..201: mol_type = other DNA
gttttttyggtattygtagtttygatagtttagttttttttatttgaaagttttatttgaggttttttttaattttgtttttttgtatttttggygtygyggggagttaggggttaaatttygtggttygygtggtttttttttttttygtagttttttygtttttattyggygtygygtttggagygttygtttyggaga

SEQ ID NO: 4590 - DNA, 201 bp, synthetic construct
  misc_feature 1..201: note = Description of Artificial Sequence: Synthetic polynucleotide
  source 1..201: mol_type = other DNA
tttygggggtgtygagtyggyggggggtgaggtggttgygtyggyggtygggttaggaggtgygggtattgggggygygggaggggaygtggtaggtttygygggggttayggygattttaggggttaggaaggtttygttgygggtaygtaatttgttttygtttttttttayggagtygtttygggtaggyggyggygg

SEQ ID NO: 4591 - DNA, 268 bp, synthetic construct
  misc_feature 1..268: note = Description of Artificial Sequence: Synthetic polynucleotide
  source 1..268: mol_type = other DNA
agttggygttggataagtygggtaagtygaagyggaaggtgaattatygtaagtatttgtagaagtagattaagygttgtagyggttttatgggygtygygtttttyggttygtttttttygagygtygtygataygttagttaaayggtygttggtygtttttagygtttygatagtygyggtttyggtttayggtaaggttgtttttyggygggaggygtygtaggtygtygyggtygttagtttgtaaagtygaagtttggtygc

SEQ ID NO: 4592 - DNA, 614 bp, synthetic construct
  misc_feature 1..614: note = Description of Artificial Sequence: Synthetic polynucleotide
  source 1..614: mol_type = other DNA
atyggtyggggttgttgtygtygggggtttgggttttttagttagttgtggattaaayggtttttttttatttaaattaattgygttaygygtaggyggygtaygggttgggtttgggaatggggatygygaggttttagtatttygatgttttgaaagttttttygtttyggggatttgtttttgtgttgtagttggtaggggtygtttgaagtgggagtagygtttggagaaggygggaggagttyggttygggggaygggyggygggatagygggatttyggyggygyggtgygttttagggygtagyggyggtygtagatygagtttygggygyggtaagaggyggygggagtyggtggyggttyggtattatgygtygagggygtttgttggagatygttttgggatttatygtgtttttagygttttataygagttatggggyggaygttaatttggaggttgggaaygtgaaggaaattagagttagtygggttaagagaagaggyggtggaggataygaygygtttaaagggtaaaggaatyggtttttttttttggtgtgggttttttaagttttaagatttagaataaygggtaggatgatttt

SEQ ID NO: 4593 - DNA, 201 bp, synthetic construct
  misc_feature 1..201: note = Description of Artificial Sequence: Synthetic polynucleotide
  source 1..201: mol_type = other DNA
agatgtattttagtttagygatttttattggyggaattttygygtttatygygygtygygttaagatggtttaggttatttttattgttttttygttagygttttttagttttttatatttgttttgtatatatattggtttgtagaggggattygtttygaatygttygggagtggggtttgagttyggagttggtgttt

SEQ ID NO: 4594 - DNA, 201 bp, synthetic construct
  misc_feature 1..201: note = Description of Artificial Sequence: Synthetic polynucleotide
  source 1..201: mol_type = other DNA
gttttgttttttttataagaggttaagtygatattaygygagtgtgtaygygttggggattgagttttygaagygaagttttgtyggaggagttttaggygggagtgggaayggttgggygtggggttagtaayggygttattyggtagggtggggggagttaggtttgttagagttagagygygttatygtygtygygag

SEQ ID NO: 4595 - DNA, 201 bp, synthetic construct
  misc_feature 1..201: note = Description of Artificial Sequence: Synthetic polynucleotide
  source 1..201: mol_type = other DNA
gtattgyggagtagygaggtagygygtaagtaagttagggtaggggtygggggtaggggygggggttggagttatggttaggggtggttgtttaggtygygtgagttgttttttttattygtatttggtygttaggttattyggttattagaagtttttatttatattttgttttttatttggatygtyggttggttgtaa

SEQ ID NO: 4596 - DNA, 201 bp, synthetic construct
  misc_feature 1..201: note = Description of Artificial Sequence: Synthetic polynucleotide
  source 1..201: mol_type = other DNA
ggggatyggtygtagggyggggttttttttggyggtgagtgagygagatygttaggttgaagtatygggagattgttttggtagtttttggtygttattygygtygtaataaaagtttttygyggtttttygtttagttagtttygtattgattggtygtygtgggagggattygagttggttggaggyggyggtygagyg

SEQ ID NO: 4597 - DNA, 201 bp, synthetic construct
  misc_feature 1..201: note = Description of Artificial Sequence: Synthetic polynucleotide
  source 1..201: mol_type = other DNA
aagtttyggygygyggygttygttgggyggtgygttttttttyggttttttatttatygtagtygagtygggtattgtggggtgggtgtgygtgtttgtyggggggtgtgtgtttgtgtyggggaggggtgttgttggggaattgttgtttttygtattayggyggtagygatagtatygttyggtagttygtagtattyg

SEQ ID NO: 4598 - DNA, 261 bp, synthetic construct
  misc_feature 1..261: note = Description of Artificial Sequence: Synthetic polynucleotide
  source 1..261: mol_type = other DNA
gygttyggtttaagtayggtgygagygtttyggggaggyggygagygagtyggtgyggagygtttygtgygttygggtggtttygygggtyggygggatygtgygtattttaagygygtgygggagtgtgygaggygttgtgygagttagyggygggygygttagggtgggaaaggtatttygaaygtattaggtgtagagatyggtatttatygagagyggtygggagygtayggygagtttyggtgttatygtyggttt

SEQ ID NO: 4599 - DNA, 201 bp, synthetic construct
  misc_feature 1..201: note = Description of Artificial Sequence: Synthetic polynucleotide
  source 1..201: mol_type = other DNA
gtttgggttttaggttatygtagaggaygtgttttygggygygtagatggygggagatgaggyggtygaatttygygtttttgygtggtggagtatataygttttaataagtttagygttatttgtttagttttttaatttttttttttttygtttyggggyggtttttttttttttttgttttggttgttgttttggtyg

SEQ ID NO: 4600 - DNA, 201 bp, synthetic construct
  misc_feature 1..201: note = Description of Artificial Sequence: Synthetic polynucleotide
  source 1..201: mol_type = other DNA
ggtttaygtattgttygtyggtttaygygggagtttygaggggygaggyggaggttgggygtagtttttgtagttagtagttattttygygygtttygtygyggtttagttaattatttgttgyggyggyggtygtgttttttagggtgtattagtattttygtygygggygttgttttygyggygtyggtatygatgttc

SEQ ID NO: 4601 - DNA, 201 bp, synthetic construct
  misc_feature 1..201: note = Description of Artificial Sequence: Synthetic polynucleotide
  source 1..201: mol_type = other DNA
taggtagtttygygtggyggyggtygggatagttgggygygttggtaggagagtaggtatagygttttttataggtaggatgaygygggtttygtagttygtttttttaygttgtttygtattattgtttyggttttgaygtgygtgygatagatttatygtaaatagtttttagygggagtaygaggtygggataggagg

SEQ ID NO: 4602 - DNA, 201 bp, synthetic construct
  misc_feature 1..201: note = Description of Artificial Sequence: Synthetic polynucleotide
  source 1..201: mol_type = other DNA
atatagttttaagggattgagyggttyggaygggatttgaaatttttggaggattagttaygttygtatagttygtttatgygygttggtattaggattygtaggttgttagyggygagttttygtygyggttttttagggtattttyggagaagggggyggttttgaggaattttttgtatttyggatgttttatttttt

SEQ ID NO: 4603 - DNA, 219 bp, synthetic construct
  misc_feature 1..219: note = Description of Artificial Sequence: Synthetic polynucleotide
  source 1..219: mol_type = other DNA
gtygtygttttttygggagtyggagtygtygtttttttagtgggtgtagtyggggtttygaygggggtygggyggttatyggggttggagttgyggttayggaggtttttgygtttgygtygygtygagggtagggatagggattggggtgaggggttgtttyggaaygtttatagttggygttggtttttttttgtttgatagttttttggttygggg

SEQ ID NO: 4604 - DNA, 268 bp, synthetic construct
  misc_feature 1..268: note = Description of Artificial Sequence: Synthetic polynucleotide
  source 1..268: mol_type = other DNA
ttagtygtyggygaggttattygggaggggygggagtygtttgttagttattyggtagtttttttggggtttttttygygygttygtttgtttttttttygttgygttttttygtttgttggygtttttgttttagygggattyggtagttaggggttttagggggyggtgtagtaaatttttagyggtttgygtttagtagattaggttggggagtyggtttggygttgtagggaggtagagagygggaggaagaggtagtggtagg

SEQ ID NO: 4605 - DNA, 201 bp, synthetic construct
  misc_feature 1..201: note = Description of Artificial Sequence: Synthetic polynucleotide
  source 1..201: mol_type = other DNA
ggttgttttygggygtattttgyggttygggtatttgtagggygggtagyggtyggttttttattatgttggtygtyggtatgggggtygtygtttttgygttttttttgagtttttygttagyggtttggttygygtttttttttggttgttttttattttyggtttygyggtatattttttaattttggggtygaagga

SEQ ID NO: 4606 - DNA, 517 bp, synthetic construct
  misc_feature 1..517: note = Description of Artificial Sequence: Synthetic polynucleotide
  source 1..517: mol_type = other DNA
tagygtttattgtyggggaagattyggaygaaaatygaggtaaattaattattaaaaagtgtatttaataagaatttttttatttaggtttttygttgtygagaygyggtagatttttagagyggtttatttatttatygaagyggattttgggyggtttygggttgattygygttgttagggygyggattttatttygggygtattgttaggagaaggggtttttyggggyggygygtttygattttgggttttyggtgttygtagagggyggagattygyggygttttaggttatttattygtattttttygagttaaatttttagygtttattyggattygayggtttaagtattgatttttaggtaagagtygttttttttggtttttagggaattgatattatygygggaygttttttttaggatagttagtaggttttaggagygtagtaygtaatagygtagagtagatttagatttttttyggggtgagattyggaggttygygttttg

SEQ ID NO: 4607 - DNA, 226 bp, synthetic construct
  misc_feature 1..226: note = Description of Artificial Sequence: Synthetic polynucleotide
  source 1..226: mol_type = other DNA
ygtyggggggttttgtttttygggaggagaaggaatyggtygttttygtttttttttttttttaggygttttygggagggggtygttgggyggyggaatygygttttygttyggggagttattaygyggttttttygyggaattttgaygttatttataygtgggggaaggggttgggagagtaagaggaagyggygggggagggggtygyggttgggagagygyg

SEQ ID NO: 4608 - DNA, 201 bp, synthetic construct
  misc_feature 1..201: note = Description of Artificial Sequence: Synthetic polynucleotide
  source 1..201: mol_type = other DNA
atttyggaggtagagatgagagygttttaaaattttttttttttattttaattttygaggagtaggtgggtgtatagtgtyggyggyggyggggaygygyggygyggagtttggttttgggaggtagtggtygttttagtagtygaatttttygyggttttagttttygygtttagtagttygyggttygtttttyggaaa

SEQ ID NO: 4609 - DNA, 212 bp, synthetic construct
  misc_feature 1..212: note = Description of Artificial Sequence: Synthetic polynucleotide
  source 1..212: mol_type = other DNA
tgygtagtggggyggaggaggtggygatggtygggggaggyggggggattgttgtttatttgtagttgggttaatttygyggygtaggyggyggyggagygyggggagttygyggygggtttagttgtygtagtattatgttygagttttttttygggtagaygtygygygtygtyggggtttyggtaggggaggatgttagaygttyggga

SEQ ID NO: 4610 - DNA, 388 bp, synthetic construct
  misc_feature 1..388: note = Description of Artificial Sequence: Synthetic polynucleotide
  source 1..388: mol_type = other DNA
ggtagtygtagttttttygygygttttttttttttttaygtttttygttttygttatggggttaaygtggggtttttaagagttgtyggtttttagyggygtaatttttagttaaagttatygygggyggattatggtttagggygttagaggggttagaggtaygggaagaggaaaagayggttaattgggaaaaaaagagaaaaygaaagaaaagttaaaygatgagtttttataaggaggayggagtgaatagtttgtgttagaaggttttgtatatygttatygagttgtgtttygtyggttaggtggagtgggagaagtgttygggtattttttttygggataggggtagttagggyggaagtagtataggtaatygggaggg

SEQ ID NO: 4611 - DNA, 201 bp, synthetic construct
  misc_feature 1..201: note = Description of Artificial Sequence: Synthetic polynucleotide
  source 1..201: mol_type = other DNA
tttttttttttttgttttttaagataygygttygaaatygaggggtgagagtaaagatygtttattaatttagtattttggatttagagtttttaatttygaaaggaggttggtattgttygggttatygagagagggagggagaagagttgaggttgtaayggtttttgggttttttagatygggtttggtatttaggag

SEQ ID NO: 4612 - DNA, 201 bp, synthetic construct
  misc_feature 1..201: note = Description of Artificial Sequence: Synthetic polynucleotide
  source 1..201: mol_type = other DNA
ttattttttttggaagtttattagttgtttaagtgataattaatatyggagagttagggttygtttaataggagtaygyggagatattttagaygatagygygttttttttatttttatttygtttttygggygttttaggttagygtttattagattttaygtttgggggattgtttgggttttagygagagtgttaygg

SEQ ID NO: 4613 - DNA, 212 bp, synthetic construct
  misc_feature 1..212: note = Description of Artificial Sequence: Synthetic polynucleotide
  source 1..212: mol_type = other DNA
aggtgtagagatagtggagatgaggttttgatgttyggttttggttttaygygggtagygttagttggtyggtgttayggagttttygygtttttygttygtttagttttygyggatttatttattggggttgtttygtagygygatttttttttatttygggggagggttaagggyggyggtggggggyggggtgggggggaagyggyggg

SEQ ID NO: 4614 - DNA, 250 bp, synthetic construct
  misc_feature 1..250: note = Description of Artificial Sequence: Synthetic polynucleotide
  source 1..250: mol_type = other DNA
tttttygtgtttttygtagggtaggttatagttttttagattttygtttaggtggtaaagaagatggagttgggggtygygtttyggyggygyggggttygaaggygaggtygtttagttygtattttattttaygtayggtataygtygtygyggtttttgttaygtatattttygygttgtttygtttaygtgggygtyggggaggaggttygagagatgggaagaaaggttggtatttatttttttg

SEQ ID NO: 4615 - DNA, 488 bp, synthetic construct
  misc_feature 1..488: note = Description of Artificial Sequence: Synthetic polynucleotide
  source 1..488: mol_type = other DNA
ttgtaaatattggaggaaagttgygttgttttaattaaataygtttttttaaaatayggagatgyggggagtgggggttygggaaagaaatttttaaagyggtagtgtttttttaagaaggggtaaaaaaatttgtttatggttatttttttttygttttattttttttttttttgatagtttyggttttggttgttygagtygggggtgtgttttyggttttttttagatttgggyggggggygggaggagtgagygatttgggaagtttygggggtggagagggggygtttyggggtttgggggygaygtggatattttttttggagtayggyggtgygtttgggatttgaaggaagggtygaaggaagyggggtgygggygggygagttgttygttaagttgtttggygggygyggygaggggagatgygtaagtttgtagatygggggttyggagttyggygtttaggttggyggggggygtgt

SEQ ID NO: 4616 - DNA, 201 bp, synthetic construct
  misc_feature 1..201: note = Description of Artificial Sequence: Synthetic polynucleotide
  source 1..201: mol_type = other DNA
gtagagttgtagtttttgyggttttttttttttygttgtttagtygagttttgggtttttagtttaagtttttygtatygtygttgttgttgtygttatygtygtygtygtygygygttgttagagtygttttttygtttttttttttttttttyggtygggtttttttttttttttgtttttttttttttttttttagtt

SEQ ID NO: 4617 - DNA, 364 bp, synthetic construct
  misc_feature 1..364: note = Description of Artificial Sequence: Synthetic polynucleotide
  source 1..364: mol_type = other DNA
attgygtatgtgggtttggggtttgygygtatyggaggttgtaggygttggggagggtgtggggggttgtgygtggggttgtttttatyggaagttgtaygttttgggaagygtagaggygggggtgttgttygygttggggagtaygtgaggggatatttagggattgttygygygaatggtttttaaygtatgygttttattttatattttatagtygttatgaygatygggaggttygtaayggttgyggggataagttygttgaggttgttaggygagttaggtttttttggatttygtttgattyggttgggttgtgtttgaaattgatttagttttattatattttttgattatgaga

SEQ ID NO: 4618 - DNA, 220 bp, synthetic construct
  misc_feature 1..220: note = Description of Artificial Sequence: Synthetic polynucleotide
  source 1..220: mol_type = other DNA
gtgtaattttttggttaaaatgttatagttaagattaaattygaagaaaagaatgaaattaygggaagttttttagatagtygtygtaaggttatgggtygaagtggtgtaggggyggygttyggggaagygattggtagagttgtgygtattgggggtgttgtaggygttggggagagtgtggagaggttgygtggagttgygygttyggggtgggggt

SEQ ID NO: 4619 - DNA, 201 bp, synthetic construct
  misc_feature 1..201: note = Description of Artificial Sequence: Synthetic polynucleotide
  source 1..201: mol_type = other DNA
gyggttgagttygyggagttgggtgagtgtttgyggttgatyggttygtgggagtagggagygtatagtyggttggtgttggagggttayggggatttayggggtatygygggagtygtygagygtagggaagttagtaggtatttgtagtgyggagtttgtaaggttgaggtaggagatygttygaggyggggagggygg

SEQ ID NO: 4620 - DNA, 201 bp, synthetic construct
  misc_feature 1..201: note = Description of Artificial Sequence: Synthetic polynucleotide
  source 1..201: mol_type = other DNA
tttgagggttygggtagttattygtattttttygttaygyggagaaagtygagtatataggtygtagggtgggggttygyggggagagggtggaagtagygggtttttygygtttggggtggtygttgttttatttaggttttygtttgttttttatttttttagattaatygttttttgtaggtgttaaygyggtgtttc

SEQ ID NO: 4621 - DNA, 201 bp, synthetic construct
  misc_feature 1..201: note = Description of Artificial Sequence: Synthetic polynucleotide
  source 1..201: mol_type = other DNA
gttttagtttttatttgtttaggtgttttyggygttttggygaattyggttattttagttttttaygtggtgagtatttagggtagygggtygatttttygaggttttatatttgggtttgaggggygyggttygtagyggygggtgtaggggygattgttagtttttatttygtttyggggtgygttyggaggtygatat

SEQ ID NO: 4622 - DNA, 358 bp, synthetic construct
  misc_feature 1..358: note = Description of Artificial Sequence: Synthetic polynucleotide
  source 1..358: mol_type = other DNA
atttagggttattgtagtttyggggtatttyggaggttaygattygygagtagatgtttyggaagaggttttttatgtaggttgttaggtagatggyggygtgttygtggatgygtagygttaygyggttgtttattatttagygatataygyggtttayggagaaggtgaggtygtagygggtygatttgtygyggtttaggyggtygtygtyggygttgtttatgttgtagagggatagtgyggttagygtagtygtygtatagtgygyggttaggttttaggatagtaygatttttatggygttttggatttygtatttggtgtatttggygaagygtaggtttaggygttgygt

SEQ ID NO: 4623 - DNA, 201 bp, synthetic construct
  misc_feature 1..201: note = Description of Artificial Sequence: Synthetic polynucleotide
  source 1..201: mol_type = other DNA
agygtttttttatggtygyggtagttaatygatgattgaatygaataaagagtagyggygagattaatttttaatatttatygatgggtagygggyggtygagtttyggygagtttyggtagtygtygttygtygttttagggygttygtttgttygttyggggatttttttaatgygtttagggygygttygggggtttt

SEQ ID NO: 4624 - DNA, 328 bp, synthetic construct
  misc_feature 1..328: note = Description of Artificial Sequence: Synthetic polynucleotide
  source 1..328: mol_type = other DNA
ttttttagtttygttggtttgggagtygggagtttyggaggagtttttygttaagtttttttggttaygagygygtttggttttggtttgggagtagatygtgygttygagtggggtatttgttygaggtyggggattgtgaatygaaagattttatttagttttgttgtttttttggtattgygatttgggggygggttattttatttttttgaatttygtttttygttttgtttatggaaggttgtaagtttttttggggttygggatttttttttatttttatttttygagtagagaaataggygatgttttttttttttttgyg

SEQ ID NO: 4625 - DNA, 201 bp, synthetic construct
  misc_feature 1..201: note = Description of Artificial Sequence: Synthetic polynucleotide
  source 1..201: mol_type = other DNA
gaggtgtgtgttggaggtgggtagtygtygyggaggttttagyggtaggtgygttttagtaggtagtagtagtygttattttgggtaagtagtaaatttygtataaatttyggagttattatgtttgttttttygttttatygtyggtttttttgttaggagtagtagaggatgtggtgaatgtatyggttttatygaayg

SEQ ID NO: 4626 - DNA, 319 bp, synthetic construct
  misc_feature 1..319: note = Description of Artificial Sequence: Synthetic polynucleotide
  source 1..319: mol_type = other DNA
gggygtatatataygtttatttagatatttygygygttttttygygtttttgtttgttygttygtygtygtttgtttttttttttttgttttygtyggtygttttttttttttttttttttttttttttttttttttttttttttttttttttttggtattatagagttgttttgaaaatagaagatagagggagtttyggagttygttatttttagygatttttatattgggaaaaaatatggagttagtttyggtagttttygatttygtygttagygagttaggtagtagyggygyggaygyggtygtyggtttta

SEQ ID NO: 4627 - DNA, 201 bp, synthetic construct
  misc_feature 1..201: note = Description of Artificial Sequence: Synthetic polynucleotide
  source 1..201: mol_type = other DNA
ttaagtttaattttaygtttttttyggtgttygattttgyggtygaatygtaattgygagtygtaggtaatggyggagtttttggtattgttagttgttygyggttgggggttygaggttgggagggtttygttttyggaatatygtttyggtttggtttttaattttgygaggagtttttttgygtttttttttygyggt

SEQ ID NO: 4628 - DNA, 370 bp, synthetic construct
  misc_feature 1..370: note = Description of Artificial Sequence: Synthetic polynucleotide
  source 1..370: mol_type = other DNA
ttggattttyggggtgygggtttttttttttgttttgttttttagtatttttggtaattgygtaaagttgtttgggttgtaatggtggggtgtagggggygttyggttgttgtatttgttagtgttgggtttaggttgagaggygatttttagtttttataataatgtttygggttttttggtttgggttttygtagygttygattgatygttagygataygaygagaaygaggatttgtyggaygtggaggagatygttagygttygyggttttagtttggaggagaagtttygtagttagttgtattagggggatttygtgtaygttatggagggtaaaggtgaggygtttttatttygggtygtttt

SEQ ID NO: 4629 - DNA, 201 bp, synthetic construct
  misc_feature 1..201: note = Description of Artificial Sequence: Synthetic polynucleotide
  source 1..201: mol_type = other DNA
ttttttygttttaggygtygttaagttttagtattatgygtttttttagatgttygaaagygtttttttagggtagtttatgtttttttgtgtttttttygygaygggtygggtttattattttatatttttygggtttttttatgtttattatygtgtgtttttttagtatttttttttttttttaagttttaatatagt

SEQ ID NO: 4630 - DNA, 201 bp, synthetic construct
  misc_feature 1..201: note = Description of Artificial Sequence: Synthetic polynucleotide
  source 1..201: mol_type = other DNA
gttgggygtaggggtygtygttygaggattatgggtgggttagygtttygtygggttgttagttggyggggatygtyggygtttgtgtygggtygygttygaggttgygtygttygtgtygtagyggttaatgyggtagtattygygaaygttatygyggygggtttygttggttygggttgyggygtgggggygggggat

SEQ ID NO: 4631 - DNA, 201 bp, synthetic construct
  misc_feature 1..201: note = Description of Artificial Sequence: Synthetic polynucleotide
  source 1..201: mol_type = other DNA
gtgtagygaygtttagttttygtgyggttagygygtygygtyggyggattttgtagtttagagagtttagggagtttagggaggggagyggggygygggyggggtagtgtygtataatygtaggygygtttygygtygttttygtttygggtttattttttttygtygygttttttttagtttatttayggaygagyggat

SEQ ID NO: 4632 - DNA, 263 bp, synthetic construct
  misc_feature 1..263: note = Description of Artificial Sequence: Synthetic polynucleotide
  source 1..263: mol_type = other DNA
gygyggtttygyggggattttgygggygggygggyggtygggygygygyggggygggggyggygygygygyggggagygtgtgggtygggygggygyggyggggaaagttgggygygygagtygaggttgttgtttatttgtagtygygtygtttatttgtygyggagtgygygtttygygttttttyggttygtttyggagttyggtygttttttttttgttatagygggtaattgygtygatatgygataygagtagttta

SEQ ID NO: 4633 - DNA, 201 bp, synthetic construct
  misc_feature 1..201: note = Description of Artificial Sequence: Synthetic polynucleotide
  source 1..201: mol_type = other DNA
ggygggagaggagtttyggtygygtggattttagtttgygyggtaattatygygttttgattttaggttyggttgtttagggaaggatagtttagggygygtttagygagttttagggggtayggaagtggttagggtagattttagggtgaataattaatattttatttattaattygttaaaaataaagaaaataaaat

SEQ ID NO: 4634 - DNA, 201 bp, synthetic construct
  misc_feature 1..201: note = Description of Artificial Sequence: Synthetic polynucleotide
  source 1..201: mol_type = other DNA
tgtyggggtygygttttygggttygygtygttagtatttttttaygygygttyggtttygggttattygttttygtyggttttygttttttttygtagtygtagggaagygagtttgggaggaagaagagggtaggtggggaggyggatgaggggtgggggattttttgaygttattagaaggaggtgtyggggtaggaag

SEQ ID NO: 4635 - DNA, 201 bp, synthetic construct
  misc_feature 1..201: note = Description of Artificial Sequence: Synthetic polynucleotide
  source 1..201: mol_type = other DNA
aggggttaggagyggygggatagygygggaagagtaggtaaggggagatagtyggattgygttttagtttttygtgttaagaatatygtygyggaggygyggttagttttttttggatyggatttttygtttttagggttaggyggyggagttttagttttgttttttttttagtttygggyggtttttagagttgagtaa

SEQ ID NO: 4636 - DNA, 201 bp, synthetic construct
  misc_feature 1..201: note = Description of Artificial Sequence: Synthetic polynucleotide
  source 1..201: mol_type = other DNA
ygggygtyggygtgaattygygtttttyggagtttagygtygtgtttttaggtttyggttttgattttagggygtttaggtggaatggtttygtagttgygygttgttttygygttttygttttgtttygyggaaatygttttygatagttaattygatygggygygyggygttttyggtyggttttygttygatttygyg

SEQ ID NO: 4637 - DNA, 215 bp, synthetic construct
  misc_feature 1..215: note = Description of Artificial Sequence: Synthetic polynucleotide
  source 1..215: mol_type = other DNA
gattttttygygtataygtatatgtataygttgygygtttttaygygtatatataygttttttttgtygygttygtygtygyggttattatygyggagtygagttttgyggagygggaatygaggtyggagyggggatyggaggtagtygagtygggggatgtyggttyggagyggagtygygygyggayggygygttygggayggtgagtgtgg

SEQ ID NO: 4638 - DNA, 201 bp, synthetic construct
  misc_feature 1..201: note = Description of Artificial Sequence: Synthetic polynucleotide
  source 1..201: mol_type = other DNA
tygygtaatttttgaagtggtyggttagggygyggttggtttagtygtygtaggygttttgtaggygttggggtaggttttagtggtatagggtgattaygggttgtaygtttagttttygtagtygttttagtaggygtyggtagtagygtagtttttygyggttggggaygttygygttgttattggggagtattygyg

SEQ ID NO: 4639 - DNA, 201 bp, synthetic construct
  misc_feature 1..201: note = Description of Artificial Sequence: Synthetic polynucleotide
  source 1..201: mol_type = other DNA
ggaygggagttgyggggagggyggtygggggatttygtagagttygtttygttygtagtygyggggygtygagggtagggygggygtttagtttggtttygtygtttygttygtagtttttygaaaggyggtygttttgttttggttagtttggttygattygggggygttgygtgygggyggtttyggggttgttggtat

SEQ ID NO: 4640 - DNA, 201 bp, synthetic construct
  misc_feature 1..201: note = Description of Artificial Sequence: Synthetic polynucleotide
  source 1..201: mol_type = other DNA
aatttaatatttttttttttttttttggagttattttttttttyggaatatgtaagttttgggtggtttagttttgtygttagatttagtttttaagtgygggggaaggagatgggygtttttagtygygattttttgggaaggtggttatttatttgygttttgaaatagaagaatagggygaygttgtagataatttgg

SEQ ID NO: 4641 - DNA, 217 bp, synthetic construct
  misc_feature 1..217: note = Description of Artificial Sequence: Synthetic polynucleotide
  source 1..217: mol_type = other DNA
attggttgaagtttttttagygatttgtatgaatygagagggagtgttttttgtygttttttttttaagagygttttgattgtagttttttagggaatgygyggtygagggaatgygygtagtttataggttttgggagtgagttggtgttyggygatttggtattygygtttggatatggggygtttatatygttttaggagtagtattagttata

SEQ ID NO: 4642 - DNA, 317 bp, synthetic construct
  misc_feature 1..317: note = Description of Artificial Sequence: Synthetic polynucleotide
  source 1..317: mol_type = other DNA
agtaaaagtttttatttgtagtatygggtatgttgttygtttaaygygtttyggggatttgttggttygtgtttttaatttaggggtggttataygtttygygtttttgtttttgggtagatttttttatttgtgtattttggtttttttatttagtaaagagatgtgygaagtgtgygtttggagaygagtygtttyggtgatttttattygttygtagyggtggttttggtttttyggattygygttygygttttgygggtttttygygtygtttttgttygtyggattattygggtttagagggtygttygttt

SEQ ID NO: 4643 - DNA, 201 bp, synthetic construct
  misc_feature 1..201: note = Description of Artificial Sequence: Synthetic polynucleotide
  source 1..201: mol_type = other DNA
gaggggaggtayggagygggaggagggggaygyggagaagattgtttggtttygtyggtttygttaaygtgayggttagtttygtygagygttygtattygtttatatttatgattattygtatattygttttaataygtgttaaggygygatygyggggtttttggtagttttygttgtatttttttttttataggggta

SEQ ID NO: 4644 - DNA, 201 bp, synthetic construct
  misc_feature 1..201: note = Description of Artificial Sequence: Synthetic polynucleotide
  source 1..201: mol_type = other DNA
tygtttaatayggagaygyggagttttatagyggtggtagaaagtgagtattaatttagtaatagggggaaggaaggggaygtygggyggttagtgggaygtgyggtagtygagggttgtagtttgtttttgtagygygttygygtttatttgygattttttggtaggggatgttygttaggttgaattttttggtatygt

SEQ ID NO: 4645 - DNA, 201 bp, synthetic construct
  misc_feature 1..201: note = Description of Artificial Sequence: Synthetic polynucleotide
  source 1..201: mol_type = other DNA
tagtygggtygagygygttgtttgagttgagtygtygtaggtgaggggttygygttttygttygttttgggygtygygtttggtattgattttgtyggtygtttattgtygtygtygtygtygttygygggtattatgatagttttgagygttggggttataggttggttatygtygtyggtgttygggaggttgyggygc

SEQ ID NO: 4646 - DNA, 201 bp, synthetic construct
  misc_feature 1..201: note = Description of Artificial Sequence: Synthetic polynucleotide
  source 1..201: mol_type = other DNA
agtgtgattgatgtatttattatttaataatttyggggtgaaatttgaggtgaayggttttatttttttatatttaggaatggaattagttttyggtatygtgtatagtttgattttaygttygtaygttgggttttyggttttttggtagtgtatttaagtgtatttygygtgtgttyggyggattttygtgtatatygt

SEQ ID NO: 4647 - DNA, 201 bp, synthetic construct
  misc_feature 1..201: note = Description of Artificial Sequence: Synthetic polynucleotide
  source 1..201: mol_type = other DNA
gygtagttttatttyggatggtttttgttttttygygggttygagggygttggaaatttagyggyggygaagyggagaggagtttygygygttttygttygtayggttttaggtttggggtttgygttggagtygygyggggagaggtygtttttgygatygtygygttygttttygatygttygggttygyggttagttc

SEQ ID NO: 4648 - DNA, 221 bp, synthetic construct
  misc_feature 1..221: note = Description of Artificial Sequence: Synthetic polynucleotide
  source 1..221: mol_type = other DNA
agtttaggtttgygtttataygygyggygtttataygygyggygtttatttggttgtagtttyggttagggttagygygtygyggttgaagggggygttyggatttttttggggyggygygtagtygggatagtttygtatgaygttygygttttagyggtttygggaygyggttttatttttaatttttggyggttttagtttyggtttttgtgtttygg

SEQ ID NO: 4649 - DNA, 311 bp, synthetic construct
  misc_feature 1..311: note = Description of Artificial Sequence: Synthetic polynucleotide
  source 1..311: mol_type = other DNA
gtttygtttygtattygtatatatttttttygtygttgttttgagygtagygataagggtttttatattttygyggttygtaatgtttyggggttaagtygaggtagggaggygttttygtagtttttgattttataattygygygygtgtgtatygagtygygggtatatygygaatatatatatatatatatatattygtgygttttygtttttygttyggttygggtttttygaatttattttygaggygtttygggygtagggttygtttttttttgygggtttttagyggttgttyggtagtggtt

SEQ ID NO: 4650 - DNA, 308 bp, synthetic construct
  misc_feature 1..308: note = Description of Artificial Sequence: Synthetic polynucleotide
  source 1..308: mol_type = other DNA
ggtggygggtagtgtggtgatggtttttgaggaggtttgttyggagygtatygatttgatttataaaaattatyggaaattttgtaatttgttgatygaygtggaggagtggggttaggtggttattattagtatgtttattygttaygttygtaygtagtttttgagttttatttagaaygtaagtgggtttagtttaggtagagygggtygaagtgtgtttyggggaggygtttatagattygtyggttttttygtttaggaatttttattagaggagaaygyggaaaaagttttttayggtttag

SEQ ID NO: 4651 - DNA, 201 bp, synthetic construct
  misc_feature 1..201: note = Description of Artificial Sequence: Synthetic polynucleotide
  source 1..201: mol_type = other DNA
ygagaattttgygggtttagaaygttygygyggaygttttttttayggygtyggaagtyggygtygagtttgttatygggtatttttttgttgttttgaygayggygggygttgtaagagtggagaagttgtaggtgttgaggygyggtgaaagaaattttgggagttaagagtaygaggagttggtgtttgtgttatatt

SEQ ID NO: 4652 - DNA, 201 bp, synthetic construct
  misc_feature 1..201: note = Description of Artificial Sequence: Synthetic polynucleotide
  source 1..201: mol_type = other DNA
aggtgatttyggttttggygaggygygattyggttatgygtgtgtgtgttttttttyggagaggatttyggtygtygagggtaygyggggtttagttatygttygttttttaattagttgttggttygtttygatggtgtaaattgtttttttttgttttttattaaatagtaatagtttggttaygtttaagtggaataa

SEQ ID NO: 4653 - DNA, 201 bp, synthetic construct
  misc_feature 1..201: note = Description of Artificial Sequence: Synthetic polynucleotide
  source 1..201: mol_type = other DNA
gggatttggtgattttagtattattttttttttttttttttttttttttgtttttttatygtttgttgtaattttgtaaagtttyggagtyggagagygygtttygtttttagagttttyggattyggygagttagygatygtygagtyggttattatgttyggtagatygygttattaggygtttttygyggtttttatt

SEQ ID NO: 4654 - DNA, 630 bp, synthetic construct
  misc_feature 1..630: note = Description of Artificial Sequence: Synthetic polynucleotide
  source 1..630: mol_type = other DNA
agtttttttttgttattyggagtagagygygttagygygaggtygggtyggtygtttgygtagygtygggttaattttaattgttgattatatttttagygtgtttttttataggttttatttgtaattgagaygaatgattatagtggggygggaaggagtagttgtttattaattaatttttaattaaaagtgtttttygttttygggtgattaaagagaaatatygttygttgggygatattgattyggatggaatttatttgttaaygttyggaggaatggttttttygtttatygygyggtygggattgttttggtttttttyggtttgagtygtyggygagtgatyggygagtttgyggttaggtygggttgygygaggtggggttgaygttagagtttttttygttttaagtygygtatatttgatttgaygggttygygygattygtttttttttttttttttttygtaaaatatgtatttttgtygtygttgygaggtygttyggttttagagttttttygagttttyggaatgygaagttaaaggaatygyggyggttatygttgtttattttgttattyggttagaaaagtttgyggagygyggggatggattaatygg

SEQ ID NO: 4655 - DNA, 201 bp, synthetic construct
  misc_feature 1..201: note = Description of Artificial Sequence: Synthetic polynucleotide
  source 1..201: mol_type = other DNA
gagggyggggygggyggyggtygygtttttaatttyggygttgygtgtgggagyggtyggattagggaattagygttgtaatttyggattagtaaygttygttaaatgagtgtttaatttygattttttatgttttttagygtygyggttgagttttaggaggttttttggttaggtttttttygygttttggttttattt

SEQ ID NO: 4656 - DNA, 239 bp, synthetic construct
  misc_feature 1..239: note = Description of Artificial Sequence: Synthetic polynucleotide
  source 1..239: mol_type = other DNA
ttygtgaatttygttyggggatattttatagtagtygygtttttatttttttttttttaaatygtttygggtttttgtygtygttattttttgttaaatygtttttatttttttagyggagttatagyggggygyggygtatataaagggggtyggagggtggagagtatagaaggagggagagatttygttagggttygtggtaygggtttgggagtagttatttattygattttttt

SEQ ID NO: 4657 - DNA, 201 bp, synthetic construct
  misc_feature 1..201: note = Description of Artificial Sequence: Synthetic polynucleotide
  source 1..201: mol_type = other DNA
gaygttagtygygygggtttttygagttygygtygygtttagggatttggttygttttttgygtttttatttttttattttttttagaaatatagtaygygggttttttttatgtaggttattttttayggagttttaggttagttttggggyggtgaaaygaaggtgttaaggtatagtattttttygggaggttggata

SEQ ID NO: 4658 - DNA, 221 bp, synthetic construct
  misc_feature 1..221: note = Description of Artificial Sequence: Synthetic polynucleotide
  source 1..221: mol_type = other DNA
tagttgttaatttygygygyggagtttttyggyggtgtagtttygtttyggyggygygggyggtatgaagattagtygtygyggtygagygtttttggtygtggttttgaatttgttggygttgttgttygttattatygttttttttattaygtattggtgttagggtaygtagygggtttttaagtygggttgyggttagggygggygygttaattgtt

SEQ ID NO: 4659 - DNA, 201 bp, synthetic construct
  misc_feature 1..201: note = Description of Artificial Sequence: Synthetic polynucleotide
  source 1..201: mol_type = other DNA
gyggggaggggatggggtggygggagaattgtttttttttttagttataaatttattaggtttttaaattttttttggattttttttttygygttttygygagttygggatttaggggatggagaattyggggyggaggagygtygagttaggygggagggaggtygagtygtgggygggaggyggatyggygtggggttg

SEQ ID NO: 4660 - DNA, 246 bp, synthetic construct
  misc_feature 1..246: note = Description of Artificial Sequence: Synthetic polynucleotide
  source 1..246: mol_type = other DNA
gtttygggggtttttagttaagtatygtttggtgttttyggtttagggtygtgtgagtyggaggttgagtttaygtaaggtttttatttgtatagattaygagttggagaattatagtatgtattgygtgtaatgtaagatgttygtgtgttattagtgtttggaggagggtaaatattttagttaygaagttaaggttttgggggttatgtggaaattatataaggtgagttttaagaaaattta

SEQ ID NO: 4661 - DNA, 223 bp, synthetic construct
  misc_feature 1..223: note = Description of Artificial Sequence: Synthetic polynucleotide
  source 1..223: mol_type = other DNA
tygattatgattatttggatttggataagatgagtttatatagygaggyggatagyggttatggtttttayggggggttygttagygtttttattatttygtgttagaagttttttaayggygttygygtgtttttttyggttatgtygttatyggttatttatttgttatyggttttggtttyggtgtttygtaatttttgtattatttgtttttagtgtta

SEQ ID NO: 4662 - DNA, 201 bp, synthetic construct
  misc_feature 1..201: note = Description of Artificial Sequence: Synthetic polynucleotide
  source 1..201: mol_type = other DNA
ttagggtayggygttagyggatttayggagaaggagaaaagttttattgtygtgtagaagtttaggttygggtgagaygtttgygaaggttgttagtagyggaagagaaggggygtttttygtgttgygtagtattygttygyggtaggtgggygyggagtttagagttgggagttaaaygtaaaygttggygagaagttt

SEQ ID NO: 4663 - DNA, 244 bp, synthetic construct
  misc_feature 1..244: note = Description of Artificial Sequence: Synthetic polynucleotide
  source 1..244: mol_type = other DNA
gtttygttgttttagyggtygttgttttagaaaagttaaygagaattagatgtggtggttattgtygaatttttttagagtyggtgattggtttttagtygagggttttagttaattagtttgttgggtgggtttggagtttygtttygtttaggygttygyggagatttaggttygaggttggygyggygyggagagtgggttggaggtyggggygggaygygttgtgtagygggtaagygta

SEQ ID NO: 4664 - DNA, 201 bp, synthetic construct
  misc_feature 1..201: note = Description of Artificial Sequence: Synthetic polynucleotide
  source 1..201: mol_type = other DNA
tttgttyggttygttgaaggttggttttgggtttgggggtagtgttygygaagggttgygatggtaggtttygttgttatayggtatygagggttttttygtttyggygttaggygtaygtttttttgttatatttttygyggggygygtygttagggttatttgtttttttaagtttygttaggtagttaagggtgagga

SEQ ID NO: 4665 - DNA, 457 bp, synthetic construct
  misc_feature 1..457: note = Description of Artificial Sequence: Synthetic polynucleotide
  source 1..457: mol_type = other DNA
ttgagggaggggtygggttttygggtttgtagattygttatygygygtgygtatgygtyggtygygagttttygggtgtaggtttgggyggtttyggttygygtatttgtttaggygttgyggtttagygygttttaatttttagttygggyggagagygggggygggattgaagtatygtgttttttaaagtattttttygtygtyggtagttttggtttygtaaatgttttagygygtttaggygtaygtagagattggygyggtagttttygggttaayggtaygygagtaaagttggttggygatttgggataygtagtagaagttgaggttgtatygattttygtygtttygggggaggtatgggttygggtaggtttaggaggaagttgtatagttygaggttygggygggagtggygggtygygggtaagggaaygtatatttggaaggg

SEQ ID NO: 4666 - DNA, 244 bp, synthetic construct
  misc_feature 1..244: note = Description of Artificial Sequence: Synthetic polynucleotide
  source 1..244: mol_type = other DNA
gygttttttttgygygyggygaggtygagaygtttttygyggtgatagygtgtaaggyggagattyggygygtttttagtttagggaaagtttaggygaygygatygtaagttygagtttaggtttttyggagtygttagggygygtygggttgtttgtttttttgtttttttttgtaggaatttttygtygttygyggtygggatttygggtttttttygggygtagattttagttatygttt

SEQ ID NO: 4667 - DNA, 206 bp, synthetic construct
  misc_feature 1..206: note = Description of Artificial Sequence: Synthetic polynucleotide
  source 1..206: mol_type = other DNA
gagygtagyggyggggtatggaagaagagggttgggggygygygttatttgtaaaggttttygaggtttttttttagttttggtggtaatttygtttagygtygygtttttttttagatttaaatttttgttgggtttttygggtggyggyggyggygayggyggyggttgttggagttaagttttgtygttygtagygtyggggc

SEQ ID NO: 4668 - DNA, 203 bp, synthetic construct
  misc_feature 1..203: note = Description of Artificial Sequence: Synthetic polynucleotide
  source 1..203: mol_type = other DNA
agagagatagtatgagaaygygtagagttgtatttygygggggtygggygttagtagtatygygttgttttatttayggygygtttgtttttygygttgygygtttagyggggygtygagttttagaaattttagtatatggtyggttyggyggttayggtggtygtagttgttttgtttttygagygttttttattgttttt

SEQ ID NO: 4669 - DNA, 266 bp, synthetic construct
  misc_feature 1..266: note = Description of Artificial Sequence: Synthetic polynucleotide
  source 1..266: mol_type = other DNA
ygtgattatttttygttttattttyggggyggggttygttagaaattttaagygttygtaatygttttttttygtgggygggatggggaaattgaggttygaggtygtttygttggttggtgtaagaattagtttgtaatttaagttttgagttgttggygtttygtttygtgtagttgaatttaatttattyggggttgtgggtagygtttttttggggttgataygttatttygagtttgaggattaagatyggagtgatttgg

SEQ ID NO: 4670 - DNA, 242 bp, synthetic construct
  misc_feature 1..242: note = Description of Artificial Sequence: Synthetic polynucleotide
  source 1..242: mol_type = other DNA
ttygaatttttttaaatttggyggttyggggygygtgggggggaygtttygttatttgygyggttataaaggagagatttatggtgtygttgtagttagygttygagttttygttgttgtygttgtygttgygggttagtygtttgtatagttggyggggatygggttgagtagygagygttyggagatygtayggygtattyggttgtttttgggtttttggttttagatttttattaggc

SEQ ID NO: 4671 - DNA, 201 bp, synthetic construct
  misc_feature 1..201: note = Description of Artificial Sequence: Synthetic polynucleotide
  source 1..201: mol_type = other DNA
taaagtaaaataggataaaygatygyggygygtygaygtttggygggttayggttataaagygggttttagagttttttttaggyggyggtaaagggggygttygaggttatyggtaagagatagattattggygtttygggaaaatagagtggggaagggygagattgtgtgtttatttaygttygygygggtttgagtt

SEQ ID NO: 4672 - DNA, 201 bp, synthetic construct
  misc_feature 1..201: note = Description of Artificial Sequence: Synthetic polynucleotide
  source 1..201: mol_type = other DNA
aygttggygaatgattatggaaataatatttaatagtagtgttttttatgttaggtatataatygttttggygtgggttgataattatgtttattttatygygtggtattgagtygatygtatatttagggtttyggtttttagggttygtttattygtttattgygtgaagtatttattttygtaggagtyggagtagga

SEQ ID NO: 4673 - DNA, 312 bp, synthetic construct
  misc_feature 1..312: note = Description of Artificial Sequence: Synthetic polynucleotide
  source 1..312: mol_type = other DNA
tggtygtttttttygyggttaggygtattttgtagygtttagatygtygygtttttattygygtttttaatygygagygttygtttgggtygggtygggygttygagattygggagagattaggggttygtaaagtagaagagtagatttagaaagaaaaaaaaaaaagygagaagtgygagaaaaatatattgaatttagttaaatatayggtagatgaaaaaaatattttgtttagaagttaaaaaygagttttygagtygtgagatattgttgygttttygttaggygtgtaggtyggatgttaggggg

SEQ ID NO: 4674 - DNA, 203 bp, synthetic construct
  misc_feature 1..203: note = Description of Artificial Sequence: Synthetic polynucleotide
  source 1..203: mol_type = other DNA
gygttggtagggggaggtttyggtaaygtttgggggttttaggttagtttttttygggttggaaggtatygtataggggttttygttaatttyggttttygygyggtygggatayggttatatttgttygygggggtttgttttttaggtygtygtaggtttttyggagtttaagaggattttataagtagttaaagttagyg

SEQ ID NO: 4675 - DNA, 201 bp, synthetic construct
  misc_feature 1..201: note = Description of Artificial Sequence: Synthetic polynucleotide
  source 1..201: mol_type = other DNA
tttyggggygggyggygaggggygggagtttagagagtgtttygtttttgtttagtgttgggyggygygtggggggggtagggttttygtttttttaygyggtttygygtattttaaggattttaatttgttaggtgagtttttgtttyggggaggggygttgggggyggyggygaggatttagttgygygygygtatgyg

SEQ ID NO: 4676 - DNA, 283 bp, synthetic construct
  misc_feature 1..283: note = Description of Artificial Sequence: Synthetic polynucleotide
  source 1..283: mol_type = other DNA
gtggtaaggtttggggattgagaggttyggtgagtgttagtttygtaggttgygtyggtgttyggtttttattttagttygggggttttaggtttttygygggttttggggygttggtgttygygtagttttagtygttttygtagttatygtygttyggtttygyggaggyggygygtagygggggygttygggygttgtttttttgaggtttygggggtttagggtggttygtagtgttattggttagggtttgygatttttggggttygtygtygtygtt

SEQ ID NO: 4677 - DNA, 201 bp, synthetic construct
  misc_feature 1..201: note = Description of Artificial Sequence: Synthetic polynucleotide
  source 1..201: mol_type = other DNA
gaaygttttttagttyggtttggtattggygtyggtgttttttattttggttattayggtttttagggatttgtgggaggattatagtygttatygtttygattataagattaattatttgggttgtttggtttttagtaggtgagttgggygggygggygagygagygygyggtggygtagggtagggygtttygggaat

SEQ ID NO: 4678 - DNA, 247 bp, synthetic construct
  misc_feature 1..247: note = Description of Artificial Sequence: Synthetic polynucleotide
  source 1..247: mol_type = other DNA
aggygtagatttaygagttggagyggygttttyggtagtagyggtatttgtyggygttygagygygaatatttggttagttttattygttttaygtttaygtaggttaagatttggttttagaattatygttataagatgaagygygttygggtygagaaaggtatggaggtgaygtttttgttttygtygygtygggtggtygtgttygttttggttagggayggtaaattatgttaygygtttaa

SEQ ID NO: 4679 - DNA, 427 bp, synthetic construct
  misc_feature 1..427: note = Description of Artificial Sequence: Synthetic polynucleotide
  source 1..427: mol_type = other DNA
tagygygtttygggtttygygygtygttagtttttggttygttygtyggtttygtygygttygttagtttygtagyggagtttyggttyggtttygggtygtygttattaygtygygygtygtatttygygttaagaatggggyggttaagttgtttaagtygttygtygtygtygtygtygtygyggtygaggygttyggygtyggygygggtatggagygttygtagagtygttttagtttgttygtttttttygaggygttygttatttatttttygtgtatgaattttttygaygaygaggaygtaggtaagygygyggttygttttttagattttyggggtgtttygggatttaggttyggtagtttttttttygattygtgygtttttttttttatttttaattttttgggaaggygtttt

SEQ ID NO: 4680 - DNA, 246 bp, synthetic construct
  misc_feature 1..246: note = Description of Artificial Sequence: Synthetic polynucleotide
  source 1..246: mol_type = other DNA
ttygggggyggttgtaygtggtygtggttttgaattttttgygggggtttygaaattygtttgyggggaggttagggygatagaggattygggagttatygttggtgygtggyggygtggagygygtttgttayggttaaggtgygggttyggtttyggtttattttaaggggttatygggatgygaagttygggaygttygtygtygyggtgatttyggygggggygtatttyggttgtgggtyg

SEQ ID NO: 4681 - DNA, 384 bp, synthetic construct
  misc_feature 1..384: note = Description of Artificial Sequence: Synthetic polynucleotide
  source 1..384: mol_type = other DNA
tggtggyggaattttyggggyggtyggaggyggyggtyggggagtygagaagtaagtattagygttttaggatygygygygtygtttygygtygtttygygtygtttttyggtttagagtttttattttyggtttgtgagtttgyggygttggtggagttyggttttaggaagaggagtttattyggttttttttgattggatagtagygaggttttatygggygttttygyggtttaaaatygaagygggggygagggggaggtagagttygttttttgygygtygyggttgggagggagaggaggtgggagagaaggaagaggyggaggaggtagygggygtygaggttttgggattygtaggtaagttagatygaygygta

SEQ ID NO: 4682 - DNA, 415 bp, synthetic construct
  misc_feature 1..415: note = Description of Artificial Sequence: Synthetic polynucleotide
  source 1..415: mol_type = other DNA
yggggggggtaggggtttygggtygyggggtgygggggttgygttaaattttygyggggygtttygggygtayggagggttyggygtttattygttygayggygttttatttattggygtttayggttygtaggtaaagygtggaaggagttgaaygyggyggagaagyggtttttygtggaggaagtygaayggttgygygtgtagtatttgygygattattttaattataagtatyggtygygtygtaagaagtaggygygtaaggttyggyggttggagttyggttttttgttttygggattagygttttygtagttatygttygagttttttttygyggygtttggttyggttygygtttttygygagttgttttygttgggygtygagttygayggtttggggttgttta

SEQ ID NO: 4683 - DNA, 543 bp, synthetic construct
  misc_feature 1..543: note = Description of Artificial Sequence: Synthetic polynucleotide
  source 1..543: mol_type = other DNA
ygttggaagaaaaatttttygygygtyggtagaattgtagygtttttttttagtgatttygggagtttyggttgtagtyggttttgygygtttttttaaygaataatagaaattgttaattttaataatttagagtaggttaaygaggttttgttttttygattygaattaaaggtttttygtttygtgygttgttaygagyggtgttttttggggttttaatgtagygagttgtgttygaggggttyggaaggygtaagttgggtagygatatggggaaygyggagygggtttyggggtttyggagttttgggttagtatttaygttgttgttgttygtygyggygttattggtygtgtyggaygtattygggygttttttygaggaggaygaggagttagtggtgtyggagttggagygygtttygggataygggattaygygttttygtttgtaygtttttgattagtagttggatttggagttgyggttygatagtagttttttggygttyggttttaygttttagaaygtggggygta

SEQ ID NO: 4684 - DNA, 227 bp, synthetic construct
  misc_feature 1..227: note = Description of Artificial Sequence: Synthetic polynucleotide
  source 1..227: mol_type = other DNA
tttagggygtagattttttattgtttttygggtttttttygggttttttttttgatttttttttttttttttttygagtttttgtttatatttaggttgygtttyggtttggttgttaaatagaaygaygtttttgygtagagttgattaggggtggyggygggaggtaaggttttyggtatyggaaagtaaagtaaagaaaaaggtattgtagttatygtttttgg

SEQ ID NO: 4685 - DNA, 323 bp, synthetic construct
  misc_feature 1..323: note = Description of Artificial Sequence: Synthetic polynucleotide
  source 1..323: mol_type = other DNA
ttttgtttygygattggygggagtyggagtttttttgaattyggygtttatattatgggttgagttygtyggygtygagggagttagtgygattyggttyggygygtayggttaaggtaygygygttggtataygygggygyggataygygyggatatataygtgygggataygttttttttygayggyggygttaatttttyggtaagtttagygttttaygygatttgttyggtttttaygttggttatagyggttgyggggayggggaggaaggtagyggggtggttttaggggtttattttgtagggttttttygaygg

SEQ ID NO: 4686 - DNA, 279 bp, synthetic construct
  misc_feature 1..279: note = Description of Artificial Sequence: Synthetic polynucleotide
  source 1..279: mol_type = other DNA
ggygtagattatttggaaggggttgtggatgtygtgygtggtgtagagtatygggtatatgtagtgtaaagtgtaygattyggtgttggttttgagtatygaggtgtaggyggygygggygtttatygtgagygtygtgttgttggygttygttgygtttttygtgattttggygggygygtagtgtattatttgygtggtttygggttyggttaaggygygtgtggtttttaygggaggygtgttttatttgttttgygggttgttggygttygtgtt

SEQ ID NO: 4687 - DNA, 261 bp, synthetic construct
  misc_feature 1..261: note = Description of Artificial Sequence: Synthetic polynucleotide
  source 1..261: mol_type = other DNA
ttttygtyggtggaggtygyggttggyggagatygttaagttagaggaggggattygaggtttyggttgggygaaggttttggagggggagaagayggtygaggygtggaggggtagtygyggyggggygatttttatttgtttattgyggggtttgttygtggggtyggggtagatttygtaaaggaygygtagtttgtaagttygyggttygygyggygyggggatggggagygtgtgygtygaggagygygygtygag

SEQ ID NO: 4688 - DNA, 364 bp, synthetic construct
  misc_feature 1..364: note = Description of Artificial Sequence: Synthetic polynucleotide
  source 1..364: mol_type = other DNA
tgtaygygygygtggttygaygygaggttyggtyggttygggttyggggygagattgggggtttgtygttgtygttatygttygagygtaggaaatygtygttatttgatttygttattaagtttaaggtgttttggatttayggtaagtatagygtygttgtagttggtygtgygtttttattatygtygttaggtttygaggtygygtttagttttagtaagaggaaayggaygtttagygataaatyggygtatayggtygaatayggtagttttyggattygygatttaaygtygygtttttyggggttgttygaggaggygatagttttygttgygttttygtygtttagggttygagc

SEQ ID NO: 4689 - DNA, 242 bp, synthetic construct
  misc_feature 1..242: note = Description of Artificial Sequence: Synthetic polynucleotide
  source 1..242: mol_type = other DNA
tagggtggaggyggtgtttgattgtttttttgygtgtgttttgggaggtgggtttgttttggggatagaggtgttggaygtgtaggagtagatatgtygygygtttygaggaagygtyggaattattagaagtatagggaygygggtgtygagagtttttagtattgaaaayggggatttttttttttgtaagggattttttttttttgttttaatttatttttttagatttaagggaygtt

SEQ ID NO: 4690 - DNA, 285 bp, synthetic construct
  misc_feature 1..285: note = Description of Artificial Sequence: Synthetic polynucleotide
  source 1..285: mol_type = other DNA
tagtttygggtyggggtggttgttttattttygtggtttagggaggaggygttgggtgygtatgtttaggggtgtgttygttgttagggttgtagyggtygttatttttaattagttgtaagtygagttgtttatttgggatygggtyggttyggygggtttggttttyggygaaggyggyggygttggtgygyggyggttggggygygggaygtaggtagtgygtggygyggttggygttttygggygtygttatygagygagggtgyggtttygggyggtygt

SEQ ID NO: 4691 - DNA, 222 bp, synthetic construct
  misc_feature 1..222: note = Description of Artificial Sequence: Synthetic polynucleotide
  source 1..222: mol_type = other DNA
ygttatygttgtygtygttttttygyggagtgaygygttttgtagttaatyggggtagtygggggggaggttygggaggggttttgggyggagtygggtygtttttttattttaygggttyggggttgtttttttygaaaattttagttttaattgttttgggaatgttygaggtagagaaagggagygagggagtaagtaagaagttggaggattagtgtt

SEQ ID NO: 4692 - DNA, 201 bp, synthetic construct
  misc_feature 1..201: note = Description of Artificial Sequence: Synthetic polynucleotide
  source 1..201: mol_type = other DNA
gtagygttttttggtttygygygtygttygggggtygttggttyggtgygtgtggtygtttygtygtttggttggagtttgtttygyggygtagggttgygtttygagggttygttggttyggtggtttggggtttgttyggtttagyggtttatggttyggttttygygttttagttttygtygtygtygtygtygtygt

SEQ ID NO: 4693 - DNA, 298 bp, synthetic construct
  misc_feature 1..298: note = Description of Artificial Sequence: Synthetic polynucleotide
  source 1..298: mol_type = other DNA
tyggttttgggtggyggygtyggggtagygygttyggtygagtyggggagaggagygygggagattyggagyggagyggtaggagagygyggagygaagyggtaggagtagtttatagttaggagygttttttygtttttaaygtygygtttttttttttaaaayggtttaaaaaaatttattaattgtatggtygygtatttttaaaaaggtattygtygttatttggtttyggtgaattttaggaggyggaggaagggygyggggtgggtgyggtgatatygtgggaggtggtttt

SEQ ID NO: 4694 - DNA, 272 bp, synthetic construct
  misc_feature 1..272: note = Description of Artificial Sequence: Synthetic polynucleotide
  source 1..272: mol_type = other DNA
tatttatttygattygaggttgtttattyggtttggtatgtttyggygtttttggggtttttgtatttygttggtttttygttgtggtgtttygtagttygattatttttgtgtttttaggagtttattttgggyggtagggaggygttgygtggggtttaygagttttaygttgttatttttattagtttttattttttaggygtttgttttttygtattgttaggttttgttttygtagtatttggtagatttgagttyggtttttgtta

SEQ ID NO: 4695 - DNA, 201 bp, synthetic construct
  misc_feature 1..201: note = Description of Artificial Sequence: Synthetic polynucleotide
  source 1..201: mol_type = other DNA
tttagtaatatttgtagggttggtttttyggtygtttatttygttagtttgggtttttgtgtggagtgygtttttgtgtttttggttagtygtyggttaygtgtattttttgttaggggttggtaggttttttatttgtttaaattagaaatataaggtatagtggtttttagttgagggatggtatttttttttatgttt

SEQ ID NO: 4696 - DNA, 251 bp, synthetic construct
  misc_feature 1..251: note = Description of Artificial Sequence: Synthetic polynucleotide
  source 1..251: mol_type = other DNA
taygtttttygygttygttygygtttgttttaggtttttatygyggttttttttgttttyggggtygttttgttttttatagattttattttygggggtygtttttaggattttygttygtttttttttgattyggtttttgttygtttygtttttttttttygggttttttatttttttttygtyggtttygatttygggggygtttyggatttgtttttygaatatttttagtttygtttttagtttgc

SEQ ID NO: 4697 - DNA, 249 bp, synthetic construct
  misc_feature 1..249: note = Description of Artificial Sequence: Synthetic polynucleotide
  source 1..249: mol_type = other DNA
yggyggtttttatttggagtygtatttggggygtygagtttyggggtygyggaaagaatgygygtygttygtgygtttygtttgtygygtttggttattygtagtygtygygttygtatttgattatggagtgygtttttttgttygygtgtgttttttyggttgygggttygggttygtygaggggtttggygggattggggygygtggttaaggtaggtgtygtygagyggagtttygagagygggt

SEQ ID NO: 4698 - DNA, 249 bp, synthetic construct
  misc_feature 1..249: note = Description of Artificial Sequence: Synthetic polynucleotide
  source 1..249: mol_type = other DNA
tttttagagttaattttttagatttggaggtttttaaggttttygtaatttagtgagtttyggggtattaataaattttygygggggttatygygttygygaaygtagagtttataygtggattttygygtttgtgatgtttygattygtttygggttttygtatagataatgtygygygtttttttygtagttatttygggattygygtttygygtygttyggaygtttttttgygtttgtyggggat

SEQ ID NO: 4699 - DNA, 201 bp, synthetic construct
  misc_feature 1..201: note = Description of Artificial Sequence: Synthetic polynucleotide
  source 1..201: mol_type = other DNA
ggtygyggyggtyggggtyggtgtyggygtttttttgggyggtagyggygaggagatgggtttygtygtygtygtggtgttygtygtgatygtygyggtygtygygtagagyggygygggttygtattattattattattattattaygtygtyggttattattattattygayggtyggygygttyggygtygygggtag

SEQ ID NO: 4700 - DNA, 201 bp, synthetic construct
  misc_feature 1..201: note = Description of Artificial Sequence: Synthetic polynucleotide
  source 1..201: mol_type = other DNA
atggtttaggyggtygtttygygygttttagtttygtygygygtttgagttyggtgyggygttagaagatagygygtagtygtttttgagtygtggaggyggggattaagttggaaggagtagygattttyggatygagtygygagtgtgygtygttygtygttygtyggatttttyggatttttygatygtaagtgtygt

SEQ ID NO: 4701 - DNA, 251 bp, synthetic construct
  misc_feature 1..251: note = Description of Artificial Sequence: Synthetic polynucleotide
  source 1..251: mol_type = other DNA
atygygtagttygygttttattgtygatyggattttaygttgttgtttttagygttgygygttttgygyggattygygttgttggaygtygttatttygygtttggggtttaygygagtygygagtttttgtttgtttttgygttatttygatttygygttttgtattygtttygggttygygtttygygttygtaygtaayggtattyggttttgtataygyggttggttttaygygttgttyggygtyg

SEQ ID NO: 4702 - DNA, 201 bp, synthetic construct
  misc_feature 1..201: note = Description of Artificial Sequence: Synthetic polynucleotide
  source 1..201: mol_type = other DNA
ggggtttygttgagttgagttttgygattyggtttatgtgaygtgagttttattttaatttaagtgtgaggaagygaatagygttttgaaaygtagaaaygtgtttattygaattgttaaygygagygtagagtttattgataaagtaaaataagataaatygggagttagaaaatttagygatttataggatttatygtg

SEQ ID NO: 4703 - DNA, 201 bp, synthetic construct
  misc_feature 1..201: note = Description of Artificial Sequence: Synthetic polynucleotide
  source 1..201: mol_type = other DNA
ttttagaattygygggttattygggagtttttttygtagtattagtygaaagtttttagtgtygaggagggygggtagttgtttttttygatttygtttygttygygyggaygttttyggttttaygyggggattatttygggattttygtyggatttygygygttygyggttaatttgygtgtatttgygtttygygtta

SEQ ID NO: 4704 - DNA, 201 bp, synthetic construct
  misc_feature 1..201: note = Description of Artificial Sequence: Synthetic polynucleotide
  source 1..201: mol_type = other DNA
aggtygagttygtayggygttttygtgtagttagyggttagtgatygygyggttygggygtttttygygygttttagttttttagayggggttyggaygyggaygttttttttgtagttttgttttgatygttagggatgggttttgggtatttagyggttgagggtggggagyggttagygtttgatgtttagtttttta

SEQ ID NO: 4705 - DNA, 337 bp, synthetic construct
  misc_feature 1..337: note = Description of Artificial Sequence: Synthetic polynucleotide
  source 1..337: mol_type = other DNA
gtggtttygttttagggtygyggggaggygttttygtgyggggyggagttgttatygttttttttttaattttyggggattgtggtttttttttaagttygyggygtttttagttgttttttattygtttygttygttagtttttttttygygygatggtttyggygttgagttatgtttttaagtttaagtttttygtgattttgttygttatttygtttttgttgttgttattygttattttgatgttygttaaggttagttgtatttttaggtagtttttyggatattyggygttttgtgtttattaaygggtatygatttygggagttttgag

SEQ ID NO: 4706 - DNA, 201 bp, synthetic construct
  misc_feature 1..201: note = Description of Artificial Sequence: Synthetic polynucleotide
  source 1..201: mol_type = other DNA
tgttttyggygttttaygtgtggyggyggttagyggyggtttaggaggtagtyggtgagygtttgygagtagagtggygggggtygttgataggtttygygtagtttagtttagtttagttaygyggtttataggtggggtttaagagtagtttggagtaattyggygttayggagaggggtggayggttttgtaygggtt

SEQ ID NO: 4707 - DNA, 201 bp, synthetic construct
  misc_feature 1..201: note = Description of Artificial Sequence: Synthetic polynucleotide
  source 1..201: mol_type = other DNA
ttttttgyggygaggtygtttgatgaatttaagggtattagtgtttygygagaattttttgtgggttgtgaygagaattaagyggagygtaatttttatygtattyggataggatgygttgygtaatttgtygtagtttttttgttttatttygggtggttygaagttgtaattttgttaattttttattataygttatgt

SEQ ID NO: 4708 - DNA, 201 bp, synthetic construct
  misc_feature 1..201: note = Description of Artificial Sequence: Synthetic polynucleotide
  source 1..201: mol_type = other DNA
ttttgtagttttgtttagattyggaagtygtygaggaagggaggaaggygggggtggggagagygygattttaagygttggygggyggygaggaggggtygtagyggttygaggaagygtttggaggygttaggggygtygagtttttagggaggtygygttttygggaagttttttatyggttgttyggagtaggatygg

SEQ ID NO: 4709 - DNA, 1216 bp, synthetic construct
  misc_feature 1..1216: note = Description of Artificial Sequence: Synthetic polynucleotide
  source 1..1216: mol_type = other DNA
gaagcgaagaggggttttttgatttgtaatatagaggaaagcgtcgttttcgtttagtttggtatttacgcgtttatacgtattcggcgtcggtcgggtcgtttatttgagttttaaaagttgttgaatttatatggttacgtttcggggagcggggttttagatttggttcgtttaggttatttgcgcggcgttcgcgttcgttcgttttcgtttcgcggcgtcggttttcggttttcggttcgtcgtttttcgtcgttcgtcggtcgcggggcgtatagcgagttagagcgcggtcgcgcggggttttatgtcggtcggcgcgtcgtcgtcgttggggcgtatggtttaggttgggcggttcgcgggggcgtatatttttcggtcggggcgcggggttcgcggtttttttcgtcggcggtatagcgaaggcggtagcgaggcggggcgtgtttcggcgttgtcgcggcgtagtaaagggttggggagtcgcggtttcgtttttcggggcggcgaggagggaggtcggcggcgttgtcgtttacggtgcgtgtttttcggcgcgcggtttttgtttttagtcggagtttcgcgtcgatggggcggcgttgtttagggtttggggtgacgcgacgcggacggacgcgagtttttttcgcgttgtcgggtcggggggttttgttagaggtttcgtcgtcgatcggcgttatttaagttgttcgggggtttcgtttgagcgttcgttttgtagacggtcgcggttcggagattggtaggaggcgggtacgagaggcgcgcggggcgagggcgtcgtggagcgcggggcgtggggacgcgcggcggcggcgtcgcgcggaggaggcgcgcggggatttcggggtttcgtcgttcgcgtttatcgcgttcgtcgtagagtcgttcgcgttgtttagtcgttttttttttcgcgtttgttttttcgcgcgttcgttttcgtttttcggagtcggttttaatttcgttcgttcggttcggtttacgttattcgtttttttcgtttttcgaacgggagttcgagtttttggtttggtttcggtttttgttcgtcgttttattttgcgggggtcggggtcgtcgcgggtggtggggggcgttgtgtttagtaggggcgatagcgtaggcggggttttttgtagtttttttttttattttcggtcgcgtttcggtttttattttg

SEQ ID NO: 4710 - DNA, 365 bp, synthetic construct
  misc_feature 1..365: note = Description of Artificial Sequence: Synthetic polynucleotide
  source 1..365: mol_type = other DNA
ggtcggtggcgtttatttcgtatcgcgttgtttcgttcggggtattatggtttggggttggattatgttttttttattttagtcggcgttttttatttacgcgcgttgagggtgcggtgagttgagtgcggggttaagtatgttttggcgtcgatttcgtttaggggtttaggatttggcgtttaaggggttttttggcgacggagattttcgacgtagtagcgattcgcggttgtttaagttgatttcgttcgcgtttcgagcggttttgggcgcgcggggtttcggggattggaggatttcggggggcggcgtcgcgtggtggtcggaaggggacgttaagttcggggtgggcgtcggacgtt

SEQ ID NO: 4711 - DNA, 201 bp, synthetic construct
  misc_feature 1..201: note = Description of Artificial Sequence: Synthetic polynucleotide
  source 1..201: mol_type = other DNA
gcggaaagtaaggcgcgtttatagtcgtttttttttttggaagttcgcgtttatttttgcgcggcggtcgtttcggaggcgtcgggttgggcgtgaggacgtcgtatttattattgggttcgcgagcgtcgttagtttagtcgttttttttcgtaggttcgggggtagcgtatttcgtaggttttataagtcgttacgtta

SEQ ID NO: 4712 - DNA, 201 bp, synthetic construct
  misc_feature 1..201: note = Description of Artificial Sequence: Synthetic polynucleotide
  source 1..201: mol_type = other DNA
gcgttggttgggtagtttttgggagatgaagcgacgtaggcgttttaggtattggttgtagagttcgatgtcgttgtgttcggcgttttttatttatagcggttttatcgttttggggtagcgttcgtagagcgttagttcgtgcgagaagtcgattatttcgtttttcgtgtcgtggatgatgagtacgggcgacgtgat

SEQ ID NO: 4713 - DNA, 201 bp, synthetic construct
  misc_feature 1..201: note = Description of Artificial Sequence: Synthetic polynucleotide
  source 1..201: mol_type = other DNA
tcgttttggtcgaagcgtagttcgagcgtcgcgacgcgttttacgcgtaggaagtcgtcggggtcgcggtcgtatatttcgaatatttcgcgtaggcggcgtacggagcgtagtagagtcgcgggggcgttcgattagttcgcgtcgttcgttattcgggtcggttcgtagtttagttcggatttttcgttcgtcgcgttc

SEQ ID NO: 4714 - DNA, 201 bp, synthetic construct
  misc_feature 1..201: note = Description of Artificial Sequence: Synthetic polynucleotide
  source 1..201: mol_type = other DNA
cgtttcgcgttatgtatatttattgtggtgatgagagttcgcgtttcgtgttcgttacggttattgtgcgtttaataaaaataaatattgtcgaggagtcgtcgcgatgcggggcggacgcgcggttcggaaaggggagggggttttaggaagagttatattcgcgagtcgggtttgggttaggggcgaggggagagcgtt

SEQ ID NO: 4715 - DNA, 201 bp, synthetic construct
  misc_feature 1..201: note = Description of Artificial Sequence: Synthetic polynucleotide
  source 1..201: mol_type = other DNA
gtggttttttggtttttttaggtagttaatattataattttttttgggagggggttcgtagaagggcgcgcgttgtttttttcgttttttaagttgtagcggggcgggtcgggagttagggttagggtttggagatttgggaggggatcggtgttagaagcgaagagttagggttagaaagttaggttaattaaggggggg

SEQ ID NO: 4716 - DNA, 201 bp, synthetic construct
  misc_feature 1..201: note = Description of Artificial Sequence: Synthetic polynucleotide
  source 1..201: mol_type = other DNA
ggagaagggggttcgtgtaaattttaggttgacgatcgcgtacgcgtttttcgggttattagttttgtcgtttttggtggggtatatcgaggagatcgtcgtggggaatcggggatcggattgtttgatagtcgagcgttgaagattattttttttgagtttagggaggtttggttgttttgagttttttatttttgggtt

SEQ ID NO: 4717 - DNA, 213 bp, synthetic construct
  misc_feature 1..213: note = Description of Artificial Sequence: Synthetic polynucleotide
  source 1..213: mol_type = other DNA
ttttgcggttggttaggaggagtttttcgtcgtttttattttagtcgcgtcgggcgttgggttcgatttttagtatttttggtattgatgtgtttggtgcgcgttgagacgcgaacgttttgtaagatgagtttttatttattcgtttttttttttttttatttgtttattttataaattgagtgtttggttattttggtttaggtaagaggt

SEQ ID NO: 4718 - DNA, 201 bp, synthetic construct
  misc_feature 1..201: note = Description of Artificial Sequence: Synthetic polynucleotide
  source 1..201: mol_type = other DNA
gtttagcggtttgtatcgagagttaggagaggtttagatcggatttcgatttttcgaggcgcgggagtttacggagcgcggtgggcgcggcgttcgggtcgcgtagttaggtggggagcggcgcgtagttttagattcgtaggtaggtagcggcggattgtatttgtttcgtttcgtagcgttttttgtttgtcgtttttc

SEQ ID NO: 4719 - DNA, 201 bp, synthetic construct
  misc_feature 1..201: note = Description of Artificial Sequence: Synthetic polynucleotide
  source 1..201: mol_type = other DNA
gcgttcgaggtcggcgcggtggggatcgcgggtttattattagttaagtttagttatttaattatttgtagagttgttgtaggtataggtttaggttttcgttttttattttttcgcgggtgatgcgttttgatagcggtcgcgggagcgggggtaaaggcggtagttggggcggcggcggcggtacggtcgagtgtttcg

SEQ ID NO: 4720 - DNA, 201 bp, synthetic construct
  misc_feature 1..201: note = Description of Artificial Sequence: Synthetic polynucleotide
  source 1..201: mol_type = other DNA
tcgtaaggggtattcggttttgtgcgcgggggcggcgggggttttgcgcggggtcgggttgggtcgggttgagttggttcgtttcggcgtcggggattacgcgcgattggttagattttgtcgtgatttttggaaaattgtgattattttatatgttttgtttagttcggattttttgcgttaacgagttaggtttttttt

SEQ ID NO: 4721 - DNA, 324 bp, synthetic construct
  misc_feature 1..324: note = Description of Artificial Sequence: Synthetic polynucleotide
  source 1..324: mol_type = other DNA
cggggttcgggttgggatcgcggggtgggcggtttcgagagcgtttcgtagtggttggagttttgggcgttgtaaagcgtgtttcgtcgggttttcgagcgtttcgcgttttcgtttcgttatgtttttgttgttggggttgtgtttggggttgtttttgtgtgtggggtcgtaggaagaggcgtagagttggggttatttttcggagtaggtaagtggagtcgaggggagtcgggtttcgggcgcggtcgttttttttttttcgtcggttcggtcgcggagtttttgttcgggtttttttcgatcgttttttaggtttttatt

SEQ ID NO: 4722 - DNA, 201 bp, synthetic construct
  misc_feature 1..201: note = Description of Artificial Sequence: Synthetic polynucleotide
  source 1..201: mol_type = other DNA
gagggggcggttggaggattcggatttttaagaatttggttttgggttttgattcgggcggtcggagagaaggcgaagaagaggtcgagtagataggcgcgcggcggacgcgagagaaggacgcgggcgaagcgtttaagacgttcgtttttagggtcgtcgagttttttttttttttcgtttggcgcggtagtatcgcgg

SEQ ID NO: 4723 - DNA, 330 bp, synthetic construct
  misc_feature 1..330: note = Description of Artificial Sequence: Synthetic polynucleotide
  source 1..330: mol_type = other DNA
agtttagtttagttaagtagtagagagaataggacggaggtttttattttttagggattgtagcgtttttaaatcgtttatttgcgacggtttcgcgagcgtgcgtagtttagtttttttcggacgttttcgttttcgttcgggtatatcgtgtttcgtatcgaggtagagaggggtacgcggattttagtttttgcgagtttttttgttcgtcgttattttatatttcgtattgttttagttgtcgttttagaagatgtatcgtttggcgcgtaaagcggtgtacggtttttagttcgcgcgtagtagtttggaggggcgttagagttt

SEQ ID NO: 4724 - DNA, 293 bp, synthetic construct
  misc_feature 1..293: note = Description of Artificial Sequence: Synthetic polynucleotide
  source 1..293: mol_type = other DNA
gcgttttagttcgtggcgttgtcggcgtagatttcgcgtggggatcggcgaggttaattttttttgcggttcggggtcggtagagtacgtaaggggtcgcgggtcgcgtgggtttgggcgcgtcgtggtgggtaagcggggttagcggagcgggaattcgtatatttttcgagcggagtcgaggataggttcgtgcgggtcgcggggtttttttggcgttaggaagcggcggtcgaaggagataacgagaacgtagtttcggtttagggaggtttaaaagttgagatgttgaa

SEQ ID NO: 4725 - DNA, 201 bp, synthetic construct
  misc_feature 1..201: note = Description of Artificial Sequence: Synthetic polynucleotide
  source 1..201: mol_type = other DNA
atcgtcggcgtcggtagttagagcgggatttagtttttatcgcgttttttattggagtttttttcggtttttcggcgagtgcggttcgtggggagtgggcgtcggcgcgaggaagtttttcggttcgggcgatttcggtttttgagcggtttttttttacgtcgtcgttcgttaggtcgacggaggatcggggcggggacg

SEQ ID NO: 4726 - DNA, 201 bp, synthetic construct
  misc_feature 1..201: note = Description of Artificial Sequence: Synthetic polynucleotide
  source 1..201: mol_type = other DNA
cggcgttttacgttttttttttggagtaaattcgtttcgttttttttttggagtaaattcgtcgtattttcgtttgtatcgaaattttgagcgtcgtttcgcgttatttttagttcgcgttcgcgttgttttttttttcgggtcgtaggttgagaggttgggtcgtattttggttacgttttgttcggttttagcgggata

SEQ ID NO: 4727 - DNA, 226 bp, synthetic construct
  misc_feature 1..226: note = Description of Artificial Sequence: Synthetic polynucleotide
  source 1..226: mol_type = other DNA
tcggggttgttagggcgtcgggttcgtgcgcggatattgggggcgtattcggttttcgggttaggcgcggttggagatttcgaggttggggttttgaagcgcgtaagtatttttttttttatcgcgtttttgtaagtagtttgaagttttaagtcgttgtttacggattttcgtttttaattttttaattgaaaaaatttgtcgaggagagtggaggtatcgttat

SEQ ID NO: 4728 - DNA, 363 bp, synthetic construct
  misc_feature 1..363: note = Description of Artificial Sequence: Synthetic polynucleotide
  source 1..363: mol_type = other DNA
tattcgggcgcgggagtacgggcgggtcgggggcgtttgggtcggtttgtcgtggttcgggggttcggggcggcgcgatttatttggcgttttcggggtcgcgatttttttcgggaggtgtttgcgaaggcggttttgtcgcggtgggggtggggaggttagggtttcggatcgttggagttggggtcgtagttagtttttggcgagtgttttttggttgttgtcgtaggggtttgttttttcggattttttttttaatttcgtcggatttttttttttttttttttacgttcgttaagtttatggtttttgtaatgcggtgggtgtggttatttagtaaattgtaattgtggttttttgtaa

SEQ ID NO: 4729 - DNA, 201 bp, synthetic construct
  misc_feature 1..201: note = Description of Artificial Sequence: Synthetic polynucleotide
  source 1..201: mol_type = other DNA
tttttcggagtgggggattgcgagggggtttcggttttacgaggtgcggaggaagagttcgaggtttggggcgaggcgcgcgggatagtggggttgacgcgtggtttcggcgtcgcgcggtttttcgaatttcgagtttcgcgttcggcgcggtcggggtttttaatcgttttttcgttcgtcgggatttttatcgggtcg

SEQ ID NO: 4730 - DNA, 201 bp, synthetic construct
  misc_feature 1..201: note = Description of Artificial Sequence: Synthetic polynucleotide
  source 1..201: mol_type = other DNA
ttcgttcggcgttgtattttttcgtggttcggttgtaaggatttgcggtggaggtttggcggaggcgggttcgcgttttagagagagcgttacgttattcgagaaggcgacgttgggggttgttgagttttttaattttttttggcgcgttttgtttagaagtcggggagtttttggtcggcggttggcggggaagcgcgg

SEQ ID NO: 4731 - DNA, 267 bp, synthetic construct
  misc_feature 1..267: note = Description of Artificial Sequence: Synthetic polynucleotide
  source 1..267: mol_type = other DNA
ggtgagttattgggatttcgttgttagggagtaagttggtaggtaggaagtagttaagatttgggggaattttttttagggaacgaatatagagaaggacgtatttgaaaatttcgtcgtagttattttttttttatgggaaagtttcgatttcggcgggtttagcgttattcggtttttcggggtgtggaatattgagcgaggtaggtgcggcgggagtatgcgcgcggggcgggtagggggcggttttcgcgtttttatttcgcg

SEQ ID NO: 4732 - DNA, 707 bp, synthetic construct
  misc_feature 1..707: note = Description of Artificial Sequence: Synthetic polynucleotide
  source 1..707: mol_type = other DNA
agggaatggggagggttacgtatattttgtgcggttcgagtggttcggatggtatagtttaggtgttcgggttaaagttggtatttttaaagtttagaacgtaatttgggcgcgttagtataaattcggttttcggtttttttgaagttagttaagttcgtatagggtttttagcgtttggaaatttgagaggcgtggaagggtggggagtttcgcgaagtttttagtttttgggtgtttttcggtttcgcgggggagcgggtttggagttaaatcggtcggtcgtaggttggagtagcgggcgtcggagcgcgcggtggggatgttcgaaaaggagttagaggtttagtcggagagttcgagaatacgagggatgtttattttgtaatatggttttaagtttttttttgtttacgcggaagcgtttttcgttttatttcgggttgtgtagggtcgtttcggcgattaagtcgttttcggagtcgggtattggggagtcggtgttgcgttcgttgttggagtcggggttcgattgcgtcgttaggtagtcgggttttttttgggcggttatggtgggcgcgtagcgttcgggttttcgttgtcgtcgtcgttttgtttgcgttgtcgttttcgttcgtcggtcgggtttaattggtttttagcgtcgcggcgttagttcgtttttttgtagtcgtcgacgttatcgt

SEQ ID NO: 4733 - DNA, 201 bp, synthetic construct
  misc_feature 1..201: note = Description of Artificial Sequence: Synthetic polynucleotide
  source 1..201: mol_type = other DNA
tggtgttgagtgcgggtcgggtcgtttttcggcggcggtgggtgggcgcgcgagggcggagggggtcgggagttttggtttcgaggtagcgaggagagacgggtaaatagtagagcgttaagttaagtttttaaagtgttaatagttgtagaagttcgaattttagcggttttaggggcgcgggtatagggttttgggttt

SEQ ID NO: 4734 - DNA, 201 bp, synthetic construct
  misc_feature 1..201: note = Description of Artificial Sequence: Synthetic polynucleotide
  source 1..201: mol_type = other DNA
gttgttcggggttgttgtataagtcggtgatattgttttgcgggtttacggtttgtgagcgttgcgtggagttggggttcgcgcggttacgggcgcgggcgcgggcgcgggcgcgtgaacgtagtgttgagtcgtttgttggagaggtttttttcggtcgagtgttcgttgcgtaggttggagggttaggcgcggagtttg

SEQ ID NO: 4735 - DNA, 201 bp, synthetic construct
  misc_feature 1..201: note = Description of Artificial Sequence: Synthetic polynucleotide
  source 1..201: mol_type = other DNA
agttagcgcggttttcgggtttttgcgtttatggcgagggtcgcgggggaatagtttttggtaggtaatttgtcgggtatttatttgagtttttcgtatcgcggttcgaaaatttgggagcgttttaggataaagggttagttttttggaattagtcgtgtgtgattagtgtgtgttagttcgtatgtgggggttttagtg

SEQ ID NO: 4736 - DNA, 201 bp, synthetic construct
  misc_feature 1..201: note = Description of Artificial Sequence: Synthetic polynucleotide
  source 1..201: mol_type = other DNA
gttgcgtaggtatcgggtttcgttcgggcgtcggggtagggttgtcggggttagtaggtttttcgcgttttttttggcggggttttaggggttggattgcgggttttttttgtttttttttcggggtcgagtaagttcgcggggggtgtttttaggtagtaggagggtgaggtaggataatttttaggttttgtagttttt

SEQ ID NO: 4737 - DNA, 203 bp, synthetic construct
  misc_feature 1..203: note = Description of Artificial Sequence: Synthetic polynucleotide
  source 1..203: mol_type = other DNA
atttttaaagaatgataaaataaagaagcgtacgttaggtttttaaggagatatcgtttttttttttttattattttttatttttattagattttttatcgcggattaaagatgaatttgttattaattaagtttttgtttaagttattttatttttcgtagtttttttatttgtcggggcggtgttcggcgtattttaggtt

SEQ ID NO: 4738 - DNA, 201 bp, synthetic construct
  misc_feature 1..201: note = Description of Artificial Sequence: Synthetic polynucleotide
  source 1..201: mol_type = other DNA
tgatcgggcgtcgaaacgtcgggagtcgggggttaagggttcgagttaggaggtttcggagtagtagtcgttcgttttttacgtcgtcgtcgtcgttttcgcggttgtttggatacgggataatcgatttggggtttcgatcgtagtagagtcggaggggtgggtaggcgcgggttcgggagacgcgcggggaaacgcgcg

SEQ ID NO: 4739 - DNA, 201 bp, synthetic construct
  misc_feature 1..201: note = Description of Artificial Sequence: Synthetic polynucleotide
  source 1..201: mol_type = other DNA
ttattttaaagcggtagcgtatttttagagttggttttttttttcgtttcgggttttcggatcggttgtaggagttttttttttcgggtcgggcggcggcgtttggcgttttcgggttgggttattgttttatgtttttttttgggcgtttggcgcgtgttttatcgtcgttatcgcgtttaaaggttaggttggaagttc

SEQ ID NO: 4740 - DNA, 208 bp, synthetic construct
  misc_feature 1..208: note = Description of Artificial Sequence: Synthetic polynucleotide
  source 1..208: mol_type = other DNA
gggggcgttttattgattttttttggcgtttgtttttttttttaggttgcgttttttttatttattgcgagcgtgagttagcgttgaaggtttagagcgcgttgtacgagtagaagattttgttcggggtaagtggcgttcgtcgtggcgtaagcggtcgacgcgtcgatagggggcgatttcgggaggtcgggcggcggcgcggcgc

SEQ ID NO: 4741 - DNA, 201 bp, synthetic construct
  misc_feature 1..201: note = Description of Artificial Sequence: Synthetic polynucleotide
  source 1..201: mol_type = other DNA
tattgatgaatgcgcgttcggattttcgggcggattttttttaagtcggttcgtttttttagtttaaataaataaataaagttagatggaagaaaaaagcgtttattttattttcgtcgtcgtttcgttcgttatttttgtttttgtttcgttcgtttggcgttttaatagagtatagtttggtggataaagtttttttat

SEQ ID NO: 4742 - DNA, 201 bp, synthetic construct
  misc_feature 1..201: note = Description of Artificial Sequence: Synthetic polynucleotide
  source 1..201: mol_type = other DNA
gaaaggaaaaagcgatatttttgtttcgtatagagttaaatattggaagtacgagatagtcgacgtggattaggattattttggtttttcgtgcggcggcggcggcggcggttgcgcgcgggttttttgtggcgcggttttggggcgcgggcgcgggcggcggcggggttgcgggagtcgtcggggcgggaggcggagcgc

SEQ ID NO: 4743 - DNA, 595 bp, synthetic construct
  misc_feature 1..595: note = Description of Artificial Sequence: Synthetic polynucleotide
  source 1..595: mol_type = other DNA
tttggttttcggcgttcggggttagcgtagttcggggcgagcggggcgcgggtcggggagggggagttgttcgcgtattttatttttttttttttcgggcgggcggcggcggttcgttgtatatatttcggcgtatttcgttaggtcgcgtatagcgtttcgagtttaggcgttttttcgtttttttttcgcgttttgcggcggcggcggcggcggtagtagtagtagtaatatggttgttgatgggtgtttggggtggcgttggcggcgggaggagttttttcgagtttttgcgtcggttgttcgttgttagttatggtaaatggtggcggcggcggcggcggtagtagcggcggcggcggcggcggcggaggtagtagttttagaatgagtagtaatatttacgcgaattattttagtttagacgcgttttttttttttttttttttttttttttttttttttttttttttttttttttttttttcgtttttggtttacgagtttaagatggatgcgtttattatttcggtgattatggaggtgtcgtgcgatagtcggggttaacgtatgtggtgggtttttttggtttttt

SEQ ID NO: 4744 - DNA, 201 bp, synthetic construct
  misc_feature 1..201: note = Description of Artificial Sequence: Synthetic polynucleotide
  source 1..201: mol_type = other DNA
tttttttttttcgtttttttttttttttggagaagagagttggtgttaagagttagggattttggttgtgtgtttgcggatttgtagtggcggcggcggcggcggcggcggggaggtagtaggcgcgggagcgggcgtaggagtaggcggcggcggtggcggcggcggttagatatgaacgtcgtttcggcgtcggcggtg

SEQ ID NO: 4745 - DNA, 269 bp, synthetic construct
  misc_feature 1..269: note = Description of Artificial Sequence: Synthetic polynucleotide
  source 1..269: mol_type = other DNA
tttatcgatcgtattatttgatcgcgggaaacgaaatttgagtttaggaatttgaattgttttacgtacgttcgttttcggataaattttttagaggatcgtgatttttttatttagagattatttagggagatgttttggatgggataagtagataaatggcggttcgaggaaaatgtaggaaattttatattgtagacgtttaagtattaattgtttgggtttcggggtagggaacgggagatattatttatcggaaatattatatt

SEQ ID NO: 4746 - DNA, 201 bp, synthetic construct
  misc_feature 1..201: note = Description of Artificial Sequence: Synthetic polynucleotide
  source 1..201: mol_type = other DNA
cgcggtcgcgaggcggggttggagggcgttgcgggttgcgcggaggttgcgggaagcgcggggagtacgcggagttcgattagtagggagatcgcgtcgcgtcgggtataggtacgggattcgcgttttaggagggcgtagcgagaggcgtattgcgtatttaggggttgcggtttcggtcgtcgtgcggtgataagttga

SEQ ID NO: 4747 - DNA, 267 bp, synthetic construct
  misc_feature 1..267: note = Description of Artificial Sequence: Synthetic polynucleotide
  source 1..267: mol_type = other DNA
tgaaatttagaggaaaataaaaatgtagcggtttttacggaggtttttggtttgtaggatatttgagggtggagataaggatgtcgcggagggaggattcgggagttcggtcgcgttttttagtttcggtattcgcgtttagcgcgtcgcgtttcgcgtttttcgcgcgtggtcgtttttcgcgggtcgggtcggggttgcgttgttatttagcggtcgcgcgtttagcgtcgcgttatcgtttttgtaggtcgtcggggtttttgt

SEQ ID NO: 4748 - DNA, 287 bp, synthetic construct
  misc_feature 1..287: note = Description of Artificial Sequence: Synthetic polynucleotide
  source 1..287: mol_type = other DNA
ggtttagatttcgcgagtttcgggtttcgtttattcggtcggcggttttttcggggcggagcgcggcgtttttggagtcggtatttcggatttcggcgtcgtttcgcgtatcgttttcgttttagtttttagtggcgcggcgttttttcgcgatattcgcgggtttttaggagcgagtcgattttcggttgggtttggagtcggggttaagtttattcggagggagtacggagtttatttagttgtttttgggggtaggaggtttaggttttattttgtatatcgtt

SEQ ID NO: 4749 - DNA, 201 bp, synthetic construct
  misc_feature 1..201: note = Description of Artificial Sequence: Synthetic polynucleotide
  source 1..201: mol_type = other DNA
cgatttggtattagcgcggaggttattttgcgtagtcgggtaggtacggcggtttttaggtattttcgtagtagttttagtttttggttcgcggcgtcgcgagggcgagaattcgtgggcgtcggttttttttttcgtcgtcggtgttttgtaaagtggaggtcggcgttttcggcgttttcgtcgcgttcggggtaggtc

SEQ ID NO: 4750 - DNA, 201 bp, synthetic construct
  misc_feature 1..201: note = Description of Artificial Sequence: Synthetic polynucleotide
  source 1..201: mol_type = other DNA
cggaggtttacgttgagttcgcgtagcgcgtacggttcgtcggcggcggtggttttcgcgttgcgttgtgttcgattcggttcgcgcggatttcgttcgcgttattttacgcgtaggttttgtagcgtttttaggagtagtagcgttcgtaggggatcgtcgaggtcgtcggggttatttgggtagagcgcgagtaggcgc

SEQ ID NO: 4751 - DNA, 286 bp, synthetic construct
  misc_feature 1..286: note = Description of Artificial Sequence: Synthetic polynucleotide
  source 1..286: mol_type = other DNA
gcgcgggaggcgtcgggggtcgcggaggcggggcggggaggggtcggcggcggcggcggcgcgcggaggagatcgtagtgcggtcggcgttaggattcgcgggggttttttaggtcgcggcgtttttcgtttttttttatttttcgattttttttcgtttttaaaatgaggaaacggagtaattcgttttaagttgtgtagtcgggatcgtttcggggtgtgtagtcggttcgcggaggtttttttgggggcgggcgcggggcgcggttcgggggcgttttttgag

SEQ ID NO: 4752 - DNA, 244 bp, synthetic construct
  misc_feature 1..244: note = Description of Artificial Sequence: Synthetic polynucleotide
  source 1..244: mol_type = other DNA
aatgtttagtattatttaaaaagaaaattatatatattagttaatgatatattttaatttttaataaagttggtatttttttttgattatagattttgtcgtggtaaattcgggtttcgacgatagaggtagcgtagaagttcgtttttaaatgagataattttattaaaattataattttttgtatttttatagcgtttttttagtggcggagattttaggtgttttacgttagggtttatta

SEQ ID NO: 4753 - DNA, 201 bp, synthetic construct
  misc_feature 1..201: note = Description of Artificial Sequence: Synthetic polynucleotide
  source 1..201: mol_type = other DNA
gttttaattttttttcgagatttcgggcggcggggattttttttcgggtggttgcgtgcgcgtttagtaattcggtgggtggaggtttggagtttcgttcgcggtcgttttcgttgattttttagtgtttttgtttgttttttagagtttaggtagttagtttttcgttaggaaggtagagtagcgagattttcggtttac

SEQ ID NO: 4754 - DNA, 372 bp, synthetic construct
  misc_feature 1..372: note = Description of Artificial Sequence: Synthetic polynucleotide
  source 1..372: mol_type = other DNA
ggattcgtcgtttaggttcgcgtggggatcgtagggaattcgcgttacgtcgggggttattgtttatcgcgaggtgttgaagtggtttcgtgatcgtcgcgggtcgtggttgatatcgcggagaagttaggatttttatagtttttgttagatttgaaagtaagttggaaatcgatagttgttttagttgttttagattttaatttggtttgggttttttttttttttatttgaaaatagatttagggtaatgtttaagagaattttaatcgacggaagtggtcgggaaattttgttttcggtattgagggatgttatcggagatttttttgttttaggtttgtcggagtttattatattcgttaatgttat

SEQ ID NO: 4755 - DNA, 201 bp, synthetic construct
  misc_feature 1..201: note = Description of Artificial Sequence: Synthetic polynucleotide
  source 1..201: mol_type = other DNA
aattttttcgtgttttttgtataatttgggagagacgtagcgttgtgggtgtagagttgtttagagagggttttaggttagggtagggaagagataggacgtcgcggggttcggttgtcggcgttgttgttattttatggttgaaggggattgaggtcgaattgggtaaggagaagtcggtcgtagattgtggagttgatt

SEQ ID NO: 4756 - DNA, 247 bp, synthetic construct
  misc_feature 1..247: note = Description of Artificial Sequence: Synthetic polynucleotide
  source 1..247: mol_type = other DNA
ggggtaggattttagaagttatttaattagggacgttgggttggaaatcgtttaattaggtacggggtaggagaggatagggcggttttcgggatgtggcggggtttttgtttttggttgtagttggagttttgcgtttcgttttcgtttttttgtgttttttgttgttagaggtttagtttttgtggttttgtgatttgcgggtattgggggatttatagttaagacgttaggatttttcggaagt

SEQ ID NO: 4757 - DNA, 201 bp, synthetic construct
  misc_feature 1..201: note = Description of Artificial Sequence: Synthetic polynucleotide
  source 1..201: mol_type = other DNA
tcgttttttttttcgggatgtcggatcggtatttttattatttttaggtttttagggggttttggcgttttagttgtggattttttaatattcgtaggtcgtagggttatataggttgggtttttacgtgtagaggatataaagtagatagacgaaaattggagtttcggcggtagcgagaaataaaggtcgcgttaaatt

SEQ ID NO: 4758 - DNA, 201 bp, synthetic construct
  misc_feature 1..201: note = Description of Artificial Sequence: Synthetic polynucleotide
  source 1..201: mol_type = other DNA
ggattttgagttggggatcgtttaattaggtacgtaattggagcggatagggcggttttcgggatttggcggggtttttgtttttcgttgtagttggagcgtttggtttcgttttttttgttttgtgttttttgtttttagaggtttagtttttgtggttttttgatttgtaagtattgggagatttatagttaagacgtt

SEQ ID NO: 4759 - DNA, 235 bp, synthetic construct
  misc_feature 1..235: note = Description of Artificial Sequence: Synthetic polynucleotide
  source 1..235: mol_type = other DNA
atttcgttttttgtaagtttgtaatatttcgtatttagattcgtaatttaggcggaggataaagggttgtagcggagggcgtagagtagatgtttagggcggggtagagggggcgggaagttggcgttacggtcgcggcgagggcgagtagtcgcgcgttttcggtgttaggaggaatgttcgtagagcggaggttggtaggcgcgagaggttttaagcgcgtagttcgattaag

SEQ ID NO: 4760 - DNA, 201 bp, synthetic construct
  misc_feature 1..201: note = Description of Artificial Sequence: Synthetic polynucleotide
  source 1..201: mol_type = other DNA
gcggtatttcgttttcggttttgcgcgtttatttcggggcgcgtcgaggttatcgtagggtatttatttggtatttgtttttgagtgtgtagatcgtcgcggtttttatttgggtttttaaataagttttagggagaaagaaggaggtaaaaaaaaaaaatttaattatgtaaatggatttcggattgggaggcgcgggat

SEQ ID NO: 4761 - DNA, 201 bp, synthetic construct
  misc_feature 1..201: note = Description of Artificial Sequence: Synthetic polynucleotide
  source 1..201: mol_type = other DNA
gtcgcgttaacgaacgtaggcggcgggaggttcggcggcggggttcgcgtttttgtatcgcgatcgcgttagaaaatatttcggggttgggcggcgtttcggagacgtatttttttgttatttttatcgtttttggtaacgattattaatgttattatgttttatttttttttattttttttcgtttttagagtcgcgttc

SEQ ID NO: 4762 - DNA, 201 bp, synthetic construct
  misc_feature 1..201: note = Description of Artificial Sequence: Synthetic polynucleotide
  source 1..201: mol_type = other DNA
aaagagggagaaagagattaaaaaaagaaaaagataaggggagggggaaggaaggaaggagagaaggaggaagaagtttggggtttgttgttttaggagcgtttaggtagtcggtgttggagcgcggggcgttcgttttcgtcgggattgtcggtttcggggtttgcgagagcgttagagttttagtcggcgcgttcgggc

SEQ ID NO: 4763 - DNA, 201 bp, synthetic construct
  misc_feature 1..201: note = Description of Artificial Sequence: Synthetic polynucleotide
  source 1..201: mol_type = other DNA
gtttttgcgcgcggaaaggcgttggaggcggttttatagtcggggaggttagcggcggcgtatttgtattttgggagacgtttggatttagtttaagttcgtaggttgggcgagcggagatttttgattttatcgtgtgggtgagattattgtttttcggtttaaaagaaaagaaagtatgttgtgaatttttgaaataaa

SEQ ID NO: 4764 - DNA, 201 bp, synthetic construct
  misc_feature 1..201: note = Description of Artificial Sequence: Synthetic polynucleotide
  source 1..201: mol_type = other DNA
tggaatttacggcgtttcgttcgtttcgcgtttaggaatattgtgcgtttagcgtagatgcgtttttacgattttttgtttggttcggggttatgtggtcgcgtatcggtttttgaagtttttatttgattgttggggaaggcgtttagaattaggagcgggttggttggggattggttttcgcgttgggtcgtttcgttt

SEQ ID NO: 4765 - DNA, 296 bp, synthetic construct
  misc_feature 1..296: note = Description of Artificial Sequence: Synthetic polynucleotide
  source 1..296: mol_type = other DNA
tcgggggtgggggtaagcgttacgtgcgcgttaggtttttggtgtgttcggtaggcggcgttgcgtggttgcggttggtttcgagggtgcggggggcggcgattcgggagggaaaatttttgttttttttcggggtttgttttgttcgttttttaaattcgttttatatttttttcgattttcgtttttgtaagcgttatttgtagttttatcggttttcgtaacggtggtggtggttggtggggggtttcgaagtttgtttttggttagtcggatttcggtgggagatggaggta

SEQ ID NO: 4766 - DNA, 201 bp, synthetic construct
  misc_feature 1..201: note = Description of Artificial Sequence: Synthetic polynucleotide
  source 1..201: mol_type = other DNA
gtcggtcgagtttcgggagtcgaggttggaaacgttggagcgggcgttgtttatcgaaggcggttcgggatcgggacgcgggttcgagcgatcggagcgcgggttgtcgtggcgttggtcgtagtttaggttgatgtcgttggatcgggcgttgtcgttatcgtcgtcgtcgtcggatttcgttaggttggttcgtgggtt

SEQ ID NO: 4767 - DNA, 201 bp, synthetic construct
  misc_feature 1..201: note = Description of Artificial Sequence: Synthetic polynucleotide
  source 1..201: mol_type = other DNA
attcgttattgtgtatttggacgttatttgtagatttagcgtttgcggggatttcggaaacgggagagcgggttttcggaaacggtgattaatgggaaacgtgattagatgttattaggcgaatagttcgtttttaggtaatatagaaggaagagacgtttttagttattttaaaatagacggagtttttagttaatggat

SEQ ID NO: 4768 - DNA, 266 bp, synthetic construct
  misc_feature 1..266: note = Description of Artificial Sequence: Synthetic polynucleotide
  source 1..266: mol_type = other DNA
ggaaatcgttagttttgagcgtcggattttttgtgttgggtgggagtgggggttcgcggttttggtgttttaatttttggaggaggacgtcgggcggggcgatgtttgtgtttgtggttttttgaggtagtgggagtggcgtgtgaaggattgtgagagtttggcgtgaagtgattgttatttgttagatattcgtttggttgagtgtggtttcgggatcgtgttcgtaagcggatttcgtggaggcgtttttttttttatttttt

SEQ ID NO: 4769 - DNA, 201 bp, synthetic construct
  misc_feature 1..201: note = Description of Artificial Sequence: Synthetic polynucleotide
  source 1..201: mol_type = other DNA
taaagaagtcgcgggtatcggtttaataaggtgtagcgaatagtcgttcgttttcgttttaatttatagttttatattttacggtgttattgattttttcgtatttagttatataggacgtggataggtatacggggtgatagtttcgtattgaacggtattaatttttattcgtatcggagttatatagatggtttgcga

SEQ ID NO: 4770 - DNA, 228 bp, synthetic construct
  misc_feature 1..228: note = Description of Artificial Sequence: Synthetic polynucleotide
  source 1..228: mol_type = other DNA
aggatacgttggatagtttcgaaaagatatagtgggtggtttcgggcgtgggtaatcgggtgcggaattatagcgtattcggagttgcgaatttagacgcgggtgattgttgattttttgttttgtcgtttttatttgtgtatgtaggtggcggttagttggggttagggaagcgtggagggtgggttttaatcgagttaagaaaagtttggggtgttttgaattttg

SEQ ID NO: 4771 - DNA, 248 bp, synthetic construct
  misc_feature 1..248: note = Description of Artificial Sequence: Synthetic polynucleotide
  source 1..248: mol_type = other DNA
tcgggattgagtttttgtagttttgaggtttggaggttcgggcggtagtaattgtgtcggattaggttcgtgggtgcggtttgtggtgtagttggagatcgaggtttcgcgtattttcgttcgcgttttagttatttaggttcggtcgtagcgaaaaggtttaagagggaagttagaggtgaacgttttaggatgaaggttttttgtaaaacgttgggatttagatttggggtgggtgtttggggttt

SEQ ID NO: 4772 - DNA, 387 bp, synthetic construct
  misc_feature 1..387: note = Description of Artificial Sequence: Synthetic polynucleotide
  source 1..387: mol_type = other DNA
aagtcgaggtgttggaggacgtgttgcgggagtagttcgggtcgttgttttagttggtcgttgtttgtcggtttaagcggttgttttcgggcggttattcgtttattgaaaatttttagttggtgttggagcggcggcgtgtggttaacgttaaggagcgtgagcgggtgagggatttttagggtcgacgttcgttttttttttttttgttttattattaaatatttggttaatattcgggggttcgtttatcgtttattttcgttcgaggcgatttcgagttttcgaggttttttacgtttttagtttgttaggagaatggtagtggttttttttttttgtattttcgtgtagttgttcgttggcggtcgttgcggtggtcgtttc

SEQ ID NO: 4773 - DNA, 203 bp, synthetic construct
  misc_feature 1..203: note = Description of Artificial Sequence: Synthetic polynucleotide
  source 1..203: mol_type = other DNA
cgatttaggttttttagttttcgtttagtttttcgcgtgcgggcgtcgggatcgtagtatttgtgacgtcgaagtttagtaggtcgtagacgggagttacgcgcggttttggtatagggtaaaaatttacgtttaggtaggcgggtagttacgatgtcgggtaagtttagggtagattttcggtggcgtatagggaagtagcg

SEQ ID NO: 4774 - DNA, 203 bp, synthetic construct
  misc_feature 1..203: note = Description of Artificial Sequence: Synthetic polynucleotide
  source 1..203: mol_type = other DNA
tgcgaataagattaaggcgaggtgaggtttaggttttcgggattgatagcgtcgcggtagggggttcgaggcgggagttggggattttagcgttttttacgcgcgttttacgggggttgtcgttaataaaggcggagggtaagggtgcgtttatttaagtaagggggacggtgggtcgttcgggttgagtagcggagcgtagc

SEQ ID NO: 4775 - DNA, 312 bp, synthetic construct
  misc_feature 1..312: note = Description of Artificial Sequence: Synthetic polynucleotide
  source 1..312: mol_type = other DNA
ggtttaggaggagtcgcgtcgggttcggttataagaggtcggttagtaggcgtttcgttagtattcgttcgatttcggttcggagtatcgggcgtttagcgcgggtgaaggcggagtcgtagggttggtttttaaagggatgttttcgttcgagcggcgagattagtttcgttcgtttttcgtcgcggtcgcgtcgtagtcgtttacggtcgtcgatatggttttttattgcggcgataatttcggagtgtattcgtagttcggtttgttttcgttcgtcgttatcgtcgtcgtttcgggcgttttttcggt

SEQ ID NO: 4776 - DNA, 407 bp, synthetic construct
  misc_feature 1..407: note = Description of Artificial Sequence: Synthetic polynucleotide
  source 1..407: mol_type = other DNA
tttcggttcgcgggaggtagttgtattaagaaggtgaggacgttgagcgggggttcgtgtttttcgtcgtcgtagtttttattgtcggcgcgcgtttttcgcgttcgttatagtagcgcgttaggcggacgtcgcgggaatttgacgttcgaggttcgcggtttttaatgagagttttagaatatttttcgtttttgacggttagcggtagcgtcgtcgtttttcgtagagcgttcgttttttcgtttttagagttttagttttttttcgagcgatttcgtagtttttttttcgtttttattcgtcgtcggttttgtagttcggttttttttttagtttaggcgcgcgggttgtagtgggcgatcgttttttttcgatttttcgtcgtgtttttgggtttttcgaag

SEQ ID NO: 4777 - DNA, 295 bp, synthetic construct
  misc_feature 1..295: note = Description of Artificial Sequence: Synthetic polynucleotide
  source 1..295: mol_type = other DNA
attttgggtcgcgggagaagtgcgtgtagttcgggtaaggtcgggcggggtcgggcgcgggcgggcggtcgagggatgcgatagggtcgggtacggtttcgtattttttcgtattcggcgtcgtcgtttcgtcgttttttttcgtttgtagggtcgtttcgggtattttagggttgttgaggggcgggcgggtcgtaaaagttacgagagaggggcggtagggcggcgcggtttgcgagcgtcgcgggatttcgaggagcggcgcggggagtataggggcgcgcggggcgggcgc

SEQ ID NO: 4778 - DNA, 435 bp, synthetic construct
  misc_feature 1..435: note = Description of Artificial Sequence: Synthetic polynucleotide
  source 1..435: mol_type = other DNA
ataattttggttttatatattttatatgtttcgtataaagaaatagaaagcgggcgatacgttttgggagggcgggttggcggtttttttagttcggagcgcgtggaggttgcgcgtaggggttcgggacgcgggatagggatttcgcgtagtttaggcgtcggggaatcggggttggagtcggggatttgagtttagcggacgtttttttcgtttggaggttcggtacggatcgggatattagggcgttcgtggtcgtggttcggtttttggttgttgcgggtcgcggtttttagtgggtttttaggatttttttttacggcgggtatttatcgaggttgagaggttacgtcgtgttgttggggtttttcgtcgattatatttttgggcgttagttcgggtagagatcgcggggattggttaggtcgggttagg

SEQ ID NO: 4779 - DNA, 410 bp, synthetic construct
  misc_feature 1..410: note = Description of Artificial Sequence: Synthetic polynucleotide
  source 1..410: mol_type = other DNA
tggttgtgttagtcgatatgagtttttttttttttaggaaggcgtaggattcggggaagttttcgcggttaggtcgtttgtttattcgtagatttcgggcgtcgttcgcgttttttgttttttattttttaatttttgcgtggttttagggtttatatttttggagtttttttttttagtaaatagtgttgttttttatttaatagtagaggcgtttaggagtttaggcgatgtgtttaaggtcgaatagagggatagtagtgagttgtttaatttttttagttgcgtagttaggatacggttgggggcgggtggagatgtggcgtagggttagggttcgggtttcgggaagtaatgatcgagggcggtgattattgtttttagtttttcggcgggtttttttttaaggg

SEQ ID NO: 4780 - DNA, 392 bp, synthetic construct
  misc_feature 1..392: note = Description of Artificial Sequence: Synthetic polynucleotide
  source 1..392: mol_type = other DNA
tggaagtattcgttttatcgcggggtttggtatttaggttttgggatttttgttattgttaaggattttttcggggattcgagttttcgggttgaggatcgcgggggattttaggtcgggacggagttttttttggttcgttgtgcgcgtacgtttggaaaggcgggatttaaggtagcgatgttgcgggaggttttgtagtgttaacgagttttcgaacggtttcgttttattttttttttgtgtgtttcgtaagtttttgtttagtaaatcgttatagtttcggcgcgcgagagtggcgttggtacgtttaaatttcggggtttttggttaggttaggggggcgggcgtgcggcggggtcgggtcgggtcgggtgcgtttagcgggtttc

SEQ ID NO: 4781 - DNA, 203 bp, synthetic construct
  misc_feature 1..203: note = Description of Artificial Sequence: Synthetic polynucleotide
  source 1..203: mol_type = other DNA
ttcgattttagttcgtcgtcgttttttaggcggattttttagaggtaggttttagttttcggcgcggggaggcggcgcgttttagaggggcgtagggtgcgcgggggtcgttggtttttcgggtattttttttttgcggttttttcgttttttttcggagttggtgtttgaggtcgttgggattttagtttggcgtttttttt

SEQ ID NO: 4782 - DNA, 398 bp, synthetic construct
  misc_feature 1..398: note = Description of Artificial Sequence: Synthetic polynucleotide
  source 1..398: mol_type = other DNA
gggttcggggataaagggtgacgtgtggttttggggaaggttcgggatgagggagttgaatttagttgtttcgcgcggtgtttagagtgttttatcgcgcgtaataaattttcgtagatatcgtatttttaatgcggtgtttttttgtgttagtgtttcggcggtttttgtagggtgttaatgttacggttgtatatcgttttttttttttattatttttatttgaatagatttggaggaggcggaaatggaaattagggtatgtttataagttggattcgttagatttttttgttcggcggtatgtttgtgtatgtttgtatgtcggtaaggagttacggatagggaaggtttaagagttggttatttgagcgtagtagatgggttttcgtagtttt

SEQ ID NO: 4783 - DNA, 286 bp, synthetic construct
  misc_feature 1..286: note = Description of Artificial Sequence: Synthetic polynucleotide
  source 1..286: mol_type = other DNA
gtcggtttttttatatttacgtgtttttcgtgtgcgcgttttcggtttgtagatgttataaggttggcgtcgtttggattttcgggcggttttatttttcgcggtcgttacgtttcgttttttgtatttagtttttttggcgttttcgttgtagtatttaagattaggcgtcgtttttgttagtcgtgttgtttagtacgtttgagggtcgttgtcggtaggttttatttttcgttcgggttttttatttatttttttttttggacggtggggtttaagttttgta

SEQ ID NO: 4784 - DNA, 267 bp, synthetic construct
  misc_feature 1..267: note = Description of Artificial Sequence: Synthetic polynucleotide
  source 1..267: mol_type = other DNA
ttttattttttttttttttttttagtttggttgaagaacgtttttaaggaaattcgggttgtttttttttatttggaagtggttttttttatatcggttcgtaaattgattatgaaatatacgatgttaattcggagttgtattttttagttgggtattttcgcgcgttggttttcggggtttcgttttttattttttgtttttttttttcgcgttttgtttttattttttatttttcgcgttggttatttcgtttttttggtagtt

SEQ ID NO: 4785 - DNA, 260 bp, synthetic construct
  misc_feature 1..260: note = Description of Artificial Sequence: Synthetic polynucleotide
  source 1..260: mol_type = other DNA
gaaattacgataggtttgtattatcgtttttttttttacgttttcgtttaggtttgtaaagtcggttgtttttggttaataggcgttttttttgttttacggtgaaaattagtttgtggtgtattgagatttgtaaattattttttgaatgttaggggcgttgtaaaatagtcgtcgggtgtagtgggtcgggcgttcggttattttggttgcgattatcgtagttttttaaaggatgcgggtagatgtagacggttttg

SEQ ID NO: 4786 - DNA, 239 bp, synthetic construct
  misc_feature 1..239: note = Description of Artificial Sequence: Synthetic polynucleotide
  source 1..239: mol_type = other DNA
gtgagcggggtacgagagtgtagggtttcgttggtgtttttttttcggcgttcgtcggatttatcgtttttatcgttgcggtgttcgaattcgcggattcggatcggcggtagtagaagcggtagcggtaaagtattcgtagaatggggtatcgcgaaatagttttttttttttttttttttgttggtggtgtagtcgcgatagttcgttttttaggtaggggtttggagtttgttttt

SEQ ID NO: 4787 - DNA, 846 bp, synthetic construct
  misc_feature 1..846: note = Description of Artificial Sequence: Synthetic polynucleotide
  source 1..846: mol_type = other DNA
ggtggtttttggggtagatagagtaggatttgtttttgttttttgtttttttcgtttttttttttttagcggcggcgatcgtagtaatagcggtagtggcggttgttgttattgttttgtcgttgtcgagtcggttatttgggtattcgcggagtcgcgtcgttgttatcgtttcggcggtttttcggagtgcgcggagggggcggcggaggagcgagatatttatagtaatcgaggatgcgaggggcgtttagtagtagcgagtgtttgggagttaggaggaggttttcgcgcgtcggtaatttttagtgttaggcgttttgtagttttcgcgcgtcgcgtttgggttcgtatcgttttcgtagtgagggttcgttcgagcggtaagtttttttcggcggttaagtcgatatttttttttcgtttcgtcgtttatttcgggtagtagtcgcggaataatggagagcgtagttagtagttttggagacggcgttcgggggaggacgcgtcgtcgtcgtcgtcgttgtcgttagggtaggcgcgcgtcgcgtggagtcgggcgggtgcgagggcgcgcggcggggggtggggggtacgcgtcgcgcggggggcgggggtagtggggggcgcgcgcgcgggttcggggagttcgcggggagagttcggcgttcggcgtagcgcggcgcggttaagtttcgcgtttttttcgttttttttcggcgcgttcgttttcgtttcgtcgttcgtattcgttgggggcgtttagaaagatgtatagaggtaacggttaggggagcggaggtttaagttatatgtttgcgttttcgggggttagagttcgttagt

SEQ ID NO: 4788 - DNA, 526 bp, synthetic construct
  misc_feature 1..526: note = Description of Artificial Sequence: Synthetic polynucleotide
  source 1..526: mol_type = other DNA
agttgtgaagaggcgtgggggtcgcgggaatttttttttggtcggtgcgatgaaagtcgggcggacgaggtggtttaacggggttgagagtggttcggtcgaggcgcgggttgagtttttagtatttggtttgagcggcgtgggtagtagtttgtatcgcggatatttttaattttgtcgcgtttgcgtcgtattttggtcgtggtagcgatttttcgggtatttttgaggtcgtttttagttttataagtatttagtcgtttattttagagtagcggcgtcgatcgttttaagaggagttagttttcgatatcgttttttatttatttttttatatttttatcgttggagggggtgagtgtcgtggataggcgttttcgttcggggatagtttagcggcggtagttagttcgattttttttcgcgcgggtcgtttaaatttgattagtagagcgagcggtttagcgtagtagtcgttttcgcggtttttagttgtagaaaagtaaagcgtcgggaggaagtagta

SEQ ID NO: 4789 - DNA, 201 bp, synthetic construct
  misc_feature 1..201: note = Description of Artificial Sequence: Synthetic polynucleotide
  source 1..201: mol_type = other DNA
gtttttcgtagataagtaaataatttggacgtgaaatggaaatggtaattaatgtagtaatgttgttatatttcgagtgtgtaaattttattgattcgtcgcgttacggggggtgtcgggcgtacggggatcggtggcgtgcgtttaggttgtttattttttttttttttttttttttttttttaggttttcgggcggggc

SEQ ID NO: 4790 - DNA, 523 bp, synthetic construct
  misc_feature 1..523: note = Description of Artificial Sequence: Synthetic polynucleotide
  source 1..523: mol_type = other DNA
ttttacgagaagaataagaagggttggtaaaatagtattcgttataattttagttttaacgagtgttttattaaggtgtcgcgcgagggcggcggcgagcgtaagggtaattattggacgttggattcggtttgcgaagatatgttcgagaagggtaattatcggcgtcgtcgtcgtatgaagaggttttttcggtcgtcgttcgcgtatttttagttcggtaaggggtttttcggggtcggaggcgtcgtaggcgggtgcggcgtggcgggcgtcggggtcgacggttacggttatttggcgttttttaagtatttgtagtttggtttttttaataattcgtggtcgttatcgtagttttttttatttatgttttatgttttttgttagatggcggtagtcgtagcggttgtagtagttgcggttgtagtcgcgggtttcggtagttttggcgcggtcgttgtggttaaggggttggcgggttcggtcgtttcgtacgggtcgtatatacgcgtgtagagta

SEQ ID NO: 4791 - DNA, 276 bp, synthetic construct
  misc_feature 1..276: note = Description of Artificial Sequence: Synthetic polynucleotide
  source 1..276: mol_type = other DNA
tcgtttaggtagtattttcgtagtagtcgttaacgagttgtagtcgtcgtttattgttcgcgtcggttttcgtttttcggtgtttgtcgtatcgtgggtcgtttcgtcgtgttcgatgggtgcgtttttagcgttgtcgtcgcggcgttcggtttcgggttttcgtcgttgcgtcgttagttcgtcggtagtagtcgcgtttattggcgcggattcggagcggtttaggcgtttatttcgggacggttcgtgacgttacggagggagggaggtggt

SEQ ID NO: 4792 - DNA, 357 bp, synthetic construct
  misc_feature 1..357: note = Description of Artificial Sequence: Synthetic polynucleotide
  source 1..357: mol_type = other DNA
attttttttttaggtaggagtagatatttgtttgtttttacggcgcgttagcgttttgttttagtcgtttttgggttagagttcgaaatttatttattgcgtttttatttcggtatagatagtttttaaagttgttcgtattttttagatttcgttttttgtttagttttcggatttcgtttaggggttgagttgacgttcgcgggtggatttttttggttcgttgcgtagggaattgatttcgggaatttagggcgtatagaggttaaagaagttgcggtaagggagggtgggtaaatttagtttgagtttaggtttttgtcgtttttatttttaagtttgttttgtttttttttt

SEQ ID NO: 4793 - DNA, 278 bp, synthetic construct
  misc_feature 1..278: note = Description of Artificial Sequence: Synthetic polynucleotide
  source 1..278: mol_type = other DNA
tgtcgcgttgtcgtcgtagttagtcgcgtcgtcgtcgttgtcgtagcgcgggcggtcgcgcgtcggtagtaggggtttggcgaggaagtcgttgagtttcgcgcgtttcgcgtttttggcggtcgtagcgttgtttattaattgatttttttattgatttatttaatttttaggagcggttgttcggaggtacgggtttttttttaaatttgtagcgacgttttcggcgtgggtataaaggtttcgacggcggtcggcgggggttgtttagcgttcgg

SEQ ID NO: 4794 - DNA, 336 bp, synthetic construct
  misc_feature 1..336: note = Description of Artificial Sequence: Synthetic polynucleotide
  source 1..336: mol_type = other DNA
ggtgatgaagtttgggtagaaattttttgtcggtcgttcgttttacgtttttttcggggtcgatattgttaattttttcgggtattgaggatatttttgcgttttggagcggtgggaggacgcggagcgtcgttttttggttttcgatattttgttcgttttttttagtgggtttgtggttgcgttttttcgaaggaagtaataaatttttttgattttgggggttagaggagacgttttagtttttcggaggggtgtgcgggcgggatcgttttttcgttttattggatttttggtcggggttgtttttgttttattgtgttttatatgcggagt

SEQ ID NO: 4795 - DNA, 311 bp, synthetic construct
  misc_feature 1..311: note = Description of Artificial Sequence: Synthetic polynucleotide
  source 1..311: mol_type = other DNA
gggagggcggtaaggagtgcggaggtttaaacgggtatgagtacggggcggttcggtcggaggcggttttgggcgtttttagttgttttcggttgttttcgttgcggtatttagcggtttatcggggttgtattgttgtagcggttttttgtgttatttgtagtttaggaggttgagtatagtgagtattagtagtagtgtatagttcgcgtataatattagcgtttttttacggaatatttttatttcgagaggggacgcgggttagcggcgttttgggcgtcggggttattgcgggagtagggtacgcg

SEQ ID NO: 4796 - DNA, 201 bp, synthetic construct
  misc_feature 1..201: note = Description of Artificial Sequence: Synthetic polynucleotide
  source 1..201: mol_type = other DNA
aacgtcggtatcggttgggaagtttcggtgtttcgggttttttttggcgagggcggagaagtcggcggtttttgtttagaattttgtgattgtagggatcgagatattaagggcgggggtgtagaggattataagttttttagcgcgttttatttgtatataaatgtgttttgttttttaattttgtttttgttatttgtg

SEQ ID NO: 4797 - DNA, 201 bp, synthetic construct
  misc_feature 1..201: note = Description of Artificial Sequence: Synthetic polynucleotide
  source 1..201: mol_type = other DNA
tttttatttcgcgtttttcggaattttagaattcgggtggtcggtttttggaaagtcgtagtcggcgcgatgtattttgtagattttattttgttgggacggattttttaatttttagaatcgcgggtcgtagggagttaaattgttgtttttttttttttttttcgtgcggttggtggtttgttttttaaaggaacgttt

SEQ ID NO: 4798 - DNA, 481 bp, synthetic construct
  misc_feature 1..481: note = Description of Artificial Sequence: Synthetic polynucleotide
  source 1..481: mol_type = other DNA
tcggggtcgtatcgttatggcgatttgtttatttgattcgtttcgggtggattcgtcgcgatttttgggcgtttaggtttttgagggtttaacgggcgacggttttttagttttagttgtgcgttttcgttcgggcgaggtggggttgatcgcggtcgtttgtatacgttttttttggttcgcgttttcggtttgggagggcggattcgtttattttacgatggtttcggttttggaagggattgttttcgtgattcgtttttttaatagtcgttaataattttttttaacgttttttgcgcggttcgtttttgagaattttggttcgggagagcgacgcggggttttcggggttgcgtaggttgcggcgttttgtttacgttggttcgagggcgcggttcgtttcgggtcggtttatatatttacgttttttgtcgggaggcggttgggacgcggcggggttgttttaagtgtagtcgcg

SEQ ID NO: 4799 - DNA, 280 bp, synthetic construct
  misc_feature 1..280: note = Description of Artificial Sequence: Synthetic polynucleotide
  source 1..280: mol_type = other DNA
gagttagtcggaggggcggcggcggtttcgcgcgtttagagttttagtttatgaatgggattttattttgagcgttttttttcgggtttggggaggcggcggcgcggcggcggggggcgtttcgtaagttcgcggttttgagcggttattcgcgtagtaagttgggcgagttggtagtcgtttgtatttgttttttggtttcggtttttgatttcgttttcggttttaagcgttcgggttgcgttttcggttgtttcgcgaggtagttttaggaggttta

SEQ ID NO: 4800 - DNA, 252 bp, synthetic construct
  misc_feature 1..252: note = Description of Artificial Sequence: Synthetic polynucleotide
  source 1..252: mol_type = other DNA
gcgtggggagtttggtattttatttaattagagcgttggattgagaattgtttaattaggcgcgtagtcggagaggagggggcggtattcgggatttggcgcggtttttgttttttgcgttagcgtgagttcggttagggtttttacggtcgtgtttttattttttagggaggcgtcggtgattcggttatagttttagttttcgtcgttttgtgatttgcgggtattggatgattcgtagttgagatttcg

SEQ ID NO: 4801 - DNA, 239 bp, synthetic construct
  misc_feature 1..239: note = Description of Artificial Sequence: Synthetic polynucleotide
  source 1..239: mol_type = other DNA
ataggcgatggatttttcgggttttcgggggcgttttacgtgggtgttggtcgggggttttttggtagtggttttggcgttggggggtcgaggttgtttcggcgttagtttacgttttcgttggcgttttttcggcgcgtagttatttcgggatttttaggtggtttttaggtttgggttcggtttgaggattttttcggggcggagcggggcggggttcgagagtagtacgtaggtaa

SEQ ID NO: 4802 - DNA, 405 bp, synthetic construct
  misc_feature 1..405: note = Description of Artificial Sequence: Synthetic polynucleotide
  source 1..405: mol_type = other DNA
agtttttaattaggtttaaggagtcgtagagtcggggtttcgggttcgtaggatttagaagttacgcgtttcgcgtttttcgtttcgtcgttgtttgttcggtcgatttatttggtgtcgcgtgcgttggcggttcgcgcggtagttaagttaaaggtcgaggtcgaggtcgagcgcggcgtttagtagtacggcgggggttagtagggcgggcgtcggtcgtagcgcgtttcgttttagtagtagtcgcgcgtcgtttttgtaggtcgtttcgtcgcgggttattcggggcgtttaggttgtcgtttcgtcgtatttcgtcgtttgttgtatcgttttcgttagggcggcgacgcgggatttggagttcgggcgggttaggggcgcggttcgtttcgtagattt

SEQ ID NO: 4803 - DNA, 237 bp, synthetic construct
  misc_feature 1..237: note = Description of Artificial Sequence: Synthetic polynucleotide
  source 1..237: mol_type = other DNA
ttaagttgttgtcgtttaaggttattaagtagaatttttttaacgacgagggttgttagagcgatttggaggataacgtttcgtagggtagtagcgacgcgttgttgttgcgcggggcggcggtcgtcgtgttttcgggttcgggagcgtacggtggtggcggcggcggcggcgcgtaggataagcgttcgggtttttttacgttgggttatcggggtttttatattatcgtgcgcg

SEQ ID NO: 4804 - DNA, 204 bp, synthetic construct
  misc_feature 1..204: note = Description of Artificial Sequence: Synthetic polynucleotide
  source 1..204: mol_type = other DNA
agtcgagtagtagttttagagtttttcgtaagttttttttatattttttcgttttcgttttaaaggagtagtagtttttttttgtttttttattgtcgtcgtcgtatcggcggagtttttttttcgcgcgtttttttttcgatggagttcgggcgtcgtcgacgtcgtcgttgtttcgaattttgagcggggtcgtttcggtcg

SEQ ID NO: 4805 - DNA, 224 bp, synthetic construct
  misc_feature 1..224: note = Description of Artificial Sequence: Synthetic polynucleotide
  source 1..224: mol_type = other DNA
ggtcggggtgcgcgcgtgtgtatgttgtgaatgcgttgcgcgatgtgcgtttttattttatatttagtcggttttttgtttgtgttgttcgagtgtggacgtgtgtacgcgttgtattcgttcggtgtggtagcgtttcgtgagtttttggaggtagggaaaggttatttgtgtttagaggttttgttgagggcgggaggggtttagttttagtggggagtttt

SEQ ID NO: 4806 - DNA, 278 bp, synthetic construct
  misc_feature 1..278: note = Description of Artificial Sequence: Synthetic polynucleotide
  source 1..278: mol_type = other DNA
agcgggtttgttttttatttttttagtttcgcgtcgtcggtttatagcggttttttttggggatagtttttttcgggtgtcgttttcgttttttttgtgcgttttttttttttttttttttttattaaatattatttgggaattgtttaaattttttttttaaaaaaagagagaggcggggaggagtcggagttgtggagaagtagagggatttaggtaagtatttgtggatttaaacgggcgtttttggaaattttggagaacgtcggatgggagac

SEQ ID NO: 4807 - DNA, 232 bp, synthetic construct
  misc_feature 1..232: note = Description of Artificial Sequence: Synthetic polynucleotide
  source 1..232: mol_type = other DNA
gggaaataggtcggcgtgtcgaaagatatcgagtaggtagaaataaggtaaatttatagaggcgtaataggttcggtttttcgtggttagggcgagtcgcggtttcgcgtggcgtttcggtcgttgttttcggattttgagcggttattgttggggttttcgaaagaggtgtcggttttttgggagtcggaagagttgtttgggtgggtttcgttttgttttttattttatc

SEQ ID NO: 4808 - DNA, 331 bp, synthetic construct
  misc_feature 1..331: note = Description of Artificial Sequence: Synthetic polynucleotide
  source 1..331: mol_type = other DNA
tgttttgtttggattttatcgtggtcgagaaggaggaatggtatatcgttttcgtgaatattatttacgtcgagttcgcgtcggatttcggggtcggggcggcgggcggcggcggcgcggagttgtatacggagaagacggagtgcgggcgttacggagagtattcgtttaagtaggacgttcgcggggaggtggttatggttagttcggtttacgatcgtttggtttgcgattttaatattaagttcgtcgtttcgattcgcggtaagaattggatagtttttatttttaagggtaattgtacgtatagggataagattcggaacgcgtt

SEQ ID NO: 4809 - DNA, 231 bp, synthetic construct
  misc_feature 1..231: note = Description of Artificial Sequence: Synthetic polynucleotide
  source 1..231: mol_type = other DNA
gttgcgttttgggcgtatttgcgcgtttggtttcgcgtttcgcggagagggcgatgggtttcggttaggattgagtttttttttttttttttttagtttcgtttggtatttttttttttgtttcgagggcgagttacggtttgcgtcgtcgttttttttttcggtgttttcggttcgtcgttttttcgcgtttttttttttcggattcgttttcggggttattatggtcgc

SEQ ID NO: 4810 - DNA, 201 bp, synthetic construct
  misc_feature 1..201: note = Description of Artificial Sequence: Synthetic polynucleotide
  source 1..201: mol_type = other DNA
tgttcggttttgggtttagttcgtcggcgttgttgggggcggtaagtttcgtattagtttttattcgttttatttttttcggttgaatgagtgttagttcgcgtattggggttatttagaggagacgggtaaagtcgcggttttacgggttgtattattggtcgcggagtttaggggagttgtaggagaaattattgcgag

SEQ ID NO: 4811 - DNA, 201 bp, synthetic construct
  misc_feature 1..201: note = Description of Artificial Sequence: Synthetic polynucleotide
  source 1..201: mol_type = other DNA
agttcgatgattaggagttttcggttttcgaagttgcgttttatcgtgtaaattttgttgatggcggtgtattgtagttatacggatacgagcgtttcgcgtagttcggggtagcggtggtattcgaaggagatgtcgtttttttgttgtagtcgtcggcgtcgttttatgttcgtcgcgggcgtttcgggtttttgggtt

SEQ ID NO: 4812 - DNA, 219 bp, synthetic construct
  misc_feature 1..219: note = Description of Artificial Sequence: Synthetic polynucleotide
  source 1..219: mol_type = other DNA
tcgttgtagttatgaggagaatttttatttttatggttggtttatcggttatttcgagatgtcgtttttcgattatagtatggttttgttttatagtttcgagtatgttagcggcgtcgtcggtttggattatttttattacgggggggtgtcgtcgggcgtcgggttttcgggtttgggggggtcgcgttcggtgaagcgtcgaggtatcgttaatcg

SEQ ID NO: 4813 - DNA, 284 bp, synthetic construct
  misc_feature 1..284: note = Description of Artificial Sequence: Synthetic polynucleotide
  source 1..284: mol_type = other DNA
gtcgggggaggtggggtcgtcggggaggaggcgagggaaacggggagttttagggagacggttttcgagggagagtgagaggggagggtagttcgggttcggtacgttttttttttcggtcgtttttttttatataagcgtaggtagagggcgcgttagttatgttttgtttttgcgttcgtcgtcgtcgtcgtcgtcgtttagttcggcgcgttttggaggattttgcgtcgcggcgttttcgggtttcgtcgtcgttagtcgtttcgtcgtttttttttcgt

SEQ ID NO: 4814 - DNA, 429 bp, synthetic construct
  misc_feature 1..429: note = Description of Artificial Sequence: Synthetic polynucleotide
  source 1..429: mol_type = other DNA
aaagtattttttttttaatttatgaacggatttcgatttttgttttgttattatttatgcgtttcgtattcgaggtgtcgtttttatttatacgttttacggtttcgcgaaattcggttttttagttcgcgggacgcgttgtttgttaggcgggttcggcggtatttcgggggcgggaggggtcggtcgtagggtttttagtttggcgttcgcggggcgttcgtagcgaaggggtgggtgtcgttcgtgaacgtagtagggattagtttagttcgcgttcgtttttgggtttcggttatcgttttttcgttattttttcggtttttgcgtggatcggttcgtggcgggggttgttttgcgttttcgttttcgtagtagtcgcggatttttattaacgttgacgagttagtgtcgcgattcggggagaga

SEQ ID NO: 4815 - DNA, 283 bp, synthetic construct
  misc_feature 1..283: note = Description of Artificial Sequence: Synthetic polynucleotide
  source 1..283: mol_type = other DNA
aaaagatcgcggtggagaagatggggcgtttttcgcgatattcggttgtttagaggtgtaaagtcggtgggcgtacgttcggggcggttttatagttttcgggtcgttagttttagggtgtcgggttttaattaaggtttcgaagtttttacgtatttgagggtattttgattagtttttgcgggttgttttgcggtcgtagtgggttttgaaagtttatttcggcgtagggtggaaatcggcgggaggcgttgttgattttcgattaaataatagtgacgag

SEQ ID NO: 4816 - DNA, 241 bp, synthetic construct
  misc_feature 1..241: note = Description of Artificial Sequence: Synthetic polynucleotide
  source 1..241: mol_type = other DNA
cgcgggtggcggcggttgtggggtcgtttgggatttttcgtagtattgattttgtaattttttgtgtttgcgtttcgtggtgaggggcggcgggatgcgcgcgatttttttttgatttagttaaacggaaaagttcgcgcgtttcggttggaaggtggaggttaggtaggattcggtaaaggtatattttaaacgaagtagattttattttttatttgtagagggaaggcggtgtggacgg

SEQ ID NO: 4817 - DNA, 244 bp, synthetic construct
  misc_feature 1..244: note = Description of Artificial Sequence: Synthetic polynucleotide
  source 1..244: mol_type = other DNA
gtagtagttttacgttgttggcgtaggcggcgcgtaggagggtcgtcgttttcgggacgtttttcgggacgtttttcgggacgtttttcgcgttttcgacgtcgtgttttttttcgttttcgaaagggtagaaagagtcgttcgaggcgatgttgcgggtgtttggtagattcgagaagtttttaaatttttcgtagttagcggggtttttttcgatttgcgcgtttcggggtggggacggcgg

SEQ ID NO: 4818 - DNA, 225 bp, synthetic construct
  misc_feature 1..225: note = Description of Artificial Sequence: Synthetic polynucleotide
  source 1..225: mol_type = other DNA
gtagggggcgttgcgttcgtcgagttcggaggggtcgtcgggtcgggcgttgcgtattcgcgtcgggagtcgtttttcgttcgcggcgttcgtttttgtcgttcgttagtattttttgtttcgcggtcgcgtttagataataaaagcggaagatgttgtagttgggtaaggttaggattttgttttgaagtcgggcggcgtcgcgtacgttttttttcggattga

SEQ ID NO: 4819 - DNA, 249 bp, synthetic construct
  misc_feature 1..249: note = Description of Artificial Sequence: Synthetic polynucleotide
  source 1..249: mol_type = other DNA
cgtcgttttcgcggcggtattgggtatgtttcgtattcggggtcggtttcggcggcggggcggacgtttttttattagtcgggcgttcgggtcggtcgtcgaggtttaggtggaggttgaggttgtcgcgcgtcgcgggaggagtttcgttttcggcggttgaggcggcggcggtataggtggcgcgggtcgcgcgcggggcgtagttcgggagcgttcggcgtcgggcgtcgcggcggttttaggttc

SEQ ID NO: 4820 - DNA, 255 bp, synthetic construct
  misc_feature 1..255: note = Description of Artificial Sequence: Synthetic polynucleotide
  source 1..255: mol_type = other DNA
ttcgatcgggagtttagagttttgttagcgtcgtattgtgcgtcgcgtaagtcgttcgatttttttagcggtatcggttttaagtagtaaatatttgtgcgtttttgagttagggacgcgcgtggggggtgggcgtgtacgcgggtgggttagcgtagagtgggagtttgtgggtgtttttcgtcgggatttttaatttagttgttttcgagagtttaagttgagcgtcgtacgtgttcgtgttatttgttgtat

SEQ ID NO: 4821 - DNA, 243 bp, synthetic construct
  misc_feature 1..243: note = Description of Artificial Sequence: Synthetic polynucleotide
  source 1..243: mol_type = other DNA
acgtttgtttgagtcgtgttgtcggggattagcgattttttatttttttttttttataggagcgtttcggttttcgttttcgttttaatcgtcggcgcgcgtttttatcgcgtacgcgtttttttcgcgcgcgtatacgttcgcgtatatacgttttttcgttttcgttcgcggagtttttttttattttttagtcgtttcgtcggttgaagtatcggcgttgggaggcggcggcgttgttga

SEQ ID NO: 4822 - DNA, 201 bp, synthetic construct
  misc_feature 1..201: note = Description of Artificial Sequence: Synthetic polynucleotide
  source 1..201: mol_type = other DNA
cggtttgttttgggttcgtgaggcgaggtcgtagcgtttcgacgtcgggtgggcgtgtgggtggagtggagatttgggtttttcggcgtatgggagtttcgtcgtttgcggtagggaatcgttttttatttttggttcggttcgggtcgggagtcgtgtttcgcgttgattcggtgtaattttttagtttattttttttta

SEQ ID NO: 4823 - DNA, 208 bp, synthetic construct
  misc_feature 1..208: note = Description of Artificial Sequence: Synthetic polynucleotide
  source 1..208: mol_type = other DNA
gagaattgaaaaggaaggcgaggagtaggggttgcgggtcgggtttttgttgttcgcggttttcgggggtcgcgtcgcgtcgggttacgtgggggttttcgtttttcgagcgggcgtcggtgggaaatttgcgcggcgagagatagggggatggggcgtttttgacgcgattgtggggtgcgggtagttttggaggaggatgttcggt

SEQ ID NO: 4824 - DNA, 257 bp, synthetic construct
  misc_feature 1..257: note = Description of Artificial Sequence: Synthetic polynucleotide
  source 1..257: mol_type = other DNA
tagcgttttcgttttggttatggagcggtcggcgttcggcgaggtggttatgagttaagttatttagtcggcgtacgttattgcgcgcggcgagttgagcgcggggtagttgtttaagtggatcgatattatcgtttgtttggcgggtaggcgggcgtcggggttgcggggaggcgcgggatcggggttgcgggagcggcggcggttgggggttggggggggtaggaaggcgaggaaggtatttgcggagagttgaa

SEQ ID NO: 4825 - DNA, 350 bp, synthetic construct
  misc_feature 1..350: note = Description of Artificial Sequence: Synthetic polynucleotide
  source 1..350: mol_type = other DNA
aaagtgtttgtaaagtttgagtagagtgcgcggggtcgagcggggagaagggtgcggggtatcggggtgagatataggaaagaggaggacggtggggagcggtagaagatagcgtttttaggattagcgattttgtggtttattcggttattgggtttcggcgtaaattttttttaggtagtgcgggcgatgttgattgtagacgtcgggtagggttttcgtgcgggcgggagcgggggaagttagtgcgttcgggcgttagttagttgatgcgggaagaggttggggagttgtagggtcgttcgttttcgggtgcggtgttttggcgtagggtttgggttgagtcgttc

SEQ ID NO: 4826 - DNA, 216 bp, synthetic construct
  misc_feature 1..216: note = Description of Artificial Sequence: Synthetic polynucleotide
  source 1..216: mol_type = other DNA
ttattttgttcgttagtatattttagagtttttaatttttttttgtatgtaagtttaggtagagttttgttaggttttatattagagtatatttttgtacggattttttaggatcgcggcgtcggttggttgtttcggtttttcgcggtcgcgtgagtttttttttggtggtggagggcgtattttaatttggaaatttttagtttttaatttggt

SEQ ID NO: 4827 - DNA, 269 bp, synthetic construct
  misc_feature 1..269: note = Description of Artificial Sequence: Synthetic polynucleotide
  source 1..269: mol_type = other DNA
tcgcgaagggtataatttgagaagttcgtggtagtttttcgtagcgtcgggtgatatagggtttttttatttttaggagaagtgggtaggagagagggtcgttcgttgtttttcgttgcgtttagggatggagggttttattatttatggaattgttggtttttttgcgtggttcgggattttagtcgtggtttcgcgttaagagggtattttttttaaacgaaatcgtttcgttcgttcgttcgttcgttcgttcgggtagtaatgtc

SEQ ID NO: 4828 - DNA, 258 bp, synthetic construct
  misc_feature 1..258: note = Description of Artificial Sequence: Synthetic polynucleotide
  source 1..258: mol_type = other DNA
agtaaaatttttattattttttcggtgtttattagttcgtttttttaggtttttgggattattttatttaaaagtagttttttttagcggggtttagatcgtttttgagatttcgttgagaaatttttagcgggttagcgtttgggcgttgggcgtcgagttcgatatggttttttggatgtcgttgatttgttcgtcggttgtttagtttttgttttatttcggggcgtagaaaggggacgggtaggggttcgattt

SEQ ID NO: 4829 - DNA, 224 bp, synthetic construct
  misc_feature 1..224: note = Description of Artificial Sequence: Synthetic polynucleotide
  source 1..224: mol_type = other DNA
agtttttagggatatttgaggtattatttttgttattgtcgggtattcgcggcgttgttaacggtttggttatatgtttttcggagagttacgggagggcgttgggtaatttttattcgagtcgcggtcgcgaggaggagggaaaaggcgagtaaaaaggaagagtgggaggaggaggggaagcggcgaaggaggaagaggaggaggaggaagaggggagtata

SEQ ID NO: 4830 - DNA, 256 bp, synthetic construct
  misc_feature 1..256: note = Description of Artificial Sequence: Synthetic polynucleotide
  source 1..256: mol_type = other DNA
ggtcgtgtagttcgtttcgttttttttttcgaagagagatttggtgttggtatgggtatttcgcggttatcggagtggtttttcggatgagtttggtttcggcgttgacgttttggttttgggggttgtttggttggtgttaggtagcggaagacgtttggagagttattcgtttttttttttattcgtttttatcgttgttcgtgttaggacgcgtagtttgtagttgtagtttaggtattggcgcgggatggcg

SEQ ID NO: 4831 - DNA, 310 bp, synthetic construct
  misc_feature 1..310: note = Description of Artificial Sequence: Synthetic polynucleotide
  source 1..310: mol_type = other DNA
tttcgtcgtttcggaggttggcggtgagggtattcgggcggtaggggttcgtcgaggggtcgtggtatacgggtaagggggttaattcggaatggttttcgagtagttttacgttttgttaaggacggtaggtgtaagggtcgggggattttttgacggggtcgttttttcgggtacggggaggtttttatcgagttttaattttgaacggggtagggggtagagtttttggtaggtaaggttttcggaggagggaacggttggggagtggcggagtttcggagtggtggttttgttaacgttttttttc

SEQ ID NO: 4832 - DNA, 410 bp, synthetic construct
  misc_feature 1..410: note = Description of Artificial Sequence: Synthetic polynucleotide
  source 1..410: mol_type = other DNA
aaggatttatttagacgtacgttcgcgcggagacgtacgttggtatacgcgtttatatacgcgagtatatatacgcgtatattattcggttcgtgcgcgcgggtcgttgtttttgttgtattatgtaaaggtggttgggaaagcgcgttgatttatatttatatagtttattttttttttatagtatgtgattaatacgtatttcggggaggagggagcgcggttgggggtgttaatcggaagggaatagatagtgagtgttattttgttgggaggttttagaagtaaagcgttaacgacgatagtagcggtggttttagttttattagtaattgtcgttggtaggagtattatacgttttaggagtttttcgggtattaagtatgggtttagttcgttttagttatttt

SEQ ID NO: 4833 - DNA, 274 bp, synthetic construct
  misc_feature 1..274: note = Description of Artificial Sequence: Synthetic polynucleotide
  source 1..274: mol_type = other DNA
agatcgagggaacgttgtttatgcggtgagagttagcgcgggaggcggcgagggcgcggggagatcggggagggggtgggtttcgcggcgttcgtcgttcgtttttacgcgcgttgtcggtatttgttcgttttgttgtaatttgttgtagtgtttgaaagagtagtaggagcgtatggaggtggggtcggggaaagattaggcggagtggttgtggggtgagcgcggagtgggtggggaggcggcggcggtggggaggggggattggttttag

SEQ ID NO: 4834 - DNA, 201 bp, synthetic construct
  misc_feature 1..201: note = Description of Artificial Sequence: Synthetic polynucleotide
  source 1..201: mol_type = other DNA
gtcgtcgtcgtcgttgcgtcgttttttatttagagttcggcggcgtcgttttttttttttttcgcgtggtggcggggtatggtattattacgggtatcgcgagggggtcgttagcgtttgcggcgggggtagcggttttatgtgcgtcggcgggttttaaggaggaagtcggcggtcgacggggcgttcgttagttagaga

SEQ ID NO: 4835 - DNA, 265 bp, synthetic construct
  misc_feature 1..265: note = Description of Artificial Sequence: Synthetic polynucleotide
  source 1..265: mol_type = other DNA
ggtcgggaggcgcggagttagtcgtttacggagtttaattgtttgtatcggggatcggcgggcggggcgcgttcgagtggtttcgtcgggaaagggcggcgggcgttggagaaggcgtttggcgcgaagttgggcggcgtttcgagggcggaggataggtggtcgcgcgatcgtagttaggtagcgaacggttcgggggttgcgtagcgcggttttaaagtttagttcggtttcgggtttagttcgttgtcgtttgttacgggag

SEQ ID NO: 4836 - DNA, 201 bp, synthetic construct
  misc_feature 1..201: note = Description of Artificial Sequence: Synthetic polynucleotide
  source 1..201: mol_type = other DNA
gcgtagggggtagttgcgtataacgcgtttttggtagcgcggcggttgcgggcggggcgcgttttacgtgtttgaaggcggacgtttttttcggggggacggagagtagagggaagtcgcgtagggttttagagtagggtaggttaggcggcggcggcggcggcgggtttttagcgagtaggtatttgggatggtggtggt

SEQ ID NO: 4837 - DNA, 362 bp, synthetic construct
  misc_feature 1..362: note = Description of Artificial Sequence: Synthetic polynucleotide
  source 1..362: mol_type = other DNA
ttttaaatcgagttttcgggtgtgtagattcgtagcggagtcgcgggagcgaggtgggaaattttggtcgcggcgtcgggtttcgttcgtcggggggcgcggggcggcgggcgtatgcgcgtgcgcggtgcggttttagttttggttgtcgtcgtttgtcgtcgtcgtcgcgatgtttattttagttaaagcggttgcgggtttggggattcggttcgggtagcggagttttcggattcgtcgattcgtcgaggagcgcgcgtcgggttttcgtcgagtagttgagttcgtgtgtttcgcgtttcgcgtttcgaagttgtcgtttcgaattttggtcggcgttgtttaggtttttcgttagg

SEQ ID NO: 4838 - DNA, 298 bp, synthetic construct
  misc_feature 1..298: note = Description of Artificial Sequence: Synthetic polynucleotide
  source 1..298: mol_type = other DNA
tagcggagacggttaagtgtttttttattaatttttttttttcggagtttaggggtgttgtatgggcggcgtttggattcgcgttttggagttattaggcggagtaaagttagcgcgtttcgcggttcggaatttagttggttcgttatttttttatttttgcgattttattttcgatcgcgttttagggtagaagcgtttgagttttcgttagtgggtatttaaagtttatgttcggcgggcgtgttgacgttattcgggggttgcggagcgggagggggcggtggggggcggggat

SEQ ID NO: 4839 - DNA, 295 bp, synthetic construct
  misc_feature 1..295: note = Description of Artificial Sequence: Synthetic polynucleotide
  source 1..295: mol_type = other DNA
gaaggatacgtaaatttgtcgagggttcgggggtttcgggttgttgttgttgttagcgttttgggaagtgataggtattaggatttgttggtgcggcggcggcggcggcggtagttttagtcgcgttcgttatatatatttttattcgttcggtgtatacgtcgcgtcgcgggtagtgtcgtttgcggaggcgcgttcggggttcgtaggggtagtagcggtagtttggtagcgtcgtcgcgttttcgggtatttggttcgcgaagtttcgtttttgtcgtttttcgcgtcgttc

SEQ ID NO: 4840 - DNA, 203 bp, synthetic construct
  misc_feature 1..203: note = Description of Artificial Sequence: Synthetic polynucleotide
  source 1..203: mol_type = other DNA
ggatgcggtcgcgtaggcgttcgttttttggttttttggtcgggtagcgggcgttcggttatcggagtttagtttaagggtttagtcgaggttttttcgcgcgaggcggttgcgttaggtgagcgggtatcgcggtcgcgttttttttgttatttatttagcggttagaggtattttgcgtttgggagttttaagtgttttcg

SEQ ID NO: 4841 - DNA, 215 bp, synthetic construct
  misc_feature 1..215: note = Description of Artificial Sequence: Synthetic polynucleotide
  source 1..215: mol_type = other DNA
agttttaaattttacgttataaagtttcgaagaggcgggttgggggcgggggtcggggcggatttttaggggcgtggttgcgcgtttgcgatttcggatcgtgttaatttcgtcgtcgttttaaaatttgtgggaaattttagttttgttatttattttttttggaggacgtagataggatttgttttgtaggagtttaggtcggtcgattcgcg

SEQ ID NO: 4842 - DNA, 201 bp, synthetic construct
  misc_feature 1..201: note = Description of Artificial Sequence: Synthetic polynucleotide
  source 1..201: mol_type = other DNA
gggcggcggcgcgcgggggatttatttcgtttttatttgatttcgggtgattgtttattgttatggtttgcgatttcgcgtggggatcgtttagggtttcggggttttggatgtttcgggtggcgtcgtcgtaattttcgtgtttttcgcgtcgtttttatttcgtttttattcgggtcgattcgagcggttgtagttttt

SEQ ID NO: 4843 - DNA, 340 bp, synthetic construct
  misc_feature 1..340: note = Description of Artificial Sequence: Synthetic polynucleotide
  source 1..340: mol_type = other DNA
tttttcgagtattcgtttcgggttttttttaagtagttgtttcggtttcggatttttatttgatttttttaatcgatttggtagggtacgtatatttgacgtttattttgtagtcgagtatataaggttcgtcgaagttatcgagtaggttttgtagttgtaggtagttttcgtcgtcgcgttttattacgtcgtggaaggtaggtacgtagtcgcgtagcgcgttagttattagtcgcgttaggtagtagcgtttcggtttcgagtagcgttttaggattagttcgttggtgttcgtcgttttaaaattttttgaggatcggtattcgttagcgtcgtt

SEQ ID NO: 4844 - DNA, 201 bp, synthetic construct
  misc_feature 1..201: note = Description of Artificial Sequence: Synthetic polynucleotide
  source 1..201: mol_type = other DNA
ggcggagggatagagttggattcggaagtcgcgggtgggagttgtttttcgcgagttcgaggttgttggtattttgtcgcgggtagttcgcgttagtttcgggagtttttgggtttcgggagagcgagtcggggtcgtttggttataaagatgttcgcgcgttcgttttgcgtacgggattcgttttgcgttttgagtttt

SEQ ID NO: 4845 - DNA, 236 bp, synthetic construct
  misc_feature 1..236: note = Description of Artificial Sequence: Synthetic polynucleotide
  source 1..236: mol_type = other DNA
aacgttcggttaggttttagagttttcgcggagagcggggcgtttgttgggggcggtcgggagggtcgggttaggggcgcgggagatttcgcggggacgcgaggtgttgcgggttttgtgcggttggttgggaacgaggagaatgtgttattaatagtgtttaatcgattgattattttgggtgttgtgtttttttttttatttttttttatttttgggaaaatgtattgtttagg

SEQ ID NO: 4846 - DNA, 251 bp, synthetic construct
  misc_feature 1..251: note = Description of Artificial Sequence: Synthetic polynucleotide
  source 1..251: mol_type = other DNA
gtgtttgaatttttcgggatatttagacggttggagtttttcgattttaaggcgggcgacggtaaagttaaacgttagcgcgttgcggttttcgggtatcgaggcgttttcgttttcgttatttatatagggcgttaagtgtttcgattcgcgagtgacgaggacgtataggttagtgatacgattcgtagttagtattgagcgggacgacggggttcgagcgtaggagggtgcgcggggagttgaggagc

SEQ ID NO: 4847 - DNA, 201 bp, synthetic construct
  misc_feature 1..201: note = Description of Artificial Sequence: Synthetic polynucleotide
  source 1..201: mol_type = other DNA
tgagtagtttaggtagtcgcggtggtcgtgaacggggcgggagtggggggtgtttaggttattagaggcggtttcgcggtttgtatcggttggagtgggcgatttagagtttgagtggagggggcggggggcggcgatagcggggggttttggtagcgatggtttgaatttgcgttggtgggggatggggcgggggcgggg

SEQ ID NO: 4848 - DNA, 206 bp, synthetic construct
  misc_feature 1..206: note = Description of Artificial Sequence: Synthetic polynucleotide
  source 1..206: mol_type = other DNA
gcgttggggaagggatttttcggaggtacggggtagcgtgcgggttgcggtagcgatttcgattcgggttttcgggttttgtcgggttgagtttgcgttcgtttcgtcgtcgttaagtttttttaattttgttcgttgcgttcggatcgcgcgttaggtttgggggcgtagtaggggttgggggcgtacgttgcgtattcggggac

SEQ ID NO: 4849 - DNA, 201 bp, synthetic construct
  misc_feature 1..201: note = Description of Artificial Sequence: Synthetic polynucleotide
  source 1..201: mol_type = other DNA
gtttcggtttcgggcgtcgattaggtttttttggttttcgtcgcgcgttttttaatttgttgttgtcgtcgtcgcgttttttaggttttgttagttattcgcgttttgagttcggggttagatttttatggaagcgtcgcgatgttcgtttttcggttgttggatttttagaagacgaaatacgcgaggtgagcggcggtc

SEQ ID NO: 4850 - DNA, 203 bp, synthetic construct
  misc_feature 1..203: note = Description of Artificial Sequence: Synthetic polynucleotide
  source 1..203: mol_type = other DNA
tgggattttttttttaaaaacgtaggcgttttttcgggtcgtagtcgtagtcgggagattgagggttagggcgcggtcgcggggttttttgggtcggggcgcggtttacgttttaggtttttgcggttttgattagaagtcgttgcgtttttggtcgttttttattcgtttcgttttcgtaattttaggtttagggttatagc

SEQ ID NO: 4851 - DNA, 216 bp, synthetic construct
  misc_feature 1..216: note = Description of Artificial Sequence: Synthetic polynucleotide
  source 1..216: mol_type = other DNA
taggggagacgaatcgattggttgttcggtcgtcggaacggtaggtttcgtcgtttttttcgtttttcgtattttcggttcggtttttttttattatcgcgtttcgttttaattcgtagttagtattttttttttatttttttttcgttttcgttgttatttttttttttggatgttggaagcgtagttggtattttcgtttttttaattttttaa

SEQ ID NO: 4852 - DNA, 335 bp, synthetic construct
  misc_feature 1..335: note = Description of Artificial Sequence: Synthetic polynucleotide
  source 1..335: mol_type = other DNA
gtttattcgttttttaggtgattcggcgttttcgtcgcgttcgttggaagtttgtaaatttttttcgggggtttcgtcgttacgttgggaagttggggacgcggggggaggtttttggttcgtcgttttcgttgtcgtttgatcgtatttttggagggtttcgtattttgttaggtttttggaggtaaatatatattttcgatttataattggttttcgcgttaggggattcgcgcgtttttatatacgtacgtacgtcgggcggattcggcgtcggttttacgttagtatttttttaggcgcgcggcgcggcggttatcgagcgtttcggtatt

SEQ ID NO: 4853 - DNA, 230 bp, synthetic construct
  misc_feature 1..230: note = Description of Artificial Sequence: Synthetic polynucleotide
  source 1..230: mol_type = other DNA
tcgggcgttgatagacgattttttttatttgttagttttttcgtttgttagtagagttgttggtaagtgagagaaaatagaggggcgcgaaggtaggcgcggttagggagtgagcggggcgttgggcgcggggcggagtcgggtgcgcggcgttcgggttaggttttatcgttcgcgtcggttttcgttttgtttagtcgtcgtttttttttttttttttattttttttt

SEQ ID NO: 4854 - DNA, 224 bp, synthetic construct
  misc_feature 1..224: note = Description of Artificial Sequence: Synthetic polynucleotide
  source 1..224: mol_type = other DNA
agcgtagttatttgaaggtttttatggttttcggcgtttgcgtttgaagttcgtttttaggttttggggggtatttgtagaaaatttttagtagcggttcgttaattagattttagggtgtacggggggtggcgtcggtaattatggtaatttttaaaataaaataatataaaataaagtaattaacgtttattaattattattttattttattttttgtattg

SEQ ID NO: 4855 - DNA, 211 bp, synthetic construct
  misc_feature 1..211: note = Description of Artificial Sequence: Synthetic polynucleotide
  source 1..211: mol_type = other DNA
gggatacgtagggggatacgtagggattgttcgcgcgaatggtttcgaacgtatgcgttttattttatattttatagtcgttatgacgatcgggaggttcgttcgttaacggttagttaacggttgcggggataagttcgttgaggttgttaggcgagttaggtttttttggatttcgtttgattcggatgggttgtgtttgaaattgatt

SEQ ID NO: 4856 - DNA, 205 bp, synthetic construct
  misc_feature 1..205: note = Description of Artificial Sequence: Synthetic polynucleotide
  source 1..205: mol_type = other DNA
ggcggtgttaggtcggggcggggggtttttttatttagtacggggtattaggtcgggatgggatttttttttagaaagtcgattggatgttaggagaggcgtacggttgggggttttttttttttttttttttttttttttcgcggttgaattaaattagaattgttatttagggtttgtgagttagaagggatcggattatacg

SEQ ID NO: 4857 - DNA, 398 bp, synthetic construct
  misc_feature 1..398: note = Description of Artificial Sequence: Synthetic polynucleotide
  source 1..398: mol_type = other DNA
ggcgcgggtttcggcgcgtttagtagttcggttagcgttagcgcgttcgttagtaggttgagaacggttagcgtttttagcgtggtcgtttgttttagtcgtagcgtgtagtcgcggaatagcgtttttagttttgggtaagcgaatttttcgtcgtacgttcggagttcgcgtcggcggtttgtttcggtcgttcgttcggcgttttcgggttcgttcgcgtcgttttcgtcgtcgttttcgtcgcgcggcgttttcgttattttagcgttatgtagcggtcgcggtcgcgggcgcgtttttcgtcggttcggggcgtcggggcgcgggcggcggcgtcggggcgggcgggcggcgggcggcgaggcgtcggggcgcggggcgcggggcgggcggag

SEQ ID NO: 4858 - DNA, 290 bp, synthetic construct
  misc_feature 1..290: note = Description of Artificial Sequence: Synthetic polynucleotide
  source 1..290: mol_type = other DNA
tatcgcgtcgcggtttcgtacgggatgcggcggtcggcgttgtgttcgcgggtcgggtagttcggttcggtcgcggcgttgcgggattcgcgcgtaattcgtgggggcgcggcgcgggcgatacgtgcgggtcgttaggagggggagggggacgcgcgtcgtcgggttcgttattttgtattcggggtcgttggtcggtcggggtatttttacgttcgtttcgttggcgagattggagggattcgggatatcgtaaagtattttttttagtgtttgggagcgttcgttgt

SEQ ID NO: 4859 - DNA, 307 bp, synthetic construct
  misc_feature 1..307: note = Description of Artificial Sequence: Synthetic polynucleotide
  source 1..307: mol_type = other DNA
ttatcgtagtcggtttcggtcggatttaaatagttttttttttattttcgggatatttattttacgtatttattattttttagtttttagatgtttcgtcgttttttttatggattttttagtatttgtaggttataggataatagaagttatagtagagttatcgaggaattttaggaacggaggagatggaatagtggagacgcgaattaggattagagttcggaagttaggagataaaggtttcgttatattgaagaggtcgtttttttttttgtagttgcgtatttgattggatagttttacg

SEQ ID NO: 4860 - DNA, 212 bp, synthetic construct
  misc_feature 1..212: note = Description of Artificial Sequence: Synthetic polynucleotide
  source 1..212: mol_type = other DNA
gggggtggttgtgggttcgaagtggaggacgagtatggtttgggagataaggaatcgttttgagatagagaaggttttcgggagcggatagagagtgggcgaaatcggtgcgtagtaatcgcggcgttagttttagcgcggtttttggggcgtagttttatttcgttttagtagttgcggagttttttgacgagttttcgtttggtagtatt

SEQ ID NO: 4861 - DNA, 375 bp, synthetic construct
  misc_feature 1..375: note = Description of Artificial Sequence: Synthetic polynucleotide
  source 1..375: mol_type = other DNA
tagggcgttttcgtttggattataggagaaagtttgggaggtaggtttaattttttaatttggcggggaattttttttttttttatatagtttgtagcgcgggggcggcggggtgatagttttcgtgtatgaattagttattttttaggtttcgtttcggcgggggtcggtcggacgttcgtttcgtataaagcgggtattcgggtcgtttggagtagaaagtcgcgtattttttttcgttaggcgttttttcggacgttttgtttagcgggtcgttcgattttttgtattatggatttcgttcgttttttggggttgtcgattttgttgttttttttgacggaggttgtattgggcgatgttgtttaggagtta

SEQ ID NO: 4862 - DNA, 201 bp, synthetic construct
  misc_feature 1..201: note = Description of Artificial Sequence: Synthetic polynucleotide
  source 1..201: mol_type = other DNA
ggcggtatggagcgtagtggttgggttcggtagattttttttttagcgttgttgttgggggcgacgttgagggcgcgcgcggcggttggttattattttcgtttttcgttttttttttttttgtgtatttattacggggagttggaaggggatggggagtagggcgaggtgtttatttttttgtatattgcgggtaatttt

SEQ ID NO: 4863 - DNA, 356 bp, synthetic construct
  misc_feature 1..356: note = Description of Artificial Sequence: Synthetic polynucleotide
  source 1..356: mol_type = other DNA
gggcggggcggcgcgcgggggcgggggagcggtcgggatacgtgtggcggcggcgggggggacgcggcgttcggggttttaagaaggtgtggagcggggcgggcgtttttttaggtttggtcgaggggcgtcgcgtagaggcggcggcggcgtacggaggcggtagacgacgcgttttcggcgttcgtagtttcggtttcgcgttttcgcggtttaaagtaattttgggagtcgtcgtttttcgcggaatttttcggcgggggttcgtttttaggttcgttttcgagttcgtttcgttttcgttcgtttttttttcgtttttttttcgcgtggttttttcgtttcggcgtttttaa

SEQ ID NO: 4864 - DNA, 265 bp, synthetic construct
  misc_feature 1..265: note = Description of Artificial Sequence: Synthetic polynucleotide
  source 1..265: mol_type = other DNA
atttttaggtattattcgagtttgttaattttattttcgtttaattttattttaaaattttttatagatgaggttttgtcgttgtcgcgaggggtcgggcggtcgcggcgggagggatagggggtttgggtgggaagggagcgcgagggtttttagcggttcgcggtttcgggcggatttttagaacgagtgcgggtcgttcggattggtagattgcgagtttcgaggggcgcgggacgtagtcggtttagataaagaaatcggc

SEQ ID NO: 4865 - DNA, 697 bp, synthetic construct
  misc_feature 1..697: note = Description of Artificial Sequence: Synthetic polynucleotide
  source 1..697: mol_type = other DNA
gcggggaggcggcgggggcgggagcgggcgaggggtcgcggtcggtcggcgttcgggtttcgattttcgggtcggttaggggcgcgtcgagtagtaggtcgtgcgttaggcggaaatgttttagtaggttttcgcgtatcgggtcgttcggggggtagtaggggtaggcggcggcgggtaggtcgagcgcgtcgggcggtggcgtagcggggtacgagtattttttgtgcgttaggtaggtttcgaggttgtggaagtttacgcggtaggtcgtgtattcgtggtagtcggttagcgtcggtgtcggggtttcggggagcgggcgtcgcggttttttgtttaggtcgatggggtcgtcggtcgcggggtcgggcgagcgcgtaggggcgaggtcggggtcgttttcgttttcgttttcgggtcgcggcgattcgggcgcgggggcgtggtcgggcggcggggggggcggggcgtcggtcgcgtgtagttcgtagagtttgcggcgtttgcgcgtgcgtataggcgcggcgggagagggggtcgggggcgcggtcggtttagggggtttcgggggcgcggtcggtcggcgcggcggcgggtcgtggcgcgaggcgtagtagtatcgtttgtgtacggtgtaggtttcgtggcggttgaagcggatgttgtaggtttcgtatagcgtgcggttggggtc

SEQ ID NO: 4866 - DNA, 226 bp, synthetic construct
  misc_feature 1..226: note = Description of Artificial Sequence: Synthetic polynucleotide
  source 1..226: mol_type = other DNA
gtagaggcgcgtagaaaacgcgcgggtggcgcgcgcggttatttagtgggtttcgttcgcgtcgtcggcgtcgtcgtcgtcgtcgtacgtgcgtcgtcgtgagcgcgaagggcgttcggattcgcgttttgttcgttcgtttgttcgtcggggttattgtggatttttaggtaatagttaagtgagaagttttttttattatcgaaaggtgtttgcgtttttttta

SEQ ID NO: 4867 - DNA, 201 bp, synthetic construct
  misc_feature 1..201: note = Description of Artificial Sequence: Synthetic polynucleotide
  source 1..201: mol_type = other DNA
tttagggaggatgggggtcgcgggggaagtcgggcgtttcggggttttcgatatttatattttcgtacggcgtacgttttgtttcgagtttgcgtttttcgagttagtacggcgagtttgggattttcgtgttttttttttgtggttttcgagaaacgtcggagtttcgtgttttgttgggggttggggggatggagaaaa

SEQ ID NO: 4868 - DNA, 201 bp, synthetic construct
  misc_feature 1..201: note = Description of Artificial Sequence: Synthetic polynucleotide
  source 1..201: mol_type = other DNA
tttggagatgtgattttttaaaagtttagtcggcgaatgggagattgaagggtgacgggaagggggtaggcgcgttcggcgttttgattgggcgtgcggcggtaggattttaaagcgttttgtttcggatcgtttgttttgggtgatttttcggatttgttttggtggaattcggatttgtttcgtcgagatgacgaggta

SEQ ID NO: 4869 - DNA, 215 bp, synthetic construct
  misc_feature 1..215: note = Description of Artificial Sequence: Synthetic polynucleotide
  source 1..215: mol_type = other DNA
agaggaggaaggaaggaggaaagaggaagacgggcggtcggaggcgcggggttgcgcggcgtcggtcggcgcggcgttggaaggcgtcggcgttaatttcgcgaggtaggcgacggagggggagcggcgttaatatataagagtattgtattacgttaatttttttttagaatagtatgcgttagtagtatatttacgttttgattgaaggataa

SEQ ID NO: 4870 - DNA, 252 bp, synthetic construct
  misc_feature 1..252: note = Description of Artificial Sequence: Synthetic polynucleotide
  source 1..252: mol_type = other DNA
tcgtcgttgttcgggtttcggggttgggtggaggaaaggggtgttcggaatcgatttttatttttcgatttttttgttggatattacgtttattttggacgtcgtaagagaagttgttaagtttcgtaggttttgattcggcgtttttcgcgtttttcggttgttttcggtttttttgtgtttcggtggagtatttgcgttcggggttggggttggaggaggtagttatacgcgcgtatacgtatacgttta

SEQ ID NO: 4871 - DNA, 203 bp, synthetic construct
  misc_feature 1..203: note = Description of Artificial Sequence: Synthetic polynucleotide
  source 1..203: mol_type = other DNA
ggcgggggagtgagcggagttttttataatgtttcggtgcggtgtagtcgcggatggatgttgcgggaaggggttgttatttgttgtttttgttagcggcgcgcggatttgttcgcgtttttgtagtcgtcgtcgtcgtcgtcgttagttcgttcggtttttgtagcggcgtcgtttgcgtttttttcgcggtcgtcggagcg

SEQ ID NO: 4872 - DNA, 201 bp, synthetic construct
  misc_feature 1..201: note = Description of Artificial Sequence: Synthetic polynucleotide
  source 1..201: mol_type = other DNA
ggtcggttttatgcggggcgtttcgtcgcgtcgcgttcgcgtttttgtatcggggtgcggggtttagttcgacgcgtattcggcgtttcgcgcgttttgcgggttttttaggtcggtttcgggtgggttaggatcgcggcgttggtaggtcggggttgagttcggtttttcgcgttggagtttttgcgtcgggtgtcgtcg

SEQ ID NO: 4873 - DNA, 201 bp, synthetic construct
  misc_feature 1..201: note = Description of Artificial Sequence: Synthetic polynucleotide
  source 1..201: mol_type = other DNA
tgaattttagagggttgggttttgatttgagtgtcgattcgttaatgaggacgggaggataaggttgtcgacgtagcggaaggtaggggggaagcgattcgaggatttgacgattatttttaggtaggggttttttaagtaggtacggaaattaattttattaaatcgcggagtggggattgggttcgggcggtgtttagt

SEQ ID NO: 4874 - DNA, 201 bp, synthetic construct
  misc_feature 1..201: note = Description of Artificial Sequence: Synthetic polynucleotide
  source 1..201: mol_type = other DNA
ataattttcggaaggagggggttaaatgcggtagcggcgggtttgaaaagggttaggagcgtcgtaggaattggggtgtataggttttcgcgtgtttagcgtttcgttttttttcgttttaggtttgttaggggcgcgcgtggcgcgggtagagtttggtgggtgggttggcgcggatagaagttttgtcggggagcgggg

SEQ ID NO: 4875 - DNA, 213 bp, synthetic construct
  misc_feature 1..213: note = Description of Artificial Sequence: Synthetic polynucleotide
  source 1..213: mol_type = other DNA
tcgatcgcgttttttgcgttcgttcgcgttttttttgtcgtttcgcggtttaggggtgtgagttattcggcgatagtttcgttaggttatttcggggcgcgtaggtggatacgtataggaagatcgttatttttaagatttttatattgtttatcgtggggcgaaattttataattttttgtataaaatgtataaataatattaaatgagttg

SEQ ID NO: 4876 - DNA, 385 bp, synthetic construct
  misc_feature 1..385: note = Description of Artificial Sequence: Synthetic polynucleotide
  source 1..385: mol_type = other DNA
tttgtacgtatgagtaggtatttaatattttttggtttagttatatgtgatatgaggttatttacgttttttttaattaatttttatgataattatgtgcgttatggagaaaattaatggaggaaaaattatagagttattcgaaatagttgcgttgtttattattcggtgtttgagtttgttttttttgtaattagattatatgtgaggtagttttagttaattgtttgtgttatttatcggggaattttagttttatttgtgaatatttaggttttttcgtcgtaggatagatgttgggtgaggtttgttttttacgtaaatatttgttttgttgtttcgagttagttacgagagttagtcggtttagataagtaggggatga

SEQ ID NO: 4877 - DNA, 278 bp, synthetic construct
  misc_feature 1..278: note = Description of Artificial Sequence: Synthetic polynucleotide
  source 1..278: mol_type = other DNA
agggtattaagaaaagaggggtatgcgagtttggaagttggagagagttcggggttttttagagcgggtgggacgtcgcgtttttaggatttcgcgttacgcgtattttttttatttcgatatttattgttatttttatagcggagcgaggggtttcgtcgagggcgagcgtatttcgtgcggttgagatgttcggaacgttttttcgcgtttcggtttttttagaaggggttatagtcggttcgcgagttttcgggcgggggttgagtcgtagtgtt

SEQ ID NO: 4878 - DNA, 248 bp, synthetic construct
  misc_feature 1..248: note = Description of Artificial Sequence: Synthetic polynucleotide
  source 1..248: mol_type = other DNA
tcggcgtaggcgagtttggtttaagggttcggatcgggtttgggaaaagtttgtttttcgagggggagagcgagcggtcgcgttgaggcgttcgcgttgcgcgggggcgtttttcgttgtttgtagggagcgcggcgcggacgcggcgggcggttcggttatttggaacgggcgttcgttttggttttcggggttgtttttgtcgtttcgggaagtcgtcgatgggttttatcgttggcggttcgcgt

SEQ ID NO: 4879 - DNA, 216 bp, synthetic construct
  misc_feature 1..216: note = Description of Artificial Sequence: Synthetic polynucleotide
  source 1..216: mol_type = other DNA
tcgtcgtcgttggtgggtggcggcggttcgggtgttttttggattgcgtagtaaagaggtattttgggagatggggttaaggttttagggggtgttattcgcgaacggtttattcgttagattaggggggttttttggttgtgcgtttggttagaattggttttgacgatggaagtttttggaattaaagcgttgtttttttttttttgtgttata

SEQ ID NO: 4880 - DNA, 201 bp, synthetic construct
  misc_feature 1..201: note = Description of Artificial Sequence: Synthetic polynucleotide
  source 1..201: mol_type = other DNA
gtatttattagggcgtttcgtaaaaaatttcgttttcgtttgtttttgggaattataggtaagttttgggttttcgaggtgtagttttaggtagagtttcgtgttgggaggtgggaagggggtttgattttggggatttaggtagtttggggatagttttattaggggtcggtgtttagaattggtgagggaggtatttta

SEQ ID NO: 4881 - DNA, 208 bp, synthetic construct
  misc_feature 1..208: note = Description of Artificial Sequence: Synthetic polynucleotide
  source 1..208: mol_type = other DNA
cgagacggataggaatcgaggagatttttttgtagcgttttttatttttcggatagaaattttgtagattacgtttatttttttatttcgtgtatcgttcgtggttcgtgggtagtagttgtttttttgggatttttttcgtttgttcgcgagttttcgtacggtcgcgtttttgttgttggggtcgttcgttggttttggttgttcg

SEQ ID NO: 4882 - DNA, 201 bp, synthetic construct
  misc_feature 1..201: note = Description of Artificial Sequence: Synthetic polynucleotide
  source 1..201: mol_type = other DNA
atttggtttaatcgtcgttagttttaagttacggtttcggttttttttttttaattgtgtgggatttcgtcgtttggtttcggtcgggcggaggggtgacgttagtcgtttatatagtgttttttggtcgttggagttcgggaaatttgtgcgttcgaatttggtttcgttaagaagttgggtaaggattcgggtttttga

SEQ ID NO: 4883 - DNA, 364 bp, synthetic construct
  misc_feature 1..364: note = Description of Artificial Sequence: Synthetic polynucleotide
  source 1..364: mol_type = other DNA
ggcggttagtagggttttcgttttcggggagaagtgtttacgatttaagggttgtttgttttaggaattttttaaagaattatagatattgagagtattcggggtttggtaggaagtgtagtgtattttttagttttagggtaattaggatagtatgaattttttattttgtggtagaataaacggttagcgtttcgatgtggcgcgttcgatttttttttatagagtttaaaagttacgtttaattaaattgtagcgttttcgttttagttgggtatcggtttggaagcggtttggaattagattggattcgaggaggtaagatttcggtagcgcgaggttaattataggttttattcgcggt

SEQ ID NO: 4884 - DNA, 213 bp, synthetic construct
  misc_feature 1..213: note = Description of Artificial Sequence: Synthetic polynucleotide
  source 1..213: mol_type = other DNA
ttttttaggtttttggcgttttcggcgcggttgttttcgcggttgttttcgtttatggtcggcggcggtgcgtagcgcggcgttgttcgtcgtgttgagcgttgattcgcgcgttcgttgttgttcggttttcggcggcgagaatggaaagttgtcgttttcgttaatttcgaggagagatagaagattttatatgttggggagaggttgggc

SEQ ID NO: 4885 - DNA, 201 bp, synthetic construct
  misc_feature 1..201: note = Description of Artificial Sequence: Synthetic polynucleotide
  source 1..201: mol_type = other DNA
ggtttgtttttggaagaatcggttttttagtttttcgtcgtcgtagttgtgatataagtaagtgtagtcgcgttgttcggggttcgttagggtttttcgcgttcgttttttatcgtggttcgcggcggtcgcgttttcgtttcgtttcgttcggtcgtttcgtcggtttttgtttttagttgggttgtcgtgacgaggaga

SEQ ID NO: 4886 - DNA, 201 bp, synthetic construct
  misc_feature 1..201: note = Description of Artificial Sequence: Synthetic polynucleotide
  source 1..201: mol_type = other DNA
tttatttatcgcgtttaattattttgtatagttggtttttttttttttttaagtatagtttaagaaggtaaagggagataggaaagggtggtagtttgacgatttagcgatgtattttagaatcgtttttatttttttagtgtgaagttttttgggagaggtgagttaaatcggacggtcggtttttgtagtcgtttagag

SEQ ID NO: 4887 - DNA, 296 bp, synthetic construct
  misc_feature 1..296: note = Description of Artificial Sequence: Synthetic polynucleotide
  source 1..296: mol_type = other DNA
tattagtcgggttggttgggcggttcgggagttcgagcggtggcggagcggcgagtagcgagtagcgtttgcgggagcggtcggtcggtcgggttttcgcgtttcgtacgttcgtacgtttagcggggttcgtattgagtatgggcgcggcggtcgtgcgttggtatttgtgcgtgttgttggttttgggtatacgcgggcggttggtcgggggtagcgggtttttaggtaagttttcgatcgaggtggggggcggcgggcgcggggggttcgggcggtcgaggcgcggtttcgga

SEQ ID NO: 4888 - DNA, 201 bp, synthetic construct
  misc_feature 1..201: note = Description of Artificial Sequence: Synthetic polynucleotide
  source 1..201: mol_type = other DNA
gtttttagtaggtttttattttatttttttcgtcgttcgtcgagttgggttttattaagggtatgcgaagtcgtaaggaaggtaagatgtagcgggcgtcgcgcgatagtgacgcgggtcgggagggttaggaattatagtcgcggttttaggacgaatttcgggtttagtagtttcgggcgtaggagtcgttaggtaggg

SEQ ID NO: 4889 - DNA, 297 bp, synthetic construct
  misc_feature 1..297: note = Description of Artificial Sequence: Synthetic polynucleotide
  source 1..297: mol_type = other DNA
tgtattttcgatacggagttggtgtttcgggaaggttgttttttgaagttttttttgttttgttgtggttttgttttttcgcggatttttttttcgtgtcgaggtttagtttttggttttaaggaataaattcgttggtttgaaagggagttacggtagaagtttaggggtagagcggcgggagcgcgcgattcgcgcggttggagtttcgggggtatttggagagtagcgcgtttaagcggggttattggtttcgcggttgcgtttttttttttttcgcgtcgcgttttttttttc

SEQ ID NO: 4890 - DNA, 268 bp, synthetic construct
  misc_feature 1..268: note = Description of Artificial Sequence: Synthetic polynucleotide
  source 1..268: mol_type = other DNA
gtgtagcggggtttggcgtcggtttttttttattacgcgttcggtttagggtcgtttagtcgtcgttatcgtcgtcgttttttgggtcgatggagtcggcgcggaaggttcgcgcgttttgcgtcgtcgtcgtttagtgtcgtcgttagtatttttttcgttttttcgtttttcgggtttatttcgcgggggcggcgttattttttcgttgtttaggttcgggtatcgcgggcgtttcgcgggcggtagtcgtttttttcgagcgcga

SEQ ID NO: 4891 - DNA, 201 bp, synthetic construct
  misc_feature 1..201: note = Description of Artificial Sequence: Synthetic polynucleotide
  source 1..201: mol_type = other DNA
aaggagcgggattgttttttcggttggacgatagcgtcggggattcgtagcgtgcgcgggtcggaattaaaaaagtagttcgggagcgcgagggttgagcggggtaagtatgggttgtttttcgtagttttttttttgttcgaggttcgggttggtcgtttgtttgtttatgattgtttagttgttttttcgattgtttag

SEQ ID NO: 4892 - DNA, 201 bp, synthetic construct
  misc_feature 1..201: note = Description of Artificial Sequence: Synthetic polynucleotide
  source 1..201: mol_type = other DNA
ttaattcgttcgtagttgttcgttttggattaagtcgtttcgcggttcgtgttaggtagtgggttcgtttttttttttttttttttttttaaattgggacgtgcgaaggcgtagttgttttttcggggttttttttattttttatatattttgttttcgttttttgttttttaggttcgtggcggagagatgttgatcgcg

SEQ ID NO: 4893 - DNA, 201 bp, synthetic construct
  misc_feature 1..201: note = Description of Artificial Sequence: Synthetic polynucleotide
  source 1..201: mol_type = other DNA
gttttggagtttagtagagttggagcgtatattttcgttttttttttttcgttttcgagtattaggcggatatattcgtatttcgaatgttttagtgggcgtagagtttattagaaatggatagtcggatttttcggcgtttgttgggggtatcgttgttaggtgtttggggttcgttttttcggttttgttcgtataggg

SEQ ID NO: 4894 - DNA, 201 bp, synthetic construct
  misc_feature 1..201: note = Description of Artificial Sequence: Synthetic polynucleotide
  source 1..201: mol_type = other DNA
ggtcgtcgggcgttgtagtgggacgcgcgcggttgtgagtttgcgggatatgtttttcgcgtcggttttttgttggcggttatgaagaggtagaacgtgcggattttgttttttatcgtttgtatttttatttatttgttggtgggcgtcgtcgtgttcgacgttttcgagtcggattacgagatgcgcgaggaggagaaa

SEQ ID NO: 4895 - DNA, 302 bp, synthetic construct
  misc_feature 1..302: note = Description of Artificial Sequence: Synthetic polynucleotide
  source 1..302: mol_type = other DNA
cgttcggacgtcggagggtttcgattttcgcgcggtttatgcgttcgcgttcgtttcgttgtttcgcgaggttcgcgggatttttttcgtcgtcgtcgtcgcgttcgtcgttttcggaggagcgggttggtcgatcgttatcgcgtcgtttttcggtcgttttcgaagtcgttttatcgcggtttttgtcgttttggggtcgcgtttcgttttcgcgttttgggggttgagtcgagtaaatttcgcgtatcggtcgacgttcggcggggatttcgttgcgtattcgcgcgttcgggtgggcg

SEQ ID NO: 4896 - DNA, 201 bp, synthetic construct
  misc_feature 1..201: note = Description of Artificial Sequence: Synthetic polynucleotide
  source 1..201: mol_type = other DNA
tttttttggggttttttatgttaggtttcgcggttgtgttcgtaagcgtagatggtttcgggattcgggttattttgacgtcgtagatttagtacgttgcggatcgggtacgttggatttcgggataagtgcggagggtcgggggttggaagggattcgagagtagagttcgcgtttttattttacggacgcggttatcga

SEQ ID NO: 4897 - DNA, 220 bp, synthetic construct
  misc_feature 1..220: note = Description of Artificial Sequence: Synthetic polynucleotide
  source 1..220: mol_type = other DNA
cggttcgtcgtttcgtatttgcgttcgtagtcgcgcgttcgttcgttcgtcgtcgttaggtttcgcggttcgggcgtttatgtcgcgttttgcgttcgtcgtcgtcgtcgttgagagtcgcggagcgtagttcgagggagcgtcgggcgggggagtcgagcgatcgggggcggggcggggggcgagagttggttcggggttcggtagtcgttcgtttcgc

SEQ ID NO: 4898 - DNA, 347 bp, synthetic construct
  misc_feature 1..347: note = Description of Artificial Sequence: Synthetic polynucleotide
  source 1..347: mol_type = other DNA
ggcggtatatcggtagggcggtcggttttgttgggttttttgggcgtcggtttcgggggttcgggcggtttttttcggttttcggtttggattcgcgaacgcgcgggcgcgaggggttgggacgcgggagttttttgagtgcggagcgcggagttttggtgtttcggcgtattgtagttatattttcgggtcgcgcgttttcgtcgttttttattcgcgtcgtagggtttttttttttgaggcgtcgttcgcgtatcgtcgggggggagggggtagcgttaataaattggggagttcggttcgtcgcgtttaggttttcgtttggagtcgtcgtattcgggacggtg

SEQ ID NO: 4899 - DNA, 201 bp, synthetic construct
  misc_feature 1..201: note = Description of Artificial Sequence: Synthetic polynucleotide
  source 1..201: mol_type = other DNA
cgtgtacgtttcgtttttattggtttcgtttcgtgattacgttttcgtaattttgatagattttattttcgaggattttttttaggagtatagtgatttcgtttttatagggttcgtttcgttatattgattttttcgtgtcgttcgcgggattttatttttgttcgtttgtttcggtgtttatggggaagtttggtgtta

SEQ ID NO: 4900 - DNA, 201 bp, synthetic construct
  misc_feature 1..201: note = Description of Artificial Sequence: Synthetic polynucleotide
  source 1..201: mol_type = other DNA
tagattcgggggaattaggaaacgcgttcggcgattttcgggtagtagtatcgggttaggtttgttttcggaatcgttgacgttattcgtcgtttttttcgtttgggtttttcgcgggtcgtaggggtggaagttcgatttgggttagggttcggatttttttttttcggtttttgcgtcgtcgttttcggtgttaggacg

SEQ ID NO: 4901 - DNA, 225 bp, synthetic construct
  misc_feature 1..225: note = Description of Artificial Sequence: Synthetic polynucleotide
  source 1..225: mol_type = other DNA
ttgtagtttgggtaatcgagcgagattttatttaaaaaaaaaaaaaaaaaaaaaaattaaggttgaattcgggttttcgtacgttcgtatttatttgcgcggttattacgcgttgtttttcggcgattaggttgtattttttgtattggtagtcgcgttatatgtagaagcgtttgtggtttttgagcggcgaggcgtagtcgtggtttttgtagcgtgcgtatt

SEQ ID NO: 4902 - DNA, 318 bp, synthetic construct
  misc_feature 1..318: note = Description of Artificial Sequence: Synthetic polynucleotide
  source 1..318: mol_type = other DNA
ggttttggtagagcgcgtagcgagtcggggatgaggttttttaagttttcgttggtttgttgtcggcgtagcgttatttgcgtagttatgattcgttgtcgttcgatgatgaggatgtatttttcgtaggtgtagtttttgaagcggtagtaacgtttgtggtttttgagttaggataggacgttatggttgcggtagcgcgcgtatttgggcgtgcgttgtaggggcgttcgtggcggttgcgatatcgggtcgtttatgtataggtagggggagtcgtagtcgtttatgtttcgggttttcgaatgagttggtagt

SEQ ID NO: 4903 - DNA, 265 bp, synthetic construct
  misc_feature 1..265: note = Description of Artificial Sequence: Synthetic polynucleotide
  source 1..265: mol_type = other DNA
gtggagggaaggagggaggaagttagttaagtttttagcgatttagtttagtatatttcgaattttgtaaagttttgttcggttttttgtagtttcgggcgttttattttgttgaggtcgttttcggttttttttgatttaggttgggcgggaaaggtcgggtcgttttcgtttggtttagatcgttggtttattcggcgggcgcgcgtagttgtatttagcgtagcgttattggttttagtttgtagattgcgttttttttttt

SEQ ID NO: 4904 - DNA, 259 bp, synthetic construct
  misc_feature 1..259: note = Description of Artificial Sequence: Synthetic polynucleotide
  source 1..259: mol_type = other DNA
gggtcgcggggtcgggggcggtcgtcgtttggttgggggatcggggtcgtgttgggcgtcgcggagtcgggatagtagtagtggcggcggggatagcgtcgcggttggggtttcgcgttttttggagcgttttttgtttagatacgacgatttcgttcggaggtatatcggttttggggataaagattagagagagatgttgtagattttggggttggcggtaaggatttttattcggtttttcgcggtttttttttcg

SEQ ID NO: 4905 - DNA, 201 bp, synthetic construct
  misc_feature 1..201: note = Description of Artificial Sequence: Synthetic polynucleotide
  source 1..201: mol_type = other DNA
gagcgtagattaggtttttagggcgcgggagtttgttgtttttttttgtaggggtcgttttcggacgttttattcgtcgttacgtggtttcgggatgtgcgggttgcggtagagagtgggtagtaatgtttttggttttgcgttttcgttttagtcgcggggatttcgaggcgagtcgttaattggtatcggtgtttcgtt

SEQ ID NO: 4906 - DNA, 323 bp, synthetic construct
  misc_feature 1..323: note = Description of Artificial Sequence: Synthetic polynucleotide
  source 1..323: mol_type = other DNA
acgcgtttgtcggggaagggttcgtcggcgtcgcgttttcgaggtttttgcggcgaatcgcgttacgcgcgatttttggtcgggggcgggaggcggcggcggcggtaggagaagtttaaggttcgagcggttcgtagtttttacgtttgtatttttttattttcgttagttcgatggttcgtttcgcggcgtgtattggagtaagtaggtttcgtttcgagcgcgcgcgttttgggaagtgttgtaagtttggagatttggagtgagtttcgggcgttgttggttcgattgttcgcggtgttttttcggtgaggtcgcggggg

SEQ ID NO: 4907 - DNA, 201 bp, synthetic construct
  misc_feature 1..201: note = Description of Artificial Sequence: Synthetic polynucleotide
  source 1..201: mol_type = other DNA
tagcggcggcggtcgagtttagttcgtagggtgggaattgagataggcgttttacgttgtttatcgcggttgtcgcggtcgtcgtcgtcgtcgtcgttacggtcgtcgttttttgtattttgtcggggtgagacggttgttgaggttgcgattgttggggcggttgttgcgggggttgtgacgggaggtgcggaggcggtt

SEQ ID NO: 4908 - DNA, 355 bp, synthetic construct
  misc_feature 1..355: note = Description of Artificial Sequence: Synthetic polynucleotide
  source 1..355: mol_type = other DNA
tagcgtcgtatagaagtcgtagagtagcggcgtgaagtcgcggttcggcgcgtatcgggtcgtcgcgaagtatagtgttattattttgttttgtagcgtcgtttcggtttttatcgtcgcgtttttataggttattaggtgtcgttcgtttagaatgttaattatggcgtagatacgtagttatttgagattcgaggatatttgtaggaggatgattatttgcggggaggcggcggcgagcgtcgcggtgtttcgtttttgttcgtattatcgggcgttggattttttaagatttgttttagatgcgtttatattttggttaggtttcgtttgtggttggagtaattgtgttcgc

SEQ ID NO: 4909 - DNA, 201 bp, synthetic construct
  misc_feature 1..201: note = Description of Artificial Sequence: Synthetic polynucleotide
  source 1..201: mol_type = other DNA
tgtatttgcgtcgtttttggtttttttaggaatgcgttgaagtttgtaattagttttgtgaagttattgagtgtacggttgagtgaaatttttaaagttcgaggaaaacgggtcggttgaatgggagttagtatggggtttttttttaagttttcgcgttgttaaattttagtagagttttttataatcgtttcgcgcggg

SEQ ID NO: 4910 - DNA, 290 bp, synthetic construct
  misc_feature 1..290: note = Description of Artificial Sequence: Synthetic polynucleotide
  source 1..290: mol_type = other DNA
ttgttatgcgcggtagttcgcgtcggggtcggtattagtagcgttcgggcggatgtagcgagtttacggaggggtatgtttttacgtattaagtataatcgttttaggaatgattcggtgatatcggtcgatgattttttttatagtttgtcggtgagcggcggcggaggtaaggtttcggcggcgcgcgcgatttcggcggcggttttttatttggtgttcggcgaggcgttgcgtaaggcgttcgacgatgggttcggtagtttgggttatttgttttataaggtgtt

SEQ ID NO: 4911 - DNA, 201 bp, synthetic construct
  misc_feature 1..201: note = Description of Artificial Sequence: Synthetic polynucleotide
  source 1..201: mol_type = other DNA
ttattcggcggaaattcgcgagtcggttttttcgcgtttaagaagtttattttttaagtttttttattatgattttgaatgcggataattggggttaaacgaggaaggatatagatttaaaagttagatttaggttttagcgcgtttttgggttttaatttgggagattcgtatttagttcggcggaagttatagttttta

SEQ ID NO: 4912 - DNA, 201 bp, synthetic construct
  misc_feature 1..201: note = Description of Artificial Sequence: Synthetic polynucleotide
  source 1..201: mol_type = other DNA
ttttagcgtttaggtcgattgcgttttgatcgggagttattgcgtttagcgtagttcgagggcgttgagttcggaggatgcggcgcggggcgggggtttcgggagtaatagagattgggattcgagggttcggttcgcgttgttgtttacgtagcgtttttattttggaaagagtgtttttcgcgcggcgggtcggttttt

SEQ ID NO: 4913 - DNA, 288 bp, synthetic construct
  misc_feature 1..288: note = Description of Artificial Sequence: Synthetic polynucleotide
  source 1..288: mol_type = other DNA
gtttaggagaattcgtaagttagcggcgtttgcgttcgagttgtagtcgttttttgtcgtttacgcgagttcgagagcggttttcggagttcgggttagcgtcgagttgtaggcgcgcgtttaatcgttttgttgggtttacgcggtttgagaggtcggagcgtttaattgttggtacgcgagtaacggtttagttaagtttattcggtttgagaggtcggaggttgcgagtgtcgttgttgaaggttgtggtggatcgggttggatcgcggattttgagttatatcg

SEQ ID NO: 4914 - DNA, 212 bp, synthetic construct
  misc_feature 1..212: note = Description of Artificial Sequence: Synthetic polynucleotide
  source 1..212: mol_type = other DNA
ttttgcgtggtagatatttagggataggttaattattatttttaattattcgtttttgagaggtttaggatttgtttttatttgatggatagtggtgtacggattaaagacgacgtaggataggtaatttttttttttaatttttcgggattagggtagttttgaagatttttagaggtagttaagtagttttttttcgtagcggggagtga

SEQ ID NO: 4915 - DNA, 201 bp, synthetic construct
  misc_feature 1..201: note = Description of Artificial Sequence: Synthetic polynucleotide
  source 1..201: mol_type = other DNA
gaggtagggaggcgggggtgcgggaggtttcgcggttgcgcgggcgcgtgttggtggtttcggcggaggtttagtttcggttcgcgttcgcggcgttttcgttgcggttcgagcggtttggttgcgggatttgtgcgtacggatggcgcggtcgtttcggtagtattcgggggtttgggcgtcgttgtttttgttgttatt

SEQ ID NO: 4916 - DNA, 246 bp, synthetic construct
  misc_feature 1..246: note = Description of Artificial Sequence: Synthetic polynucleotide
  source 1..246: mol_type = other DNA
cgtttagtttcgcgtacgtttttttgcgagttcggtcgtttagcgttttttttcgttcgagtcgtcgtttgcgtttcggggtagtcgttttgtttttagcgcgatgtggtttcgtttggttttttgttgttggggtttggcgttcgtttcgggttgggcgattttttagtagatgttttcgtcgcgtaattttagttttcgtttttttttcgagatcgcgttcggggttttcgggagtattttcgc

SEQ ID NO: 4917 - DNA, 201 bp, synthetic construct
  misc_feature 1..201: note = Description of Artificial Sequence: Synthetic polynucleotide
  source 1..201: mol_type = other DNA
ttttttagggatggagtagttacgtttttcgagtgtgtttattttatcgatggagtaaagtgaggtttttagttcgttcggatgtttttgcgtcgttcgcggggtagttttcgtatagatacgttcgtaagttttcgattcgttcgttattcgcgtttagatattcgcgagtttttggggtcgtagggacggtgtagcgtt

SEQ ID NO: 4918 - DNA, 201 bp, synthetic construct
  misc_feature 1..201: note = Description of Artificial Sequence: Synthetic polynucleotide
  source 1..201: mol_type = other DNA
attttagatatataggtagtcgggattttcgttcggtgcgtttgtttatttatttttttgcgttaggttgggacgcgtttcgtttgtaaaaggtttaaacgtatttttcgtcgcggggcgggatttaggggtttaggtttcggggtttagaggcgggtaattttgttaattttttttagcggcggggaacgtcgcgtaatc

SEQ ID NO: 4919 - DNA, 358 bp, synthetic construct
  misc_feature 1..358: note = Description of Artificial Sequence: Synthetic polynucleotide
  source 1..358: mol_type = other DNA
ttaacgggttcggtgtatcgttatcgcggtttcggtttcgttcgagttcggttgagtttttaggtcgggtttcgggtttcgggcgttcgcggggtaggacgtttttcgtcgaggcgtaggggtagttatattgcggggcgtttgggcgacggcgttaaagttagggttataagggtacgggataagcggggcggggggagtaggagattaggatagaggtcggcgttcgtcgcgggcgtttttacgtcgcgggtatcgttcgttcggttttagcgttcggggcgtaaagtaagggcgtaaattttgttcgaggcggcgacggttgcggtcggggtttattttgaagtcgttaggtgtt

SEQ ID NO: 4920 - DNA, 201 bp, synthetic construct
  misc_feature 1..201: note = Description of Artificial Sequence: Synthetic polynucleotide
  source 1..201: mol_type = other DNA
gttgcgtgttcgtcgtttatagtcgtagttaaagagacgtaggcggttttacgcggtttggtttatcgtcgtttgtagtgttcgcggcgcggggcgtttcgaggttgggtttatcgtttttttcgcgtttttgaagatttttcgggttttttcgaaggagtattgtttttttttgtattttttttttagggagttcggtcg

SEQ ID NO: 4921 - DNA, 201 bp, synthetic construct
  misc_feature 1..201: note = Description of Artificial Sequence: Synthetic polynucleotide
  source 1..201: mol_type = other DNA
cgttttttcgttttcggttcgagcggtcgttatcgcgggcgggcggcgttgcgttcgggtgcggtttttcgtcggcggcggcggcgcggtcgagaggtgcgggtttcgcgcgggcgggacgcggggcgttgttcgtaggagcgattaggtgggcgtcgggtcgatcgtagtcgtcgtcgcgttttttttcgcgtttcgggt

SEQ ID NO: 4922 - DNA, 201 bp, synthetic construct
  misc_feature 1..201: note = Description of Artificial Sequence: Synthetic polynucleotide
  source 1..201: mol_type = other DNA
gtcgaggtttagagtcggtttttgttcgtaggcggcgaacggtattttgtttcgttaggtttttgcgggtgtgattcgtgattcgtagattttttcgggcgtttttggtttatgacgcgggggttgttcgttttacgtaggcggtttcgggatgttttttcgtttagattttagcggtagaaatagtttcggatttttttt

SEQ ID NO: 4923 - DNA, 277 bp, synthetic construct
  misc_feature 1..277: note = Description of Artificial Sequence: Synthetic polynucleotide
  source 1..277: mol_type = other DNA
aggggagtaaaacggagttttcgggggtacgtaggtttcgtttttgggtgttggttttgtttttggtttttttagtcggtgtagtgattcggaatagcgcggtcgttttttcgacgttcgcggttttttattgcgtcgaggcgagcgttacggttaaagtttaagtttcggcgttcgttgcgtttgtcggagttttgtttgttcgagtaggtagcggggtttaggtacggcggcgacgtcgaagggttagtcggtagatagggttgggtttttgcgg

SEQ ID NO: 4924 - DNA, 201 bp, synthetic construct
  misc_feature 1..201: note = Description of Artificial Sequence: Synthetic polynucleotide
  source 1..201: mol_type = other DNA
tattttgtttttagttcgattttttttgcgttcggagtttgggttcggcgcgtaggagattgcgtgtattttggcgttttcgatttttgttagggcgtacggggattttagagcggattttttacgagttttaataggaggttagggagtcgggatattagagataaattttttcgaagttttttttcggttttattgatt

SEQ ID NO: 4925 - DNA, 247 bp, synthetic construct
  misc_feature 1..247: note = Description of Artificial Sequence: Synthetic polynucleotide
  source 1..247: mol_type = other DNA
gtcgttatagtcgtttcgagttcgcgcgtagttttagttgttacgcggattttttgtttagattgcgttgttgaagtcggcgtttcgttttatacgggtcgcgttaattcggtcgttgtgtacggtcgggtgcgaaattttttcgcgggtttacggggttgtcgaggcggggtcgtagcggtcgtcggggttggggttggtttcggtttgagatagttttatggaaggttaggttttcggtttttgc

SEQ ID NO: 4926 - DNA, 201 bp, synthetic construct
  misc_feature 1..201: note = Description of Artificial Sequence: Synthetic polynucleotide
  source 1..201: mol_type = other DNA
cgtcgtttcgcgcgtttcggttatcgtcgtgtttttttcgggcgttagggaaggtggttaggtggtttttgttcgtcgcgttttgcgtttcgcgtcgttcgttttgcgttttgttttgttcggttgcgttttttcgggttttttcgtcgttatcgggaagcgtcgttcggttttgagcgttgcgcgggttgcgcgcggggg

SEQ ID NO: 4927 - DNA, 201 bp, synthetic construct
  misc_feature 1..201: note = Description of Artificial Sequence: Synthetic polynucleotide
  source 1..201: mol_type = other DNA
tttgaagtcggcggtgtttaggagcgcgtcgtttttcgcgtagggtcgtttgcgggtatacgttagcgttttttagttcgcgtcgggcgttttcgcggacgcgcgtagttttcggttcgttaggttcggttcgcgtagcgtagttcgcggttatcgcgatttatcgggcgggcgggcggtcgggcgggggcgggtttggcg

SEQ ID NO: 4928 - DNA, 201 bp, synthetic construct
  misc_feature 1..201: note = Description of Artificial Sequence: Synthetic polynucleotide
  source 1..201: mol_type = other DNA
taggtttggttttagaatcgtcgggttaaggagaagaggttgaagaaggacgtcggtcggtagcgttgggggtagtattttcgtaatatgaagcgttttcgcggcggttttaagtcggataaggatagcgtttaggaggggtaggatagcgacgttgaggttttttttttcggtaggcggagggatcgcggagttcggggg

SEQ ID NO: 4929 - DNA, 356 bp, synthetic construct
  misc_feature 1..356: note = Description of Artificial Sequence: Synthetic polynucleotide
  source 1..356: mol_type = other DNA
ttgatcgtgatgataagaaggttggggaggttaagagaaaagggaagagagagtgtagttgtaaattttttttcgggttcgagaagtatcgtttttttgcgtgtttaattggtatttgttattaatatgtttgtttttatttaaatggtttagagtaaggttttgattaaattagtatttttacgttaatatttagtagcgtttttggtttttggtagattttttttttagttgttaaagtaaaattatagaagcgttttggttttatttaaggtttgttggggttttttgttttttttcggagattcgaatagttcgtagatgtgcggtatttgtttatgttcgtgtttcgtgtt

SEQ ID NO: 4930 - DNA, 201 bp, synthetic construct
  misc_feature 1..201: note = Description of Artificial Sequence: Synthetic polynucleotide
  source 1..201: mol_type = other DNA
agtcgatacgcgcgatgcgcgagaaagcgcggtgtatcgggtcgttgtcgcggtaaaattgtagtacgtggcggtatacgttgtttacgcggtcgtatacgtagcgcgttttgtgggcgttttagttttcgcggcggtataggcgcgagtagtagtaggtgtagtagttgtggtaggatttgaagtagaggtaggcgttga

SEQ ID NO: 4931 - DNA, 281 bp, synthetic construct
  misc_feature 1..281: note = Description of Artificial Sequence: Synthetic polynucleotide
  source 1..281: mol_type = other DNA
gggttttatcggggcgtagggttggggaatcggagtttcgttcgtcgattcggagtatcgtttacgtagattcgtttcgggcgagggaggggtcgggcgcgtattcgcggggagggcggcgagcggggattagtcgaagtcgggagaggggcgtttttacggggcgggaaattggcgcgcgattttgggggaagtgtaggatggggggataggggcgttttcgcgggggtggatgggggattatagcggggttggcggggtaggggtcggcgtacgaggtt

SEQ ID NO: 4932 - DNA, 222 bp, synthetic construct
  misc_feature 1..222: note = Description of Artificial Sequence: Synthetic polynucleotide
  source 1..222: mol_type = other DNA
tatcgatttttcgtgtagcggtttcgtttcgtcggattttaattattgttttaaggattgggattataatggtttttttgtgtttattattaacgttatcggttaggtgaggcggttaggcgggtcgcgggtttgggggcgggtagagagcggcgagggcggggttttacgttcgttgtattttttttatatttttagtgggatttggtgtgtgatttgggt

SEQ ID NO: 4933 - DNA, 237 bp, synthetic construct
  misc_feature 1..237: note = Description of Artificial Sequence: Synthetic polynucleotide
  source 1..237: mol_type = other DNA
gcggttcggaggcggttatgattatgtatatgaaggggcggtcggtgcgtcggttcgtggggtagatggtggtgggcgtgaagcgtttgttggtttcgacgaattcgtaaagttgttcgtagacgcgcgggaattcgtggcgtaggaagacgtcgcgtagtcgtagttcgcgttggatgtggatgaaggttatttcgcgcgcgcgtcggttcgtttcgtcgttttgatttaggttcg

SEQ ID NO: 4934 - DNA, 201 bp, synthetic construct
  misc_feature 1..201: note = Description of Artificial Sequence: Synthetic polynucleotide
  source 1..201: mol_type = other DNA
ggtttggaatagagattttagttgatttataaggacggggtttgagatttggggttttttgttatagtggtataatttagtttgtattgattaatatagttttttgtgaatttcggttttaatatttaaattaaggtattcggttgttttattaagttgttatacgtttatttaaaagtattgttagattgaggaattagg

SEQ ID NO: 4935 - DNA, 364 bp, synthetic construct
  misc_feature 1..364: note = Description of Artificial Sequence: Synthetic polynucleotide
  source 1..364: mol_type = other DNA
gcgttcgggttttgtagttttttgttgttgttcgcgttcgggtacgcgtgtttcgcgggttgcgtttgtatcgattcgtatatcgtggattgtcgcgatcgcgggttgtttagcgtgttagattttttttttttggacgtgcgtaagttgttggtggtcggtaatcgtatttagcggattttcgaggatttttttattttttacggcgatttggtttatttggattttaggaataattcgttgcgttcgttggaggagggtacgtttagcggttcggttaagttcgtgtttttcgattttagttataataatttgatttagttgggcgtcggcgtttttcgttcggtcgggaggttggtgaagt

SEQ ID NO: 4936 - DNA, 201 bp, synthetic construct
  misc_feature 1..201: note = Description of Artificial Sequence: Synthetic polynucleotide
  source 1..201: mol_type = other DNA
tcgggatacgttttagggaaatcgtttttgggtttggtagttgaatttagacgtcgagtgtagttcgttcggtgcgcgcggcgttttattgttagatttcggaaattagttgttagggtggggtcgcgttttggcgacggttattcggttatttttgtcgttttcgttttttttaagagatttttttagcgggttaatttt

SEQ ID NO: 4937 - DNA, 201 bp, synthetic construct
  misc_feature 1..201: note = Description of Artificial Sequence: Synthetic polynucleotide
  source 1..201: mol_type = other DNA
gttttagaggggagtcggggtggatttttatggaagggagacgtttgcgttagtttaggagtggagttcgtgttttatcggttttttaaattgcgagtacgaaatttttagaggggagttgagttggtgtttcgcgtgttttttattttttattttttattcgtaggttagatttgcgttgtttattttaggagggagcgt

SEQ ID NO: 4938 - DNA, 201 bp, synthetic construct
  misc_feature 1..201: note = Description of Artificial Sequence: Synthetic polynucleotide
  source 1..201: mol_type = other DNA
tcgttttatcgatgcggagcgcgagttgtttattgttttttattatgtttaggattttggtttgggggcgagagaggtgataaagagttgtatgatgcgcggggggcgcgcggtcgggtattttcggttttatttgttgtgtttttcgcggttcggtttcgttcgcgtttcgatttttaggtatcggtagcgtcggttttt

SEQ ID NO: 4939 - DNA, 222 bp, synthetic construct
  misc_feature 1..222: note = Description of Artificial Sequence: Synthetic polynucleotide
  source 1..222: mol_type = other DNA
agcgtatatatatagatataggtttatatagatagattcggttttaaaaatacgtattcgtagaggtaaaggttagcgtataagtacgtatagatatatcgataggcggttttcggatatcgcgttttttgtcgtatttacggtttacgtaagggtttatatacggttttacggaggatagttataaaatatttagatatacgttatatacgtacgcgcgta

SEQ ID NO: 4940 - DNA, 201 bp, synthetic construct
  misc_feature 1..201: note = Description of Artificial Sequence: Synthetic polynucleotide
  source 1..201: mol_type = other DNA
gtttatatatattagtgaaacggttaaatggtagtattaggtgttaagtgatcgtataggcgtgtttttgttagttgtgagtaagataaggtagtttatcgtttttagggagtttagtttttatgggggtgtattcgtttgttagggttgttgtatttaagtattattaattcggtggcgttaataatagattttattgtt

SEQ ID NO: 4941 - DNA, 265 bp, synthetic construct
  misc_feature 1..265: note = Description of Artificial Sequence: Synthetic polynucleotide
  source 1..265: mol_type = other DNA
ggcgggcgtcggcggggcggttttttagtaagatgtgcgcggcgtcgcggggcgttttttatttgtagcggcgttcgggagtcgggcggttgggttaggcggcgttttcggggttgttgcgcgttcgcgtttagagttgtcgttttagggagttcgttacggtcgcgtttcgggtacgttcggcggcgtttaacgatgatcgttttttggcggcgttttcggagtttggtttgggaatattgggtcgggtttttcgtgtgcgttt

SEQ ID NO: 4942 - DNA, 242 bp, synthetic construct
  misc_feature 1..242: note = Description of Artificial Sequence: Synthetic polynucleotide
  source 1..242: mol_type = other DNA
gttttcgtcggcggcgttgtattattattattattatatattgttcggtttagtgtagtgatttcgcgggtcgggttttcgtcggcgcgttgtagggcgcgggcgcgtagttcgttcgcgcggtttggattttttttgttcggttgttttggattttataaaaaaaaaaaaaagtttagaaattttcgaataaaattaaatattcggacgatttttttcggtgagcggcgaagatagttcgg

SEQ ID NO: 4943 - DNA, 201 bp, synthetic construct
  misc_feature 1..201: note = Description of Artificial Sequence: Synthetic polynucleotide
  source 1..201: mol_type = other DNA
ttttttttcgttttttttttgtttttttttttgttttgtggtttttttttttttttttagagatatttgggagttgtttttaagttttggggcgtttcgcggggttttgttaagggtgcgtgtgagagagggcggcggagtcggcgtcgggtgttaggggtcgagggtgggagcgggagttcgtggttttgcgttttggag

SEQ ID NO: 4944 - DNA, 261 bp, synthetic construct
  misc_feature 1..261: note = Description of Artificial Sequence: Synthetic polynucleotide
  source 1..261: mol_type = other DNA
cgggttgtacgcgtaggcggtttattcggggggcggcggcggcggtttggtcgggatgttggcggcgggcggtggcggcgcggggtcgggtttgtattacgcgttgtacgaggatggttacgaggcgtagttggagtcgtcgtcgtcgtcgtatttgggcgtttacggatacgtatacggatatgtatacgcgggcggtttgtacgcggcggcggcgtatttgtattcgggcgcgggcggcggcggtttatcggtgggcga

SEQ ID NO: 4945 - DNA, 201 bp, synthetic construct
  misc_feature 1..201: note = Description of Artificial Sequence: Synthetic polynucleotide
  source 1..201: mol_type = other DNA
ggggattcgcgtaggttagcgtgtcggttttttttagtttatcgttgtcgtcgtcggggttgttttaagggagttaagcggagtgggagcgggtttgcgcgtttttgttttgcgcgtaggggcgggggggtttaggacggggcgtttttttttatttatatgttgatttaggatttttaagcggttcggtttaggatatcg

SEQ ID NO: 4946 - DNA, 337 bp, synthetic construct
  misc_feature 1..337: note = Description of Artificial Sequence: Synthetic polynucleotide
  source 1..337: mol_type = other DNA
gtaagagcggtgtagtcgagtcggcgttttagaagtcgagaggttatataagtttacgtagagaggcgtatcggatacggtaattaggagtaatttatacgttttcgggcgtacggaaattatttgttaggaaatttttaacgttttttttcgtttatttttttttattttttttttggcgcgttttttttttttttagaggtacgtagtggagtttttggagtttcgaatttttcggatattgtagaatgcggggtttttcgggcgcgggttcggttaattagagcgtcgtttgttttttttggttaatggtaggcgttatattgttgtttaattt

SEQ ID NO: 4947 - DNA, 201 bp, synthetic construct
  misc_feature 1..201: note = Description of Artificial Sequence: Synthetic polynucleotide
  source 1..201: mol_type = other DNA
aagttttgggtggcgcgtaaaggcgtaggcgagggtcgtcgtatagagtcgtttaagttgtggtcggagcgttagggcgatttttgggaattttttaagcggaatttttcgagataagcggtttttgttttttgatattttagtcgaggtcgagttgacgcgtagttatttaattttttttgtttcggggaaataatttta

SEQ ID NO: 4948 - DNA, 201 bp, synthetic construct
  misc_feature 1..201: note = Description of Artificial Sequence: Synthetic polynucleotide
  source 1..201: mol_type = other DNA
atgagtcgagagggttgagcggagagtgtggttttcggcggttggaggtaggagaatatgttgcgttcgttcgtcgcggcgtgagaggttcgaggtgggcgcgtcggggtaggggcggtcgcgggcgtttgttcgtttagtgggcgttgttcggatttggcgaggtggtggtttgtaatattgtgttcgtattgtttattg

SEQ ID NO: 4949 - DNA, 201 bp, synthetic construct
  misc_feature 1..201: note = Description of Artificial Sequence: Synthetic polynucleotide
  source 1..201: mol_type = other DNA
gtagcgtcgcggcggttagtagcgtcgggtagtggattcgcggtggcgcggcgtcgggtcgcggtgtttagggcgggagtagtagtacgaggtttagggcgagcgtttaggatagcgttagtatgttcgtcgtgtggcgtttttggtatagcgtttggtaggtggcgggcgttcgggtgatgagtaggtagcggtttaggg

SEQ ID NO: 4950 - DNA, 201 bp, synthetic construct
  misc_feature 1..201: note = Description of Artificial Sequence: Synthetic polynucleotide
  source 1..201: mol_type = other DNA
gttttaggagggaaggaggcgacggtgtttaaggacgtcggaagtcggggattttcgtttttttcgggtttcggttaggttattagtgttggttcgcggcgcgggtgtttagttgcgtttgggatattgcgggtacggttgtggcggtaacggtagcggtcgtcgcgtcgtcgacgttcggtaggattgagcgtacggagc

SEQ ID NO: 4951 - DNA, 386 bp, synthetic construct
  misc_feature 1..386: note = Description of Artificial Sequence: Synthetic polynucleotide
  source 1..386: mol_type = other DNA
ggtggtatgtacgttttatttaaaaagtagatttttttttgtaattgttagtaagtggaaggatagtaaattttatattatttcgagatttgtgcgtttcgagcggttttaatttcgtttcgtttgttgttgttgttgttggtgttgtttcggttgtagttgttgtcgttttacgatttcggggcgttgaggtaatagggttttttttttttattttttatttttttcggtttttttatagaagcgtcgtttttagtaatttttcgtgtattttttatttttgtcgtcgtttattttattttttttttttttgttttttttttaaatcgtttttaagtatatttttcgtcgttggaagtgattataatgttgttttttaataagta

SEQ ID NO: 4952 - DNA, 201 bp, synthetic construct
  misc_feature 1..201: note = Description of Artificial Sequence: Synthetic polynucleotide
  source 1..201: mol_type = other DNA
tttttcgtttttcgcggcgcgcgtcgttttcgggggtttcgcgttttcgcgtttaggttttttttttttggcgggcgtttataggcggcgcgggtagcgcgagtttcggagtttcggaggtttgtgcgttttgagtcggtatggatttcgagtattgcgcgttttttcgcgtggggtttgtattcggtttttatgtggttt

SEQ ID NO: 4953 - DNA, 201 bp, synthetic construct
  misc_feature 1..201: note = Description of Artificial Sequence: Synthetic polynucleotide
  source 1..201: mol_type = other DNA
ggggcgattcggagttgcgcgtcggcgtacgcgatttcgttcgttttttattttttgttttattattagttttaatttggttttcgttcgtcgcgcgttcggggtttaggggagcggcgcggggatttaggttttacggcggagagagcgcgcgggattgcgaagattggggtcgagtgtcgttttttttgcgttttggta

SEQ ID NO: 4954 - DNA, 309 bp, synthetic construct
  misc_feature 1..309: note = Description of Artificial Sequence: Synthetic polynucleotide
  source 1..309: mol_type = other DNA
aggcgtagacgttggagttggagcggcgttttcggtagtagcggtatttgtttgcgttcgagcgcgagtagttggcgagtttgtttcgttttacgtttacgtaggttaagatttggttttagaattatcgttataagttgaagcgcgttcgcgttttaggggcggcggagtcgtttgatttggtagtattcgtcgagttgtacgtcgcgttcggtttgttgcgtcgcgtggtggtgtcggtgtttgttcgcgacgggtagtcgtgcggcggcggcggcggtggcgaggtgggaatcgtcgcggtttagg

SEQ ID NO: 4955 - DNA, 203 bp, synthetic construct
  misc_feature 1..203: note = Description of Artificial Sequence: Synthetic polynucleotide
  source 1..203: mol_type = other DNA
agcgtatattgtcgttagttagttagtcgtcgtcgtattggtttagtttcgaaaatttttaggcggcgtagaggtgtttaattttggttattacggcgtcgcgtcgtcggtacgtcgcgtgggttttagatagcgttagtcgttcgggtacgaagaatatttggtttggggattatagcgggttatcgatcgagggtagggtg

SEQ ID NO: 4956 - DNA, 388 bp, synthetic construct
  misc_feature 1..388: note = Description of Artificial Sequence: Synthetic polynucleotide
  source 1..388: mol_type = other DNA
ggttcggttcgcggagttagcgtttttttcgcgtcgatttcgggtttcgggcggtcgtcggggggcgtcgggcgtatttttcgttgttaatttttcgttcgtgttttcgttcgcgtttgggtttcgtcgtattttagtagaagttattatagagaataaattatttttttgttttcgagatgggttttcggggaggaaggtaaattgtttgtttcgtgtataataagttaggcgtggagagtagcgcggaggaggtcgcggtagttatcgagcgggtagagtttttcgtttttattcgtcgttcgcgtttgtcgagttttttgtcgagcgggcggcgcgtaggttcggagaattttaaaaggtttggaatatcgggttgtttttcggt

SEQ ID NO: 4957 - DNA, 241 bp, synthetic construct
  misc_feature 1..241: note = Description of Artificial Sequence: Synthetic polynucleotide
  source 1..241: mol_type = other DNA
agttttttatttagatcgcgttagtgcgtttcgggttttattagtttttattaggcgttgtttttttcgtttttatttagtttttttttttcgttttttcgcgagtgtatttaagcgttttcgttttatttatttttagcgtttttttaagtttggaggagcgtttagagtagtagaaatagtaggtattttatatcgttcggcgtggggatttcgcggagcgtcgttgcgcgtcgttttt

SEQ ID NO: 4958 - DNA, 232 bp, synthetic construct
  misc_feature 1..232: note = Description of Artificial Sequence: Synthetic polynucleotide
  source 1..232: mol_type = other DNA
cgtttttttttttagcgtttaggttgggggcggcgtcggtgttagtttagtttagggcgaagtttttagggtcggttcgggtcgggttgcgggattcgtcgtggagcgtaaagtgtttgaagttttcgcgcgtattcggttttgtttttaaaggttttttagaaatgtaagaggttaggcgtagaaatatatacggacggtagttttatgagaaaatgtagataaagagttc

SEQ ID NO: 4959 - DNA, 214 bp, synthetic construct
  misc_feature 1..214: note = Description of Artificial Sequence: Synthetic polynucleotide
  source 1..214: mol_type = other DNA
gtttttttgttttcgcgttttttggattagttttggtggggagttggaaggtatcgagtgcgtttcggttaagaagggcggatagttttgtgcgagtagcgttcggttggcgcggcgcggggtgttttttatgttaaaggaaaggatggattttttgtttgtttagggtttttattttttaaaatttttttaattgcggtattggaagggattt

SEQ ID NO: 4960 - DNA, 250 bp, synthetic construct
  misc_feature 1..250: note = Description of Artificial Sequence: Synthetic polynucleotide
  source 1..250: mol_type = other DNA
cgtagcggggtcgttttattgtcgtatttttatttcgcgttttgcgcgtttatttgtttacgaagttttcgagtatcgagtttttgtcggcgttttggtcgtttattacggcgatttgcggtagttttagtaggtagttttgttttagcgtcgaaaacgcgttttgtagacggtttattagcgggattagtttttttatttttcggttttttattttgttcgaggggtcggcgattagttggtttttgtt

SEQ ID NO: 4961 - DNA, 201 bp, synthetic construct
  misc_feature 1..201: note = Description of Artificial Sequence: Synthetic polynucleotide
  source 1..201: mol_type = other DNA
tggtcggtgaagttttaggattcgttcgtttggggttaaggtaaggggtgcggtacgaggagcgtagggagtttcgagttttaggcgtagatttagttgcggattcgtcgtatagttttggtgttgtaagcgtggatcgtgggcgtaaggtttcggcgggaggtattcggttcggtcgcggtcgggtttgtagggttttgg

SEQ ID NO: 4962 - DNA, 467 bp, synthetic construct
  misc_feature 1..467: note = Description of Artificial Sequence: Synthetic polynucleotide
  source 1..467: mol_type = other DNA
tcgggtatcggcgggagaggggggagaagcggcgtggagaggatttggtaagggtttgtttttaaatttagattatgatttaatattttggacgcgaagcgaagatgggaaacggtcgtttgttgagagggggtatttgtagtttttttagaaaaggttggggtaggagagcgtgcggttagaggggtgggggtatcggagggggggttttattttttgttttatagtcgggtttttttcgcgaggcgttgggaagtatgaggtatgtagtatttaaaatgttttttgaaaaagacggatttgaagtttttttttataaatacgttattgtatttattttttatttagagacgggttgcgcgtttcgagttgtacgggtaggtatttttttcggttttgttttataaggtggggagagcggggttggacgcgggagggggcgggggggggagcgtgagaagaaacga

SEQ ID NO: 4963 - DNA, 201 bp, synthetic construct
  misc_feature 1..201: note = Description of Artificial Sequence: Synthetic polynucleotide
  source 1..201: mol_type = other DNA
cgtatagttagcgaagcgattcgagggttagcgaataagcgttggattttcgtaggtttcggcgattttagattcggtttttcggcgaagataggaaaacgtgtgtcgagagtcgttggagggaatcgttcgtaaatcgaagaagaaattaaattagtagcgaatatttgtaaattagtgttaagttgtgagtttttcgag

SEQ ID NO: 4964 - DNA, 232 bp, synthetic construct
  misc_feature 1..232: note = Description of Artificial Sequence: Synthetic polynucleotide
  source 1..232: mol_type = other DNA
tcgggcgcgggggaggcgtgggtgttggggcgggcgagtttagatttttcgtgggttggtttgtgggtgttttttcggaaataaatgaggttgtaggagcggtgatcggtttgattgtttttgggggtttcgaattcgtgggtggagagggtaaggcggaggtcgtggttagtatttttttagtgataatgtcgtcggggatttttttttttattttttgggagtattttag

SEQ ID NO: 4965 - DNA, 222 bp, synthetic construct
  misc_feature 1..222: note = Description of Artificial Sequence: Synthetic polynucleotide
  source 1..222: mol_type = other DNA
tacgattttaggttcgttgatgatcgttgtggtatgaatgaggttatcgtattcggagaggtggatgtttagatgtggatttaggaaatggttttatttcgaaagtttcgggttagtgggcgtgttttttggttagtgtttttacgttcgcgttagaagggtagtaggttttcgtagggttcggcgttttatttattcgtgttttttttgttgtttttagtt

SEQ ID NO: 4966 - DNA, 239 bp, synthetic construct
  misc_feature 1..239: note = Description of Artificial Sequence: Synthetic polynucleotide
  source 1..239: mol_type = other DNA
tagcgtcgcgttttacgttcgttatcgtcgtcgtcgttttagtatatcgtaggcgtgagtttcgtcgcgatcgggagagtttttttagttgtgcgttttcgaggtatttggtcgggcggggaggcgtcgggtcggggcgtataggggttaggcgggggcgttgttgtttatttttcgtttttcgggcgtgcgtttcgtttcggagttcgtatttcgcgttcgcgtttcgtttggaagtt

SEQ ID NO: 4967 - DNA, 209 bp, synthetic construct
  misc_feature 1..209: note = Description of Artificial Sequence: Synthetic polynucleotide
  source 1..209: mol_type = other DNA
gtttattcgtcgtagtagtttatttttgttcgttagggagtttagggtagtttttgaagttgttagatttttttacgtaggcggcggcgttttgtattgcggagtcgcgttttgggggagtagtatttttagtttcggcgtttcgtagttagatagttttttttagggtggtagtatttttcggttagggtgtagggattttcggggcg

SEQ ID NO: 4968 - DNA, 380 bp, synthetic construct
  misc_feature 1..380: note = Description of Artificial Sequence: Synthetic polynucleotide
  source 1..380: mol_type = other DNA
gtttagatagataaaattattttattaaagtgtaatgggagagaggaagaggagtaatgagaaggtatgtgagcggggagaaagaaaaagttcgggaggcgaaaacgaaatttatttttttgcgtttatttttgttagaggtttgtaggacgtgttttaatttggtatttcgagtttagaataaaagttacgggggttgcggtatgggtagggggaaggcgcgcggtggttgacgcggggtaggggttttggcgagcgcgggaggggcggttagtagtcgttcgcggggttggattgggagtttcgtgcgatttcgggtttggcgtttgggtcgggggtggttttcgggtttttttcgggggtcgtcgaggttcggtttc

SEQ ID NO: 4969 - DNA, 394 bp, synthetic construct
  misc_feature 1..394: note = Description of Artificial Sequence: Synthetic polynucleotide
  source 1..394: mol_type = other DNA
ggtttttttttatgagggtttcgagtagatgaggtttaaaagtcgttttaaggagttttttttaagtttgattcgagtgggcgcgaatttttatagtagcgttaagtagtaggattatagcgttagcgtttggtttcggaggaaagataagttggagtacgtaagggcgattcgttttcgggggtttcggttaggtatttgtcgtatgtatttttttcgtggtggtggtatgagcgcgcgcggggcgcggggggtaggcgaggggattttggtaggcgtcgacgttttaggtcggattcgggggtttttttgtttgtagttttttgttttaatgatcgggttgcggggaggggagggtaggtttttttttaggtttttggtttttgtcgattcg

SEQ ID NO: 4970 - DNA, 201 bp, synthetic construct
  misc_feature 1..201: note = Description of Artificial Sequence: Synthetic polynucleotide
  source 1..201: mol_type = other DNA
ttcggtttttttatttcggttttttatggggttttcgggtttgttcgttgtgagtagttttattttggggtgttggcgggatggttgtttcgtgtagggcgttcgggagtttagatttcgtggaaatgtttggggtttttttttgtttagaggggatagtgagtagttacgttgcgatatgtttgagggattcggacgaag

SEQ ID NO: 4971 - DNA, 557 bp, synthetic construct
  misc_feature 1..557: note = Description of Artificial Sequence: Synthetic polynucleotide
  source 1..557: mol_type = other DNA
cgggggaaaggtcggcgttttagggcggggaggatttgggagtggagttcggagataaaatcggggttaggtagaggagttagagggaaagttagtaaacgcgagttcgggtgagagttatcggaatgcgggaacgtagtttagtcgggaatagggttttcgataggggtcgttcgtggttaggacgcggtcgttgaatagaggtcgcgcggcggtttttgttcgagggatttcgtgggcgggggttatacggaggtcgcgtacggttttcggggttggcgggggtaggtgggaggatttttttcgggttcgcgaatttgatttggtagcggttaggtgtttggaagcgtttttaaatgatagggttataaagatatgttggttaggtttgtagttagcgtagtaacgtggtttgtaggagcgtagaacgaggttagatagggttattcggacgtcgtgttgttagtgggtgggggtcgggagtaagcggtattggtttggagatttcgcggtaggtgattttttttatttgggtagcgaggttgaacgatggcgat

SEQ ID NO: 4972 - DNA, 212 bp, synthetic construct
  misc_feature 1..212: note = Description of Artificial Sequence: Synthetic polynucleotide
  source 1..212: mol_type = other DNA
ttggagggagttgggggattttggagggtgggaagtggttgattttcggtggtcggatatttatttagagtttgattcgtattcgtgtttttttggaagcgttataattgcggggaaggagtttttagaaatcgtgttagttttaatatggcgggttaaggtggtttttaaaaattgaaaataaaggttttgaggtgggaaaaaatttagtt

SEQ ID NO: 4973 - DNA, 201 bp, synthetic construct
  misc_feature 1..201: note = Description of Artificial Sequence: Synthetic polynucleotide
  source 1..201: mol_type = other DNA
aatagtttttttcggtttttttagttttgtttaaggggtttggaaatgttcgtagttttaagaaaggttttatttaagtataggatggggtggggcgggcggggttaagattgttttggggattgaatttattttcgtttttagcgattttcggcggataaagcgtaagtttgtgtatacggtcgattgagttattggaaa

SEQ ID NO: 4974 - DNA, 201 bp, synthetic construct
  misc_feature 1..201: note = Description of Artificial Sequence: Synthetic polynucleotide
  source 1..201: mol_type = other DNA
gggggagttaggggtttttcgtttggggattttcgtgttgggtatttcgtacgttttggacgcgcgtagttttatcgggagcgaattttgtttcgtttgcgggtgttacggagaggggttgggaagtcgagttagttttggcggcgattgggggcgtttttggttttttgggggggcgggggcgcgtattgttgtttagga

SEQ ID NO: 4975 - DNA, 294 bp, synthetic construct
  misc_feature 1..294: note = Description of Artificial Sequence: Synthetic polynucleotide
  source 1..294: mol_type = other DNA
tttgaaagtttttgaagcggttttttttttttttttttttttttcgtaggtagagttgtggtgtggttgggtggtttgcgtgggcgttcgggggattcgcgggtattcgggacgaggcgagggcgtagaaaatttggagtttaattagtacggagttgagttttcgcgttttaatttttaggtgatttcgtgcggcggcggcggtagtagtagtggtagcggcgatcggagttcgtagtagtttcgagcgttttcgggaggataggcggcgagttcggcgaatcgttatttgtt

SEQ ID NO: 4976 - DNA, 244 bp, synthetic construct
  misc_feature 1..244: note = Description of Artificial Sequence: Synthetic polynucleotide
  source 1..244: mol_type = other DNA
ggcgggcgtgagcggcggaggagtcgggcgcggcgatacgcggttatggagcgggagtcggcggggatcgaggagttcgggttttcgggacggcggaggcgtcgagagggtaggacgcgtacggtgcgttttaatttgttgtcgttttcgggcgtcgaggattttgcggttggcgcggttaagggcgagcggcgacggcggcgcgggtgtgtttagtatttggtcgataatcggtttaagatta

SEQ ID NO: 4977 - DNA, 303 bp, synthetic construct
  misc_feature 1..303: note = Description of Artificial Sequence: Synthetic polynucleotide
  source 1..303: mol_type = other DNA
cggggtagtcggggtcgggagagcgggcgtagcgcggcggggatcggagtcgcgggcgtcgggaaaggttttcgttaggaggggagggaatttcgggagcgcgagttagggggaggcgcgtcggaaagcgagagtgataagtagtttataagtcgaaaagtttttcgcgggaggcgcgcgtcgcgtgggtttcgatttagtcgttgcgcgtcgtcgtggtatataggttgaaaagtttgcgaagttatagaagttaggttcggcgtttagggggttttgattttgtttttatggttttagatt

SEQ ID NO: 4978 - DNA, 286 bp, synthetic construct
  misc_feature 1..286: note = Description of Artificial Sequence: Synthetic polynucleotide
  source 1..286: mol_type = other DNA
cgcggaggttggttttggtagtggttagggagtggagaaagtaaattagagtcggttcggttatcgattttgcgaagttttttcgattttagtttagcgcgggagggtggcggaaggtggtgtatcgtagcgtggttttcgtcgttgtcgtcgcggttttgtaaagtgttagcgggggcgaaagcgagagtttaaaggaataggaggtttattgaattttttatcggagtttttaggggttttggttttttagtttgtttttgtttttttagttcggggatttgtt

SEQ ID NO: 4979 - DNA, 261 bp, synthetic construct
  misc_feature 1..261: note = Description of Artificial Sequence: Synthetic polynucleotide
  source 1..261: mol_type = other DNA
gggaatcgagaagaggaagaagcgaacgcgagtaggagcgtagcgtttttcggatttttgaggttttttttgtaatttgttatattcgtagtttttattcgatattgaataataatcgcggggaggagaggttatttgtagtcgaggttcgtaaattgtcggttttattcgggtagcgttaattcggtgttcgcggacggtgattttcgagttttagcgatgcgttttattgggtttaaaatagatttaattttatagtta

SEQ ID NO: 4980 - DNA, 201 bp, synthetic construct
  misc_feature 1..201: note = Description of Artificial Sequence: Synthetic polynucleotide
  source 1..201: mol_type = other DNA
tattgaaaggtagaaatggggagtaggtatttagttcgcggtgggtagggttttaggaggtagttttcgttcggcgatagttttcggggcgtaatttttcgtaggacgcgtatttgttaggatagttattaagaggatgcggaggttgggggttttttcggggataaaattagggtattttaaggaattttttgcgcgttt

SEQ ID NO: 4981 - DNA, 201 bp, synthetic construct
  misc_feature 1..201: note = Description of Artificial Sequence: Synthetic polynucleotide
  source 1..201: mol_type = other DNA
gttggattgggtgcggttgtatttgtggagtgggtggttcggtgattgttattcgggttagtgttgttagtagatgtgtatattttgggcgggggttggcggtcgagtgttattagtaggggcggcggttaggtagttattcgtcgttttttaagttcggcgttgcgcgtagggtttggagtattcggtgttgagacgcga

SEQ ID NO: 4982 - DNA, 201 bp, synthetic construct
  misc_feature 1..201: note = Description of Artificial Sequence: Synthetic polynucleotide
  source 1..201: mol_type = other DNA
taagttgttttttgttttgggtttttgatatttttatagtttttgaaagggttttcggagattttagagagaggcgggtgtcgaggggttacgagttcgcggttgatattcgcgttgcggaagagaatggtattgattgagggttttggggatttgggttttggcgttttggattttaggattatgtatttttcggggcgc

SEQ ID NO: 4983 - DNA, 201 bp, synthetic construct
  misc_feature 1..201: note = Description of Artificial Sequence: Synthetic polynucleotide
  source 1..201: mol_type = other DNA
cgttcggttcgcgggttttaattttatcgtcgtcggtcgaattttgttcgttcgcggcgcgtatagtcggcgttcgcgtatacgcgcgtataaattttacgtaattcgcggtcgtttcgtttcgtcgtcgtcgtagttcgtttgtcgcgcgtttatagttcggttcgagtcgcggggttcgagcgatagcgacggcgtcgg

SEQ ID NO: 4984 - DNA, 201 bp, synthetic construct
  misc_feature 1..201: note = Description of Artificial Sequence: Synthetic polynucleotide
  source 1..201: mol_type = other DNA
cgttcggcgtagagtcgcggtttttttgtttgcgttcgtagtttgcgtcgttcgatatagtgggggtggaggtagttcgtttagttgggcgttttggtgcggtgtcgcgtttaaagttttatttttgcgtcgagggtttgtgatttgtagagagcgatcgtttgattttaagttggttgtagagcgaggttagtcgggata

SEQ ID NO: 4985 - DNA, 201 bp, synthetic construct
  misc_feature 1..201: note = Description of Artificial Sequence: Synthetic polynucleotide
  source 1..201: mol_type = other DNA
tttcgaggtgagtcgtcgttgcgtttatttgttttcgtagttggattgtggagtcgcgttcggaggagcgttggatacggatatttttaatttttttttcgatttcgttttttggttttttgtatatatattttcgttaggaggggaggggaaggtttagtaattgtttggtttggttttgatttatcggttttttcgtag

SEQ ID NO: 4986 - DNA, 201 bp, synthetic construct
  misc_feature 1..201: note = Description of Artificial Sequence: Synthetic polynucleotide
  source 1..201: mol_type = other DNA
gcgtcgtttacgttattcgttatttcgggtcgcggtttcggttcgggtttagtggttgcgtcgtttttcgttagtaacgttcgcgcggaatgagcgcgtcgcgttgttcgcgtttttattcgtagggttcggcgtttttttttcgttcgtcgtttttatagtcgcgcgtttattggttcggttagtttacggggagtcgcg

SEQ ID NO: 4987 - DNA, 201 bp, synthetic construct
  misc_feature 1..201: note = Description of Artificial Sequence: Synthetic polynucleotide
  source 1..201: mol_type = other DNA
gcggaatttcgcggtcgagagtcggtcggtttagttgggcggggatacggcggtttcgggtttgtgttttagttttagtcgggttttttcgcgtcgttgcggttgttgcgcggtgcggtcgtgataagttatagtaaatttgtttttcgcgtcgttttaagttattaggaagcgtaatcggtgtttttggggatcggcgaa

SEQ ID NO: 4988 - DNA, 344 bp, synthetic construct
  misc_feature 1..344: note = Description of Artificial Sequence: Synthetic polynucleotide
  source 1..344: mol_type = other DNA
ttttgattagatgaacggagtggtcggaggtaagtcgcgtgttttcgtaggttcggatttgcgcggttcggaggtggtggatggggtgtagtgggtgtgcgggaatcgtaggagaggattggggttttaggtggacggtgttgattgtattggttttgaagattggaagtgggtgtaggaggaatttgcgatagttgagattagggcgcgcgggtagatgcgttaggtcgttagtaaatcggcgtgcgtgcgtttcggcgcgtttagtttcgggcgagcgtagggatgggggtggaagaggcgttttttcgggtttcgaggtttgcgtaggttttttggtcggt

SEQ ID NO: 4989 - DNA, 201 bp, synthetic construct
  misc_feature 1..201: note = Description of Artificial Sequence: Synthetic polynucleotide
  source 1..201: mol_type = other DNA
ggcgtttgttcgaggcgggagtcgttgggttatgtttttgtttattaggtttttcgaatttttggtagggtagcgtttgttcgtgttttcgatttttttcgtaggtaattcgcgcgaatttggggttcgtagagagcgagcgttcgcggatatcggttgaatagtttggaggttgcgcgagggggcgtcgcggggagggat

SEQ ID NO: 4990 - DNA, 218 bp, synthetic construct
  misc_feature 1..218: note = Description of Artificial Sequence: Synthetic polynucleotide
  source 1..218: mol_type = other DNA
cgggtgtcgtggtgcggggtggggatagttaatttagcggggacggaggaagttgggggtagttgggtgcgtgttttgtatcgtttatttgtcggggttcggtttttggcggtgggcgagagggagtatattcgtttatattttaggaatttgttggggagatgagttcgtggggttagaaagaagggaaaaattttttgggtaagggagagaataat

SEQ ID NO: 4991 - DNA, 234 bp, synthetic construct
  misc_feature 1..234: note = Description of Artificial Sequence: Synthetic polynucleotide
  source 1..234: mol_type = other DNA
cgttgttgttcgttatcgtcgtcgtcgttcggttatcgtatcgtatatattaattatttatcgttcgtttttagtttttcgggcgaagttaattataggcggaggtttcgttaatggggtcgtcgtcgtcgtcgtcgaggaggtagttagtcgcgcgttcgggcgtaagcgatagttttttagggacggggatgggtcgggggcgcgcggggggcgggggcgtacggggcgcgt

SEQ ID NO: 4992 - DNA, 201 bp, synthetic construct
  misc_feature 1..201: note = Description of Artificial Sequence: Synthetic polynucleotide
  source 1..201: mol_type = other DNA
tgaggcggagagaggtcgtttcgcgtttggggttttcgaaagcggttagttgtttttttgttttttttgagcggggagcgttgcgttttttgcgggttgcgggagatttttttagattttcgggtgggaaaattatattgagcgtttcgggaggttgttagatataatattgtatttggtatttttgttcgggtgttttcg

SEQ ID NO: 4993 - DNA, 201 bp, synthetic construct
  misc_feature 1..201: note = Description of Artificial Sequence: Synthetic polynucleotide
  source 1..201: mol_type = other DNA
agttagggtcgggggcgtacgtcggaatatttgggtcgtcgggtatcgagcgtcggggggttgcgcggcgcgtatttggagagggcgtagttatgcgggcggcggcggcgggggggggcgtgcggacggtcgcgttggcgttgttgttgggggcgttgtattgggcgtcggcgcgttgcgaggagtacgattattatggtt

SEQ ID NO: 4994 - DNA, 235 bp, synthetic construct
  misc_feature 1..235: note = Description of Artificial Sequence: Synthetic polynucleotide
  source 1..235: mol_type = other DNA
gtaggggtgttttgttcgtacgtatttacgatagtgagtagtatgttgtttagtagtagcgttaggaatacgatgaataggatgagttttcgcgagcggcggtttttttgtagttagcggattagcgttagttcgtttagggttatggtttcggggtttcgttgcgggcgcggtgcgcggtgaggatttaaggcggtcgtggattttttattttttcgttttttaggtcgcggaa

SEQ ID NO: 4995 - DNA, 201 bp, synthetic construct
  misc_feature 1..201: note = Description of Artificial Sequence: Synthetic polynucleotide
  source 1..201: mol_type = other DNA
ttttttaatagggcgcgttggttcgcgagtcggaggaattttcgtttaggttttgttaagcgtttattcggagtaggtcgggggtagtgaaggatgcggcgggagcggcgcgttgtagtttcgcgacgtggtacgtattttggaagcgatgatttagatatcggtagcggtggatgagttaggggtagaaggtggacggat

SEQ ID NO: 4996 - DNA, 241 bp, synthetic construct
  misc_feature 1..241: note = Description of Artificial Sequence: Synthetic polynucleotide
  source 1..241: mol_type = other DNA
agttttcggttcgaggttgcgttaattcggcgtcggatgttaatgatgaaattaaaatgttatttaagttaaatgcggggagtatacggcgattgggcgcgtataatggtaaatgggattaggtaggcgaaggtttagtcgagtttcggtttcgtagtcgttttcgttatcgtttttttttcgttttttttcggattttggcgttttggtttcgggttataagagttcgttcgttattggt

SEQ ID NO: 4997 - DNA, 201 bp, synthetic construct
  misc_feature 1..201: note = Description of Artificial Sequence: Synthetic polynucleotide
  source 1..201: mol_type = other DNA
gacgatttgggtgatttgggtggaaggtggtgtagtaggtaggtagtggggaggggcggggaggaaatttagggggagggggcgtcgaggttggtgaggcgtttttttcgcgttagggatatgtaggtatcggatggttgcgtaggggtttttgttcgtttggttttgggtgcgttcgtttagtttcggtgtaaatgtttt

SEQ ID NO: 4998 - DNA, 201 bp, synthetic construct
  misc_feature 1..201: note = Description of Artificial Sequence: Synthetic polynucleotide
  source 1..201: mol_type = other DNA
tcgtttcgatttattaggcgcgtagggttcgttttcgaaattcgcgcgggttttcgtagtcggtcgcgcggtttttagtcgcgaagagagcgtcgcgtacggtggcgtcgttatagtcgtgggtcgtcgcgtttaggtagcgttttagttgttcgtaaagtttttgtagcgtcgtttcgtcggggtttacgcgcgtcggtt

SEQ ID NO: 4999 - DNA, 217 bp, synthetic construct
  misc_feature 1..217: note = Description of Artificial Sequence: Synthetic polynucleotide
  source 1..217: mol_type = other DNA
ttaaggttggtttgtgttagaacggcgcgcgcgcgcgtacgtacgtatatatacggggggaaatttttttaaaaatgaaaggttagaagagtttagcggcggcgcgggcgttgcgcgagggtttcggagttgattcgtcgaggtaggaaattttttcggtcgcgacgttcggtttcggttcggcgttcgcgtgggatggtgtagcgttcgtcgtcgg

SEQ ID NO: 5000 - DNA, 201 bp, synthetic construct
  misc_feature 1..201: note = Description of Artificial Sequence: Synthetic polynucleotide
  source 1..201: mol_type = other DNA
ttatattgcgtaagagatcgtaatgaagttcgtagatttttaggttggagtcgtagagcgaggtggcgaggtggagaacgcggggttgggtttggatagcggttttggggtcgtttggagttttcgtttttttaattcggaaggtagcggattgatatttgcgtcgaagtcgcgcgtattttacggagggtcgggattttg

SEQ ID NO: 5001 - DNA, 201 bp, synthetic construct
  misc_feature 1..201: note = Description of Artificial Sequence: Synthetic polynucleotide
  source 1..201: mol_type = other DNA
gaggggtggttttgttttatttagggggtgtcgtgggtaaaggttttggggttatttgtttggtgttttggagggcgtagggtaggagtcgtcgaggttcgcgggttattgtggggcgcggaattttagattaggtattcgcggtttaattttcgggttaggggattcgcgggggttttacgaatttgtttggtttatttg

SEQ ID NO: 5002 - DNA, 201 bp, synthetic construct
  misc_feature 1..201: note = Description of Artificial Sequence: Synthetic polynucleotide
  source 1..201: mol_type = other DNA
attcggggtcggaggtaggcgcgtaattatggggatcggggcgggcgatggcggcgggcgggtttttgtcgtagggtggggatggtttttttagtcgggcggtcgtcgttatattgtagagcgtatttaaagagatatttcgtttcgcgttcgttttttagtattagattttcgttcgaaaacgtcgtcgggcggattgta

SEQ ID NO: 5003 - DNA, 317 bp, synthetic construct
  misc_feature 1..317: note = Description of Artificial Sequence: Synthetic polynucleotide
  source 1..317: mol_type = other DNA
tatcgttcgggttttcgtttggttatagtattaggttatagtgcgttggtttttgattatttttttggttcggtggtcgtttttcgtttttttttagttcgcgtcgttgttttgttttaggtttcggtgcggttttaagttttagtttagggtttttaggtttttttaggcggcggtggcggtatttatttgggtcgcggagtcggggtttggtacggtttcgtaggtggtaaatgaaattttggtagttgtcgtgttttagggttttacgggtatagagttcggttagtagttgtagcgtttggtgatagagcgcg

SEQ ID NO: 5004 - DNA, 221 bp, synthetic construct
  misc_feature 1..221: note = Description of Artificial Sequence: Synthetic polynucleotide
  source 1..221: mol_type = other DNA
atttatagcgacgggtaattacgcgggaggagtaggttaattttcgatagtggaggtgaagatgcgtgcgtttcgcgtattttgtttttcgcgcgacgtcgttcgcgtcgttcgcggttcggtcgggagcggtagttcgtgtttcggtttcggtttcggtttcggttggcgtttgtatttgcgattatcgtgagtagttatggcgtattttatagtgtaga

SEQ ID NO: 5005 - DNA, 201 bp, synthetic construct
  misc_feature 1..201: note = Description of Artificial Sequence: Synthetic polynucleotide
  source 1..201: mol_type = other DNA
gtgggcggttattatttttttagagtatttggtatatcgggttggggttcgtattcgtagggtattgcggggcggcgttcggtgattgggtggggtcgtcgttgttttttttttcgttgggggcggtagttttttgtttgcgcggaggcgatttagaaggtacgttcgttagtaggagggcgggcgtcgtagggttttcgg

SEQ ID NO: 5006 - DNA, 201 bp, synthetic construct
  misc_feature 1..201: note = Description of Artificial Sequence: Synthetic polynucleotide
  source 1..201: mol_type = other DNA
gttttttcgaaacggagatttgttatttttttagagggcggggaagtttatattattttttgttttatagtgttcgtttcgtttcgtttgttggtttttcgtttattcgagatattttaggtacggttcgtattggagagggtcgcgttgttgttgcgatcgtacggcgttcggggtaggaatatgttcgtttttttttgc

SEQ ID NO: 5007 - DNA, 201 bp, synthetic construct
  misc_feature 1..201: note = Description of Artificial Sequence: Synthetic polynucleotide
  source 1..201: mol_type = other DNA
atcgaagttaggtggaagtaaatgagtttggattttgaggcgcgtttggtttggagtcgttaaatttgttagcgggcggcgggggaggtggttcggtagcgtcgggtgttgcgttcgtatatgcgttcgggaaggtagtttcggtcgtttcgtttttagttcgttttttatcgttggcgcggcggcggcggcgtggggttc

SEQ ID NO: 5008 - DNA, 201 bp, synthetic construct
  misc_feature 1..201: note = Description of Artificial Sequence: Synthetic polynucleotide
  source 1..201: mol_type = other DNA
tgcgttttttttttgttatttcgatgttgggagtggcgttttggttttggcgttttttgggtaagtattagtcggcggtatttgcggaggtggttggtacgttgttattttttgaaatgagtgaggagggaggtttagatttaggcggttttacgcgttcgttttggtattagtagattgggaattgtcgtggttatgttc

SEQ ID NO: 5009 - DNA, 230 bp, synthetic construct
  misc_feature 1..230: note = Description of Artificial Sequence: Synthetic polynucleotide
  source 1..230: mol_type = other DNA
tttttcggttgtagaacgtttttcgttgtcggagaaggggtttagtaaaattgatttttttttatttgtttttatttataattgatggggagatgagaacgtaatatattttagtatcgagtttttgtcgtttggcggagattttgtttaagacgttttcgtaaagtatttttagtcggggaataaagtacggaaagttgttgggtagagcggtcgggaggagatatcgg

SEQ ID NO: 5010 - DNA, 201 bp, synthetic construct
  misc_feature 1..201: note = Description of Artificial Sequence: Synthetic polynucleotide
  source 1..201: mol_type = other DNA
gatagtggtagaggcgatcgtttttttttttattatttatattttagttttagatttttttttttttttttcggtgatattaagttttagatcggcggtcgtatttggttttatagtgtaaaatgtgtttggcgaggaagtcgaggcggcgttgtagtagttgagcgtgggggtttgtaagggcggttagttcggggaagc

SEQ ID NO: 5011 - DNA, 201 bp, synthetic construct
  misc_feature 1..201: note = Description of Artificial Sequence: Synthetic polynucleotide
  source 1..201: mol_type = other DNA
cgaaggttatcggttgcgttttgaagcgagattggcgcggtcgtcgtagtcggtttcggtttttgggtagtttggcgggtcgtacgggttgcgggaattcgtcggttaggtatacgaagtgcggtattatcgtttggtaattggagtagatgtttattagttcgtcgggtttggcggttatggcgttttcggcgtttgcgg

SEQ ID NO: 5012 - DNA, 201 bp, synthetic construct
  misc_feature 1..201: note = Description of Artificial Sequence: Synthetic polynucleotide
  source 1..201: mol_type = other DNA
tgttgttgttgttgttgttggcgttggcggcgcgcgcggacggtttggagttcggcggcggtttcgggtagtgggttcgttacgcgcgttgggcgggcgcggcgagtagcggcgagtttagttttagtttgcgtattaacgttacgcgcgcgttgttgttttatttggacgacggcggcgattgcgattttttggagttgt

SEQ ID NO: 5013 - DNA, 201 bp, synthetic construct
  misc_feature 1..201: note = Description of Artificial Sequence: Synthetic polynucleotide
  source 1..201: mol_type = other DNA
agtttcgagtcgttagtttttaggtttgggggtcgtcgttttcggagttgttggcgtttattcgtttcgcgttggagatgtttaatcgcggtcgggttgcggggacgcgggtcgtgttgggttttgtgcgcggtcgcgttcgtcgggtgaggacgcgtcgggggcgggggcgttaggttcgggtttaagggataggagttt

SEQ ID NO: 5014 - DNA, 201 bp, synthetic construct
  misc_feature 1..201: note = Description of Artificial Sequence: Synthetic polynucleotide
  source 1..201: mol_type = other DNA
ttttgacgcggggttggggacgtagatatttttggtttcggtagtttagcgtaatttttgaggtcgggcgtcgtttttcgtttttagaaattcgggtttcgagcgtcgaattttagcgttttcgttcgtgggtatagggcgcgcggtgtagttatagggggttcgagatacgcgtttcggtttggtttaggttggggaatc

SEQ ID NO: 5015 - DNA, 201 bp, synthetic construct
  misc_feature 1..201: note = Description of Artificial Sequence: Synthetic polynucleotide
  source 1..201: mol_type = other DNA
cggcgattatttgttgggtattaagcggttgcggcggttttattgtaacgtgggtatcggtttttatttttaggcgtttttcgacggtcgtatcggcggcgcgtacgcggatattcgcgatagtgagtggcgcggttaggcgcgaaggggcgggggcggggggtaacggtcgtcgggttaattcgtttagttatattttga

SEQ ID NO: 5016 - DNA, 201 bp, synthetic construct
  misc_feature 1..201: note = Description of Artificial Sequence: Synthetic polynucleotide
  source 1..201: mol_type = other DNA
gttgtattaagttataattttatttatatggtgtgagaattttttgggttttttttttttagtaagatttggtattttttgatatttattagtttaatgcgtgggaaatggtgtttttttttaatttgtattttttttgatttatagaaagttgtttttagtttcggtttatcgattatttagttttttattttttgaatg

SEQ ID NO: 5017 - DNA, 201 bp, synthetic construct
  misc_feature 1..201: note = Description of Artificial Sequence: Synthetic polynucleotide
  source 1..201: mol_type = other DNA
gttttttcggtattcgtagtttcgatagtttagttttttttatttgaaagttttatttgaggttttttttaattttgtttttttgtatttttggcgtcgcggggagttaggggttaaatttcgtggttcgcgtggtttttttttttttcgtagttttttcgtttttattcggcgtcgcgtttggagcgttcgtttcggaga

SEQ ID NO: 5018 - DNA, 201 bp, synthetic construct
  misc_feature 1..201: note = Description of Artificial Sequence: Synthetic polynucleotide
  source 1..201: mol_type = other DNA
tttcgggggtgtcgagtcggcggggggtgaggtggttgcgtcggcggtcgggttaggaggtgcgggtattgggggcgcgggaggggacgtggtaggtttcgcgggggttacggcgattttaggggttaggaaggtttcgttgcgggtacgtaatttgttttcgtttttttttacggagtcgtttcgggtaggcggcggcgg

SEQ ID NO: 5019 - DNA, 268 bp, synthetic construct
  misc_feature 1..268: note = Description of Artificial Sequence: Synthetic polynucleotide
  source 1..268: mol_type = other DNA
agttggcgttggataagtcgggtaagtcgaagcggaaggtgaattatcgtaagtatttgtagaagtagattaagcgttgtagcggttttatgggcgtcgcgtttttcggttcgtttttttcgagcgtcgtcgatacgttagttaaacggtcgttggtcgtttttagcgtttcgatagtcgcggtttcggtttacggtaaggttgtttttcggcgggaggcgtcgtaggtcgtcgcggtcgttagtttgtaaagtcgaagtttggtcgc

SEQ ID NO: 5020 - DNA, 614 bp, synthetic construct
  misc_feature 1..614: note = Description of Artificial Sequence: Synthetic polynucleotide
  source 1..614: mol_type = other DNA
atcggtcggggttgttgtcgtcgggggtttgggttttttagttagttgtggattaaacggtttttttttatttaaattaattgcgttacgcgtaggcggcgtacgggttgggtttgggaatggggatcgcgaggttttagtatttcgatgttttgaaagttttttcgtttcggggatttgtttttgtgttgtagttggtaggggtcgtttgaagtgggagtagcgtttggagaaggcgggaggagttcggttcgggggacgggcggcgggatagcgggatttcggcggcgcggtgcgttttagggcgtagcggcggtcgtagatcgagtttcgggcgcggtaagaggcggcgggagtcggtggcggttcggtattatgcgtcgagggcgtttgttggagatcgttttgggatttatcgtgtttttagcgttttatacgagttatggggcggacgttaatttggaggttgggaacgtgaaggaaattagagttagtcgggttaagagaagaggcggtggaggatacgacgcgtttaaagggtaaaggaatcggtttttttttttggtgtgggttttttaagttttaagatttagaataacgggtaggatgatttt

SEQ ID NO: 5021 - DNA, 201 bp, synthetic construct
  misc_feature 1..201: note = Description of Artificial Sequence: Synthetic polynucleotide
  source 1..201: mol_type = other DNA
agatgtattttagtttagcgatttttattggcggaattttcgcgtttatcgcgcgtcgcgttaagatggtttaggttatttttattgttttttcgttagcgttttttagttttttatatttgttttgtatatatattggtttgtagaggggattcgtttcgaatcgttcgggagtggggtttgagttcggagttggtgttt

SEQ ID NO: 5022 - DNA, 201 bp, synthetic construct
  misc_feature 1..201: note = Description of Artificial Sequence: Synthetic polynucleotide
  source 1..201: mol_type = other DNA
gttttgttttttttataagaggttaagtcgatattacgcgagtgtgtacgcgttggggattgagttttcgaagcgaagttttgtcggaggagttttaggcgggagtgggaacggttgggcgtggggttagtaacggcgttattcggtagggtggggggagttaggtttgttagagttagagcgcgttatcgtcgtcgcgag

SEQ ID NO: 5023 - DNA, 201 bp, synthetic construct
  misc_feature 1..201: note = Description of Artificial Sequence: Synthetic polynucleotide
  source 1..201: mol_type = other DNA
gtattgcggagtagcgaggtagcgcgtaagtaagttagggtaggggtcgggggtaggggcgggggttggagttatggttaggggtggttgtttaggtcgcgtgagttgttttttttattcgtatttggtcgttaggttattcggttattagaagtttttatttatattttgttttttatttggatcgtcggttggttgtaa

SEQ ID NO: 5024 - DNA, 201 bp, synthetic construct
  misc_feature 1..201: note = Description of Artificial Sequence: Synthetic polynucleotide
  source 1..201: mol_type = other DNA
ggggatcggtcgtagggcggggttttttttggcggtgagtgagcgagatcgttaggttgaagtatcgggagattgttttggtagtttttggtcgttattcgcgtcgtaataaaagtttttcgcggtttttcgtttagttagtttcgtattgattggtcgtcgtgggagggattcgagttggttggaggcggcggtcgagcg

SEQ ID NO: 5025 - DNA, 201 bp, synthetic construct
  misc_feature 1..201: note = Description of Artificial Sequence: Synthetic polynucleotide
  source 1..201: mol_type = other DNA
aagtttcggcgcgcggcgttcgttgggcggtgcgttttttttcggttttttatttatcgtagtcgagtcgggtattgtggggtgggtgtgcgtgtttgtcggggggtgtgtgtttgtgtcggggaggggtgttgttggggaattgttgtttttcgtattacggcggtagcgatagtatcgttcggtagttcgtagtattcg

SEQ ID NO: 5026 - DNA, 261 bp, synthetic construct
  misc_feature 1..261: note = Description of Artificial Sequence: Synthetic polynucleotide
  source 1..261: mol_type = other DNA
gcgttcggtttaagtacggtgcgagcgtttcggggaggcggcgagcgagtcggtgcggagcgtttcgtgcgttcgggtggtttcgcgggtcggcgggatcgtgcgtattttaagcgcgtgcgggagtgtgcgaggcgttgtgcgagttagcggcgggcgcgttagggtgggaaaggtatttcgaacgtattaggtgtagagatcggtatttatcgagagcggtcgggagcgtacggcgagtttcggtgttatcgtcggttt

SEQ ID NO: 5027 - DNA, 201 bp, synthetic construct
  misc_feature 1..201: note = Description of Artificial Sequence: Synthetic polynucleotide
  source 1..201: mol_type = other DNA
gtttgggttttaggttatcgtagaggacgtgttttcgggcgcgtagatggcgggagatgaggcggtcgaatttcgcgtttttgcgtggtggagtatatacgttttaataagtttagcgttatttgtttagttttttaatttttttttttttcgtttcggggcggtttttttttttttttgttttggttgttgttttggtcg

SEQ ID NO: 5028 - DNA, 201 bp, synthetic construct
  misc_feature 1..201: note = Description of Artificial Sequence: Synthetic polynucleotide
  source 1..201: mol_type = other DNA
ggtttacgtattgttcgtcggtttacgcgggagtttcgaggggcgaggcggaggttgggcgtagtttttgtagttagtagttattttcgcgcgtttcgtcgcggtttagttaattatttgttgcggcggcggtcgtgttttttagggtgtattagtattttcgtcgcgggcgttgttttcgcggcgtcggtatcgatgttc

SEQ ID NO: 5029 - DNA, 201 bp, synthetic construct
  misc_feature 1..201: note = Description of Artificial Sequence: Synthetic polynucleotide
  source 1..201: mol_type = other DNA
taggtagtttcgcgtggcggcggtcgggatagttgggcgcgttggtaggagagtaggtatagcgttttttataggtaggatgacgcgggtttcgtagttcgtttttttacgttgtttcgtattattgtttcggttttgacgtgcgtgcgatagatttatcgtaaatagtttttagcgggagtacgaggtcgggataggagg

SEQ ID NO: 5030 - DNA, 201 bp, synthetic construct
  misc_feature 1..201: note = Description of Artificial Sequence: Synthetic polynucleotide
  source 1..201: mol_type = other DNA
atatagttttaagggattgagcggttcggacgggatttgaaatttttggaggattagttacgttcgtatagttcgtttatgcgcgttggtattaggattcgtaggttgttagcggcgagttttcgtcgcggttttttagggtattttcggagaagggggcggttttgaggaattttttgtatttcggatgttttatttttt

SEQ ID NO: 5031 - DNA, 219 bp, synthetic construct
  misc_feature 1..219: note = Description of Artificial Sequence: Synthetic polynucleotide
  source 1..219: mol_type = other DNA
gtcgtcgttttttcgggagtcggagtcgtcgtttttttagtgggtgtagtcggggtttcgacgggggtcgggcggttatcggggttggagttgcggttacggaggtttttgcgtttgcgtcgcgtcgagggtagggatagggattggggtgaggggttgtttcggaacgtttatagttggcgttggtttttttttgtttgatagttttttggttcgggg

SEQ ID NO: 5032 - DNA, 268 bp, synthetic construct
  misc_feature 1..268: note = Description of Artificial Sequence: Synthetic polynucleotide
  source 1..268: mol_type = other DNA
ttagtcgtcggcgaggttattcgggaggggcgggagtcgtttgttagttattcggtagtttttttggggtttttttcgcgcgttcgtttgtttttttttcgttgcgttttttcgtttgttggcgtttttgttttagcgggattcggtagttaggggttttagggggcggtgtagtaaatttttagcggtttgcgtttagtagattaggttggggagtcggtttggcgttgtagggaggtagagagcgggaggaagaggtagtggtagg

SEQ ID NO: 5033 - DNA, 201 bp, synthetic construct
  misc_feature 1..201: note = Description of Artificial Sequence: Synthetic polynucleotide
  source 1..201: mol_type = other DNA
ggttgttttcgggcgtattttgcggttcgggtatttgtagggcgggtagcggtcggttttttattatgttggtcgtcggtatgggggtcgtcgtttttgcgttttttttgagtttttcgttagcggtttggttcgcgtttttttttggttgttttttattttcggtttcgcggtatattttttaattttggggtcgaagga

SEQ ID NO: 5034 - DNA, 517 bp, synthetic construct
  misc_feature 1..517: note = Description of Artificial Sequence: Synthetic polynucleotide
  source 1..517: mol_type = other DNA
tagcgtttattgtcggggaagattcggacgaaaatcgaggtaaattaattattaaaaagtgtatttaataagaatttttttatttaggtttttcgttgtcgagacgcggtagatttttagagcggtttatttatttatcgaagcggattttgggcggtttcgggttgattcgcgttgttagggcgcggattttatttcgggcgtattgttaggagaaggggtttttcggggcggcgcgtttcgattttgggttttcggtgttcgtagagggcggagattcgcggcgttttaggttatttattcgtattttttcgagttaaatttttagcgtttattcggattcgacggtttaagtattgatttttaggtaagagtcgttttttttggtttttagggaattgatattatcgcgggacgttttttttaggatagttagtaggttttaggagcgtagtacgtaatagcgtagagtagatttagatttttttcggggtgagattcggaggttcgcgttttg

SEQ ID NO: 5035 - DNA, 226 bp, synthetic construct
  misc_feature 1..226: note = Description of Artificial Sequence: Synthetic polynucleotide
  source 1..226: mol_type = other DNA
cgtcggggggttttgtttttcgggaggagaaggaatcggtcgttttcgtttttttttttttttaggcgttttcgggagggggtcgttgggcggcggaatcgcgttttcgttcggggagttattacgcggttttttcgcggaattttgacgttatttatacgtgggggaaggggttgggagagtaagaggaagcggcgggggagggggtcgcggttgggagagcgcg

SEQ ID NO: 5036 - DNA, 201 bp, synthetic construct
  misc_feature 1..201: note = Description of Artificial Sequence: Synthetic polynucleotide
  source 1..201: mol_type = other DNA
atttcggaggtagagatgagagcgttttaaaattttttttttttattttaattttcgaggagtaggtgggtgtatagtgtcggcggcggcggggacgcgcggcgcggagtttggttttgggaggtagtggtcgttttagtagtcgaatttttcgcggttttagttttcgcgtttagtagttcgcggttcgtttttcggaaa

SEQ ID NO: 5037 - DNA, 212 bp, synthetic construct
  misc_feature 1..212: note = Description of Artificial Sequence: Synthetic polynucleotide
  source 1..212: mol_type = other DNA
tgcgtagtggggcggaggaggtggcgatggtcgggggaggcggggggattgttgtttatttgtagttgggttaatttcgcggcgtaggcggcggcggagcgcggggagttcgcggcgggtttagttgtcgtagtattatgttcgagttttttttcgggtagacgtcgcgcgtcgtcggggtttcggtaggggaggatgttagacgttcggga

SEQ ID NO: 5038 - DNA, 388 bp, synthetic construct
  misc_feature 1..388: note = Description of Artificial Sequence: Synthetic polynucleotide
  source 1..388: mol_type = other DNA
ggtagtcgtagttttttcgcgcgttttttttttttttacgtttttcgttttcgttatggggttaacgtggggtttttaagagttgtcggtttttagcggcgtaatttttagttaaagttatcgcgggcggattatggtttagggcgttagaggggttagaggtacgggaagaggaaaagacggttaattgggaaaaaaagagaaaacgaaagaaaagttaaacgatgagtttttataaggaggacggagtgaatagtttgtgttagaaggttttgtatatcgttatcgagttgtgtttcgtcggttaggtggagtgggagaagtgttcgggtattttttttcgggataggggtagttagggcggaagtagtataggtaatcgggaggg

SEQ ID NO: 5039 - DNA, 201 bp, synthetic construct
  misc_feature 1..201: note = Description of Artificial Sequence: Synthetic polynucleotide
  source 1..201: mol_type = other DNA
tttttttttttttgttttttaagatacgcgttcgaaatcgaggggtgagagtaaagatcgtttattaatttagtattttggatttagagtttttaatttcgaaaggaggttggtattgttcgggttatcgagagagggagggagaagagttgaggttgtaacggtttttgggttttttagatcgggtttggtatttaggag

SEQ ID NO: 5040 - DNA, 201 bp, synthetic construct
  misc_feature 1..201: note = Description of Artificial Sequence: Synthetic polynucleotide
  source 1..201: mol_type = other DNA
ttattttttttggaagtttattagttgtttaagtgataattaatatcggagagttagggttcgtttaataggagtacgcggagatattttagacgatagcgcgttttttttatttttatttcgtttttcgggcgttttaggttagcgtttattagattttacgtttgggggattgtttgggttttagcgagagtgttacgg

SEQ ID NO: 5041 - DNA, 212 bp, synthetic construct
  misc_feature 1..212: note = Description of Artificial Sequence: Synthetic polynucleotide
  source 1..212: mol_type = other DNA
aggtgtagagatagtggagatgaggttttgatgttcggttttggttttacgcgggtagcgttagttggtcggtgttacggagttttcgcgtttttcgttcgtttagttttcgcggatttatttattggggttgtttcgtagcgcgatttttttttatttcgggggagggttaagggcggcggtggggggcggggtgggggggaagcggcggg

SEQ ID NO: 5042 - DNA, 250 bp, synthetic construct
  misc_feature 1..250: note = Description of Artificial Sequence: Synthetic polynucleotide
  source 1..250: mol_type = other DNA
tttttcgtgtttttcgtagggtaggttatagttttttagattttcgtttaggtggtaaagaagatggagttgggggtcgcgtttcggcggcgcggggttcgaaggcgaggtcgtttagttcgtattttattttacgtacggtatacgtcgtcgcggtttttgttacgtatattttcgcgttgtttcgtttacgtgggcgtcggggaggaggttcgagagatgggaagaaaggttggtatttatttttttg

SEQ ID NO: 5043 - DNA, 488 bp, synthetic construct
  misc_feature 1..488: note = Description of Artificial Sequence: Synthetic polynucleotide
  source 1..488: mol_type = other DNA
ttgtaaatattggaggaaagttgcgttgttttaattaaatacgtttttttaaaatacggagatgcggggagtgggggttcgggaaagaaatttttaaagcggtagtgtttttttaagaaggggtaaaaaaatttgtttatggttatttttttttcgttttattttttttttttttgatagtttcggttttggttgttcgagtcgggggtgtgttttcggttttttttagatttgggcggggggcgggaggagtgagcgatttgggaagtttcgggggtggagagggggcgtttcggggtttgggggcgacgtggatattttttttggagtacggcggtgcgtttgggatttgaaggaagggtcgaaggaagcggggtgcgggcgggcgagttgttcgttaagttgtttggcgggcgcggcgaggggagatgcgtaagtttgtagatcgggggttcggagttcggcgtttaggttggcggggggcgtgt

SEQ ID NO: 5044 - DNA, 201 bp, synthetic construct
  misc_feature 1..201: note = Description of Artificial Sequence: Synthetic polynucleotide
  source 1..201: mol_type = other DNA
gtagagttgtagtttttgcggttttttttttttcgttgtttagtcgagttttgggtttttagtttaagtttttcgtatcgtcgttgttgttgtcgttatcgtcgtcgtcgtcgcgcgttgttagagtcgttttttcgtttttttttttttttttcggtcgggtttttttttttttttgtttttttttttttttttttagtt

SEQ ID NO: 5045 - DNA, 364 bp, synthetic construct
  misc_feature 1..364: note = Description of Artificial Sequence: Synthetic polynucleotide
  source 1..364: mol_type = other DNA
attgcgtatgtgggtttggggtttgcgcgtatcggaggttgtaggcgttggggagggtgtggggggttgtgcgtggggttgtttttatcggaagttgtacgttttgggaagcgtagaggcgggggtgttgttcgcgttggggagtacgtgaggggatatttagggattgttcgcgcgaatggtttttaacgtatgcgttttattttatattttatagtcgttatgacgatcgggaggttcgtaacggttgcggggataagttcgttgaggttgttaggcgagttaggtttttttggatttcgtttgattcggttgggttgtgtttgaaattgatttagttttattatattttttgattatgaga

SEQ ID NO: 5046 - DNA, 220 bp, synthetic construct
  misc_feature 1..220: note = Description of Artificial Sequence: Synthetic polynucleotide
  source 1..220: mol_type = other DNA
gtgtaattttttggttaaaatgttatagttaagattaaattcgaagaaaagaatgaaattacgggaagttttttagatagtcgtcgtaaggttatgggtcgaagtggtgtaggggcggcgttcggggaagcgattggtagagttgtgcgtattgggggtgttgtaggcgttggggagagtgtggagaggttgcgtggagttgcgcgttcggggtgggggt

SEQ ID NO: 5047 - DNA, 201 bp, synthetic construct
  misc_feature 1..201: note = Description of Artificial Sequence: Synthetic polynucleotide
  source 1..201: mol_type = other DNA
gcggttgagttcgcggagttgggtgagtgtttgcggttgatcggttcgtgggagtagggagcgtatagtcggttggtgttggagggttacggggatttacggggtatcgcgggagtcgtcgagcgtagggaagttagtaggtatttgtagtgcggagtttgtaaggttgaggtaggagatcgttcgaggcggggagggcgg

SEQ ID NO: 5048 - DNA, 201 bp, synthetic construct
  misc_feature 1..201: note = Description of Artificial Sequence: Synthetic polynucleotide
  source 1..201: mol_type = other DNA
tttgagggttcgggtagttattcgtattttttcgttacgcggagaaagtcgagtatataggtcgtagggtgggggttcgcggggagagggtggaagtagcgggtttttcgcgtttggggtggtcgttgttttatttaggttttcgtttgttttttatttttttagattaatcgttttttgtaggtgttaacgcggtgtttc

SEQ ID NO: 5049 - DNA, 201 bp, synthetic construct
  misc_feature 1..201: note = Description of Artificial Sequence: Synthetic polynucleotide
  source 1..201: mol_type = other DNA
gttttagtttttatttgtttaggtgttttcggcgttttggcgaattcggttattttagttttttacgtggtgagtatttagggtagcgggtcgatttttcgaggttttatatttgggtttgaggggcgcggttcgtagcggcgggtgtaggggcgattgttagtttttatttcgtttcggggtgcgttcggaggtcgatat

SEQ ID NO: 5050 - DNA, 358 bp, synthetic construct
  misc_feature 1..358: note = Description of Artificial Sequence: Synthetic polynucleotide
  source 1..358: mol_type = other DNA
atttagggttattgtagtttcggggtatttcggaggttacgattcgcgagtagatgtttcggaagaggttttttatgtaggttgttaggtagatggcggcgtgttcgtggatgcgtagcgttacgcggttgtttattatttagcgatatacgcggtttacggagaaggtgaggtcgtagcgggtcgatttgtcgcggtttaggcggtcgtcgtcggcgttgtttatgttgtagagggatagtgcggttagcgtagtcgtcgtatagtgcgcggttaggttttaggatagtacgatttttatggcgttttggatttcgtatttggtgtatttggcgaagcgtaggtttaggcgttgcgt

SEQ ID NO: 5051 - DNA, 201 bp, synthetic construct
  misc_feature 1..201: note = Description of Artificial Sequence: Synthetic polynucleotide
  source 1..201: mol_type = other DNA
agcgtttttttatggtcgcggtagttaatcgatgattgaatcgaataaagagtagcggcgagattaatttttaatatttatcgatgggtagcgggcggtcgagtttcggcgagtttcggtagtcgtcgttcgtcgttttagggcgttcgtttgttcgttcggggatttttttaatgcgtttagggcgcgttcgggggtttt

SEQ ID NO: 5052 - DNA, 328 bp, synthetic construct
  misc_feature 1..328: note = Description of Artificial Sequence: Synthetic polynucleotide
  source 1..328: mol_type = other DNA
ttttttagtttcgttggtttgggagtcgggagtttcggaggagtttttcgttaagtttttttggttacgagcgcgtttggttttggtttgggagtagatcgtgcgttcgagtggggtatttgttcgaggtcggggattgtgaatcgaaagattttatttagttttgttgtttttttggtattgcgatttgggggcgggttattttatttttttgaatttcgtttttcgttttgtttatggaaggttgtaagtttttttggggttcgggatttttttttatttttatttttcgagtagagaaataggcgatgttttttttttttttgcg

SEQ ID NO: 5053 - DNA, 201 bp, synthetic construct
  misc_feature 1..201: note = Description of Artificial Sequence: Synthetic polynucleotide
  source 1..201: mol_type = other DNA
gaggtgtgtgttggaggtgggtagtcgtcgcggaggttttagcggtaggtgcgttttagtaggtagtagtagtcgttattttgggtaagtagtaaatttcgtataaatttcggagttattatgtttgttttttcgttttatcgtcggtttttttgttaggagtagtagaggatgtggtgaatgtatcggttttatcgaacg

SEQ ID NO: 5054 - DNA, 319 bp, synthetic construct
  misc_feature 1..319: note = Description of Artificial Sequence: Synthetic polynucleotide
  source 1..319: mol_type = other DNA
gggcgtatatatacgtttatttagatatttcgcgcgttttttcgcgtttttgtttgttcgttcgtcgtcgtttgtttttttttttttgttttcgtcggtcgttttttttttttttttttttttttttttttttttttttttttttttttttttttggtattatagagttgttttgaaaatagaagatagagggagtttcggagttcgttatttttagcgatttttatattgggaaaaaatatggagttagtttcggtagttttcgatttcgtcgttagcgagttaggtagtagcggcgcggacgcggtcgtcggtttta

SEQ ID NO: 5055 - DNA, 201 bp, synthetic construct
  misc_feature 1..201: note = Description of Artificial Sequence: Synthetic polynucleotide
  source 1..201: mol_type = other DNA
ttaagtttaattttacgtttttttcggtgttcgattttgcggtcgaatcgtaattgcgagtcgtaggtaatggcggagtttttggtattgttagttgttcgcggttgggggttcgaggttgggagggtttcgttttcggaatatcgtttcggtttggtttttaattttgcgaggagtttttttgcgtttttttttcgcggt

SEQ ID NO: 5056 - DNA, 370 bp, synthetic construct
  misc_feature 1..370: note = Description of Artificial Sequence: Synthetic polynucleotide
  source 1..370: mol_type = other DNA
ttggattttcggggtgcgggtttttttttttgttttgttttttagtatttttggtaattgcgtaaagttgtttgggttgtaatggtggggtgtagggggcgttcggttgttgtatttgttagtgttgggtttaggttgagaggcgatttttagtttttataataatgtttcgggttttttggtttgggttttcgtagcgttcgattgatcgttagcgatacgacgagaacgaggatttgtcggacgtggaggagatcgttagcgttcgcggttttagtttggaggagaagtttcgtagttagttgtattagggggatttcgtgtacgttatggagggtaaaggtgaggcgtttttatttcgggtcgtttt

SEQ ID NO: 5057 - DNA, 201 bp, synthetic construct
  misc_feature 1..201: note = Description of Artificial Sequence: Synthetic polynucleotide
  source 1..201: mol_type = other DNA
ttttttcgttttaggcgtcgttaagttttagtattatgcgtttttttagatgttcgaaagcgtttttttagggtagtttatgtttttttgtgtttttttcgcgacgggtcgggtttattattttatatttttcgggtttttttatgtttattatcgtgtgtttttttagtatttttttttttttttaagttttaatatagt

SEQ ID NO: 5058 - DNA, 201 bp, synthetic construct
  misc_feature 1..201: note = Description of Artificial Sequence: Synthetic polynucleotide
  source 1..201: mol_type = other DNA
gttgggcgtaggggtcgtcgttcgaggattatgggtgggttagcgtttcgtcgggttgttagttggcggggatcgtcggcgtttgtgtcgggtcgcgttcgaggttgcgtcgttcgtgtcgtagcggttaatgcggtagtattcgcgaacgttatcgcggcgggtttcgttggttcgggttgcggcgtgggggcgggggat

SEQ ID NO: 5059 - DNA, 201 bp, synthetic construct
  misc_feature 1..201: note = Description of Artificial Sequence: Synthetic polynucleotide
  source 1..201: mol_type = other DNA
gtgtagcgacgtttagttttcgtgcggttagcgcgtcgcgtcggcggattttgtagtttagagagtttagggagtttagggaggggagcggggcgcgggcggggtagtgtcgtataatcgtaggcgcgtttcgcgtcgttttcgtttcgggtttattttttttcgtcgcgttttttttagtttatttacggacgagcggat

SEQ ID NO: 5060 - DNA, 263 bp, synthetic construct
  misc_feature 1..263: note = Description of Artificial Sequence: Synthetic polynucleotide
  source 1..263: mol_type = other DNA
gcgcggtttcgcggggattttgcgggcgggcgggcggtcgggcgcgcgcggggcgggggcggcgcgcgcgcggggagcgtgtgggtcgggcgggcgcggcggggaaagttgggcgcgcgagtcgaggttgttgtttatttgtagtcgcgtcgtttatttgtcgcggagtgcgcgtttcgcgttttttcggttcgtttcggagttcggtcgttttttttttgttatagcgggtaattgcgtcgatatgcgatacgagtagttta

SEQ ID NO: 5061 - DNA, 201 bp, synthetic construct
  misc_feature 1..201: note = Description of Artificial Sequence: Synthetic polynucleotide
  source 1..201: mol_type = other DNA
ggcgggagaggagtttcggtcgcgtggattttagtttgcgcggtaattatcgcgttttgattttaggttcggttgtttagggaaggatagtttagggcgcgtttagcgagttttagggggtacggaagtggttagggtagattttagggtgaataattaatattttatttattaattcgttaaaaataaagaaaataaaat

SEQ ID NO: 5062 - DNA, 201 bp, synthetic construct
  misc_feature 1..201: note = Description of Artificial Sequence: Synthetic polynucleotide
  source 1..201: mol_type = other DNA
tgtcggggtcgcgttttcgggttcgcgtcgttagtatttttttacgcgcgttcggtttcgggttattcgttttcgtcggttttcgttttttttcgtagtcgtagggaagcgagtttgggaggaagaagagggtaggtggggaggcggatgaggggtgggggattttttgacgttattagaaggaggtgtcggggtaggaag

SEQ ID NO: 5063 - DNA, 201 bp, synthetic construct
  misc_feature 1..201: note = Description of Artificial Sequence: Synthetic polynucleotide
  source 1..201: mol_type = other DNA
aggggttaggagcggcgggatagcgcgggaagagtaggtaaggggagatagtcggattgcgttttagtttttcgtgttaagaatatcgtcgcggaggcgcggttagttttttttggatcggatttttcgtttttagggttaggcggcggagttttagttttgttttttttttagtttcgggcggtttttagagttgagtaa

SEQ ID NO: 5064 - DNA, 201 bp, synthetic construct
  misc_feature 1..201: note = Description of Artificial Sequence: Synthetic polynucleotide
  source 1..201: mol_type = other DNA
cgggcgtcggcgtgaattcgcgtttttcggagtttagcgtcgtgtttttaggtttcggttttgattttagggcgtttaggtggaatggtttcgtagttgcgcgttgttttcgcgttttcgttttgtttcgcggaaatcgttttcgatagttaattcgatcgggcgcgcggcgttttcggtcggttttcgttcgatttcgcg

SEQ ID NO: 5065 - DNA, 215 bp, synthetic construct
  misc_feature 1..215: note = Description of Artificial Sequence: Synthetic polynucleotide
  source 1..215: mol_type = other DNA
gattttttcgcgtatacgtatatgtatacgttgcgcgtttttacgcgtatatatacgttttttttgtcgcgttcgtcgtcgcggttattatcgcggagtcgagttttgcggagcgggaatcgaggtcggagcggggatcggaggtagtcgagtcgggggatgtcggttcggagcggagtcgcgcgcggacggcgcgttcgggacggtgagtgtgg

SEQ ID NO: 5066 - DNA, 201 bp, synthetic construct
  misc_feature 1..201: note = Description of Artificial Sequence: Synthetic polynucleotide
  source 1..201: mol_type = other DNA
tcgcgtaatttttgaagtggtcggttagggcgcggttggtttagtcgtcgtaggcgttttgtaggcgttggggtaggttttagtggtatagggtgattacgggttgtacgtttagttttcgtagtcgttttagtaggcgtcggtagtagcgtagtttttcgcggttggggacgttcgcgttgttattggggagtattcgcg

SEQ ID NO: 5067 - DNA, 201 bp, synthetic construct
  misc_feature 1..201: note = Description of Artificial Sequence: Synthetic polynucleotide
  source 1..201: mol_type = other DNA
ggacgggagttgcggggagggcggtcgggggatttcgtagagttcgtttcgttcgtagtcgcggggcgtcgagggtagggcgggcgtttagtttggtttcgtcgtttcgttcgtagtttttcgaaaggcggtcgttttgttttggttagtttggttcgattcgggggcgttgcgtgcgggcggtttcggggttgttggtat

SEQ ID NO: 5068 - DNA, 201 bp, synthetic construct
  misc_feature 1..201: note = Description of Artificial Sequence: Synthetic polynucleotide
  source 1..201: mol_type = other DNA
aatttaatatttttttttttttttttggagttattttttttttcggaatatgtaagttttgggtggtttagttttgtcgttagatttagtttttaagtgcgggggaaggagatgggcgtttttagtcgcgattttttgggaaggtggttatttatttgcgttttgaaatagaagaatagggcgacgttgtagataatttgg

SEQ ID NO: 5069 - DNA, 217 bp, synthetic construct
  misc_feature 1..217: note = Description of Artificial Sequence: Synthetic polynucleotide
  source 1..217: mol_type = other DNA
attggttgaagtttttttagcgatttgtatgaatcgagagggagtgttttttgtcgttttttttttaagagcgttttgattgtagttttttagggaatgcgcggtcgagggaatgcgcgtagtttataggttttgggagtgagttggtgttcggcgatttggtattcgcgtttggatatggggcgtttatatcgttttaggagtagtattagttata

SEQ ID NO: 5070 - DNA, 317 bp, synthetic construct
  misc_feature 1..317: note = Description of Artificial Sequence: Synthetic polynucleotide
  source 1..317: mol_type = other DNA
agtaaaagtttttatttgtagtatcgggtatgttgttcgtttaacgcgtttcggggatttgttggttcgtgtttttaatttaggggtggttatacgtttcgcgtttttgtttttgggtagatttttttatttgtgtattttggtttttttatttagtaaagagatgtgcgaagtgtgcgtttggagacgagtcgtttcggtgatttttattcgttcgtagcggtggttttggtttttcggattcgcgttcgcgttttgcgggtttttcgcgtcgtttttgttcgtcggattattcgggtttagagggtcgttcgttt

SEQ ID NO: 5071 - DNA, 201 bp, synthetic construct
  misc_feature 1..201: note = Description of Artificial Sequence: Synthetic polynucleotide
  source 1..201: mol_type = other DNA
gaggggaggtacggagcgggaggagggggacgcggagaagattgtttggtttcgtcggtttcgttaacgtgacggttagtttcgtcgagcgttcgtattcgtttatatttatgattattcgtatattcgttttaatacgtgttaaggcgcgatcgcggggtttttggtagttttcgttgtatttttttttttataggggta

SEQ ID NO: 5072 - DNA, 201 bp, synthetic construct
  misc_feature 1..201: note = Description of Artificial Sequence: Synthetic polynucleotide
  source 1..201: mol_type = other DNA
tcgtttaatacggagacgcggagttttatagcggtggtagaaagtgagtattaatttagtaatagggggaaggaaggggacgtcgggcggttagtgggacgtgcggtagtcgagggttgtagtttgtttttgtagcgcgttcgcgtttatttgcgattttttggtaggggatgttcgttaggttgaattttttggtatcgt

SEQ ID NO: 5073 - DNA, 201 bp, synthetic construct
  misc_feature 1..201: note = Description of Artificial Sequence: Synthetic polynucleotide
  source 1..201: mol_type = other DNA
tagtcgggtcgagcgcgttgtttgagttgagtcgtcgtaggtgaggggttcgcgttttcgttcgttttgggcgtcgcgtttggtattgattttgtcggtcgtttattgtcgtcgtcgtcgtcgttcgcgggtattatgatagttttgagcgttggggttataggttggttatcgtcgtcggtgttcgggaggttgcggcgc

SEQ ID NO: 5074 - DNA, 201 bp, synthetic construct
  misc_feature 1..201: note = Description of Artificial Sequence: Synthetic polynucleotide
  source 1..201: mol_type = other DNA
agtgtgattgatgtatttattatttaataatttcggggtgaaatttgaggtgaacggttttatttttttatatttaggaatggaattagttttcggtatcgtgtatagtttgattttacgttcgtacgttgggttttcggttttttggtagtgtatttaagtgtatttcgcgtgtgttcggcggattttcgtgtatatcgt

SEQ ID NO: 5075 - DNA, 201 bp, synthetic construct
  misc_feature 1..201: note = Description of Artificial Sequence: Synthetic polynucleotide
  source 1..201: mol_type = other DNA
gcgtagttttatttcggatggtttttgttttttcgcgggttcgagggcgttggaaatttagcggcggcgaagcggagaggagtttcgcgcgttttcgttcgtacggttttaggtttggggtttgcgttggagtcgcgcggggagaggtcgtttttgcgatcgtcgcgttcgttttcgatcgttcgggttcgcggttagttc

SEQ ID NO: 5076 - DNA, 221 bp, synthetic construct
  misc_feature 1..221: note = Description of Artificial Sequence: Synthetic polynucleotide
  source 1..221: mol_type = other DNA
agtttaggtttgcgtttatacgcgcggcgtttatacgcgcggcgtttatttggttgtagtttcggttagggttagcgcgtcgcggttgaagggggcgttcggatttttttggggcggcgcgtagtcgggatagtttcgtatgacgttcgcgttttagcggtttcgggacgcggttttatttttaatttttggcggttttagtttcggtttttgtgtttcgg

SEQ ID NO: 5077 - DNA, 311 bp, synthetic construct
  misc_feature 1..311: note = Description of Artificial Sequence: Synthetic polynucleotide
  source 1..311: mol_type = other DNA
gtttcgtttcgtattcgtatatatttttttcgtcgttgttttgagcgtagcgataagggtttttatattttcgcggttcgtaatgtttcggggttaagtcgaggtagggaggcgttttcgtagtttttgattttataattcgcgcgcgtgtgtatcgagtcgcgggtatatcgcgaatatatatatatatatatatattcgtgcgttttcgtttttcgttcggttcgggtttttcgaatttattttcgaggcgtttcgggcgtagggttcgtttttttttgcgggtttttagcggttgttcggtagtggtt

SEQ ID NO: 5078 - DNA, 308 bp, synthetic construct
  misc_feature 1..308: note = Description of Artificial Sequence: Synthetic polynucleotide
  source 1..308: mol_type = other DNA
ggtggcgggtagtgtggtgatggtttttgaggaggtttgttcggagcgtatcgatttgatttataaaaattatcggaaattttgtaatttgttgatcgacgtggaggagtggggttaggtggttattattagtatgtttattcgttacgttcgtacgtagtttttgagttttatttagaacgtaagtgggtttagtttaggtagagcgggtcgaagtgtgtttcggggaggcgtttatagattcgtcggttttttcgtttaggaatttttattagaggagaacgcggaaaaagttttttacggtttag

SEQ ID NO: 5079 - DNA, 201 bp, synthetic construct
  misc_feature 1..201: note = Description of Artificial Sequence: Synthetic polynucleotide
  source 1..201: mol_type = other DNA
cgagaattttgcgggtttagaacgttcgcgcggacgttttttttacggcgtcggaagtcggcgtcgagtttgttatcgggtatttttttgttgttttgacgacggcgggcgttgtaagagtggagaagttgtaggtgttgaggcgcggtgaaagaaattttgggagttaagagtacgaggagttggtgtttgtgttatatt

SEQ ID NO: 5080 - DNA, 201 bp, synthetic construct
  misc_feature 1..201: note = Description of Artificial Sequence: Synthetic polynucleotide
  source 1..201: mol_type = other DNA
aggtgatttcggttttggcgaggcgcgattcggttatgcgtgtgtgtgttttttttcggagaggatttcggtcgtcgagggtacgcggggtttagttatcgttcgttttttaattagttgttggttcgtttcgatggtgtaaattgtttttttttgttttttattaaatagtaatagtttggttacgtttaagtggaataa

SEQ ID NO: 5081 - DNA, 201 bp, synthetic construct
  misc_feature 1..201: note = Description of Artificial Sequence: Synthetic polynucleotide
  source 1..201: mol_type = other DNA
gggatttggtgattttagtattattttttttttttttttttttttttttgtttttttatcgtttgttgtaattttgtaaagtttcggagtcggagagcgcgtttcgtttttagagttttcggattcggcgagttagcgatcgtcgagtcggttattatgttcggtagatcgcgttattaggcgtttttcgcggtttttatt

SEQ ID NO: 5082 - DNA, 630 bp, synthetic construct
  misc_feature 1..630: note = Description of Artificial Sequence: Synthetic polynucleotide
  source 1..630: mol_type = other DNA
agtttttttttgttattcggagtagagcgcgttagcgcgaggtcgggtcggtcgtttgcgtagcgtcgggttaattttaattgttgattatatttttagcgtgtttttttataggttttatttgtaattgagacgaatgattatagtggggcgggaaggagtagttgtttattaattaatttttaattaaaagtgtttttcgttttcgggtgattaaagagaaatatcgttcgttgggcgatattgattcggatggaatttatttgttaacgttcggaggaatggttttttcgtttatcgcgcggtcgggattgttttggtttttttcggtttgagtcgtcggcgagtgatcggcgagtttgcggttaggtcgggttgcgcgaggtggggttgacgttagagtttttttcgttttaagtcgcgtatatttgatttgacgggttcgcgcgattcgtttttttttttttttttttcgtaaaatatgtatttttgtcgtcgttgcgaggtcgttcggttttagagttttttcgagttttcggaatgcgaagttaaaggaatcgcggcggttatcgttgtttattttgttattcggttagaaaagtttgcggagcgcggggatggattaatcgg

SEQ ID NO: 5083 - DNA, 201 bp, synthetic construct
  misc_feature 1..201: note = Description of Artificial Sequence: Synthetic polynucleotide
  source 1..201: mol_type = other DNA
gagggcggggcgggcggcggtcgcgtttttaatttcggcgttgcgtgtgggagcggtcggattagggaattagcgttgtaatttcggattagtaacgttcgttaaatgagtgtttaatttcgattttttatgttttttagcgtcgcggttgagttttaggaggttttttggttaggtttttttcgcgttttggttttattt

SEQ ID NO: 5084 - DNA, 239 bp, synthetic construct
  misc_feature 1..239: note = Description of Artificial Sequence: Synthetic polynucleotide
  source 1..239: mol_type = other DNA
ttcgtgaatttcgttcggggatattttatagtagtcgcgtttttatttttttttttttaaatcgtttcgggtttttgtcgtcgttattttttgttaaatcgtttttatttttttagcggagttatagcggggcgcggcgtatataaagggggtcggagggtggagagtatagaaggagggagagatttcgttagggttcgtggtacgggtttgggagtagttatttattcgattttttt

SEQ ID NO: 5085 - DNA, 201 bp, synthetic construct
  misc_feature 1..201: note = Description of Artificial Sequence: Synthetic polynucleotide
  source 1..201: mol_type = other DNA
gacgttagtcgcgcgggtttttcgagttcgcgtcgcgtttagggatttggttcgttttttgcgtttttatttttttattttttttagaaatatagtacgcgggttttttttatgtaggttattttttacggagttttaggttagttttggggcggtgaaacgaaggtgttaaggtatagtattttttcgggaggttggata

SEQ ID NO: 5086 - DNA, 221 bp, synthetic construct
  misc_feature 1..221: note = Description of Artificial Sequence: Synthetic polynucleotide
  source 1..221: mol_type = other DNA
tagttgttaatttcgcgcgcggagtttttcggcggtgtagtttcgtttcggcggcgcgggcggtatgaagattagtcgtcgcggtcgagcgtttttggtcgtggttttgaatttgttggcgttgttgttcgttattatcgttttttttattacgtattggtgttagggtacgtagcgggtttttaagtcgggttgcggttagggcgggcgcgttaattgtt

SEQ ID NO: 5087 - DNA, 201 bp, synthetic construct
  misc_feature 1..201: note = Description of Artificial Sequence: Synthetic polynucleotide
  source 1..201: mol_type = other DNA
gcggggaggggatggggtggcgggagaattgtttttttttttagttataaatttattaggtttttaaattttttttggattttttttttcgcgttttcgcgagttcgggatttaggggatggagaattcggggcggaggagcgtcgagttaggcgggagggaggtcgagtcgtgggcgggaggcggatcggcgtggggttg

SEQ ID NO: 5088 - DNA, 246 bp, synthetic construct
  misc_feature 1..246: note = Description of Artificial Sequence: Synthetic polynucleotide
  source 1..246: mol_type = other DNA
gtttcgggggtttttagttaagtatcgtttggtgttttcggtttagggtcgtgtgagtcggaggttgagtttacgtaaggtttttatttgtatagattacgagttggagaattatagtatgtattgcgtgtaatgtaagatgttcgtgtgttattagtgtttggaggagggtaaatattttagttacgaagttaaggttttgggggttatgtggaaattatataaggtgagttttaagaaaattta

SEQ ID NO: 5089 - DNA, 223 bp, synthetic construct
  misc_feature 1..223: note = Description of Artificial Sequence: Synthetic polynucleotide
  source 1..223: mol_type = other DNA
tcgattatgattatttggatttggataagatgagtttatatagcgaggcggatagcggttatggtttttacggggggttcgttagcgtttttattatttcgtgttagaagttttttaacggcgttcgcgtgtttttttcggttatgtcgttatcggttatttatttgttatcggttttggtttcggtgtttcgtaatttttgtattatttgtttttagtgtta

SEQ ID NO: 5090 - DNA, 201 bp, synthetic construct
  misc_feature 1..201: note = Description of Artificial Sequence: Synthetic polynucleotide
  source 1..201: mol_type = other DNA
ttagggtacggcgttagcggatttacggagaaggagaaaagttttattgtcgtgtagaagtttaggttcgggtgagacgtttgcgaaggttgttagtagcggaagagaaggggcgtttttcgtgttgcgtagtattcgttcgcggtaggtgggcgcggagtttagagttgggagttaaacgtaaacgttggcgagaagttt

SEQ ID NO: 5091 - DNA, 244 bp, synthetic construct
  misc_feature 1..244: note = Description of Artificial Sequence: Synthetic polynucleotide
  source 1..244: mol_type = other DNA
gtttcgttgttttagcggtcgttgttttagaaaagttaacgagaattagatgtggtggttattgtcgaatttttttagagtcggtgattggtttttagtcgagggttttagttaattagtttgttgggtgggtttggagtttcgtttcgtttaggcgttcgcggagatttaggttcgaggttggcgcggcgcggagagtgggttggaggtcggggcgggacgcgttgtgtagcgggtaagcgta

SEQ ID NO: 5092 - DNA, 201 bp, synthetic construct
  misc_feature 1..201: note = Description of Artificial Sequence: Synthetic polynucleotide
  source 1..201: mol_type = other DNA
tttgttcggttcgttgaaggttggttttgggtttgggggtagtgttcgcgaagggttgcgatggtaggtttcgttgttatacggtatcgagggttttttcgtttcggcgttaggcgtacgtttttttgttatatttttcgcggggcgcgtcgttagggttatttgtttttttaagtttcgttaggtagttaagggtgagga

SEQ ID NO: 5093 - DNA, 457 bp, synthetic construct
  misc_feature 1..457: note = Description of Artificial Sequence: Synthetic polynucleotide
  source 1..457: mol_type = other DNA
ttgagggaggggtcgggttttcgggtttgtagattcgttatcgcgcgtgcgtatgcgtcggtcgcgagttttcgggtgtaggtttgggcggtttcggttcgcgtatttgtttaggcgttgcggtttagcgcgttttaatttttagttcgggcggagagcgggggcgggattgaagtatcgtgttttttaaagtattttttcgtcgtcggtagttttggtttcgtaaatgttttagcgcgtttaggcgtacgtagagattggcgcggtagttttcgggttaacggtacgcgagtaaagttggttggcgatttgggatacgtagtagaagttgaggttgtatcgattttcgtcgtttcgggggaggtatgggttcgggtaggtttaggaggaagttgtatagttcgaggttcgggcgggagtggcgggtcgcgggtaagggaacgtatatttggaaggg

SEQ ID NO: 5094 - DNA, 244 bp, synthetic construct
  misc_feature 1..244: note = Description of Artificial Sequence: Synthetic polynucleotide
  source 1..244: mol_type = other DNA
gcgttttttttgcgcgcggcgaggtcgagacgtttttcgcggtgatagcgtgtaaggcggagattcggcgcgtttttagtttagggaaagtttaggcgacgcgatcgtaagttcgagtttaggtttttcggagtcgttagggcgcgtcgggttgtttgtttttttgtttttttttgtaggaatttttcgtcgttcgcggtcgggatttcgggtttttttcgggcgtagattttagttatcgttt

SEQ ID NO: 5095 - DNA, 206 bp, synthetic construct
  misc_feature 1..206: note = Description of Artificial Sequence: Synthetic polynucleotide
  source 1..206: mol_type = other DNA
gagcgtagcggcggggtatggaagaagagggttgggggcgcgcgttatttgtaaaggttttcgaggtttttttttagttttggtggtaatttcgtttagcgtcgcgtttttttttagatttaaatttttgttgggtttttcgggtggcggcggcggcgacggcggcggttgttggagttaagttttgtcgttcgtagcgtcggggc

SEQ ID NO: 5096 - DNA, 203 bp, synthetic construct
  misc_feature 1..203: note = Description of Artificial Sequence: Synthetic polynucleotide
  source 1..203: mol_type = other DNA
agagagatagtatgagaacgcgtagagttgtatttcgcgggggtcgggcgttagtagtatcgcgttgttttatttacggcgcgtttgtttttcgcgttgcgcgtttagcggggcgtcgagttttagaaattttagtatatggtcggttcggcggttacggtggtcgtagttgttttgtttttcgagcgttttttattgttttt

SEQ ID NO: 5097 - DNA, 266 bp, synthetic construct
  misc_feature 1..266: note = Description of Artificial Sequence: Synthetic polynucleotide
  source 1..266: mol_type = other DNA
cgtgattatttttcgttttattttcggggcggggttcgttagaaattttaagcgttcgtaatcgttttttttcgtgggcgggatggggaaattgaggttcgaggtcgtttcgttggttggtgtaagaattagtttgtaatttaagttttgagttgttggcgtttcgtttcgtgtagttgaatttaatttattcggggttgtgggtagcgtttttttggggttgatacgttatttcgagtttgaggattaagatcggagtgatttgg

SEQ ID NO: 5098 - DNA, 242 bp, synthetic construct
  misc_feature 1..242: note = Description of Artificial Sequence: Synthetic polynucleotide
  source 1..242: mol_type = other DNA
ttcgaatttttttaaatttggcggttcggggcgcgtgggggggacgtttcgttatttgcgcggttataaaggagagatttatggtgtcgttgtagttagcgttcgagttttcgttgttgtcgttgtcgttgcgggttagtcgtttgtatagttggcggggatcgggttgagtagcgagcgttcggagatcgtacggcgtattcggttgtttttgggtttttggttttagatttttattaggc

SEQ ID NO: 5099 - DNA, 201 bp, synthetic construct
  misc_feature 1..201: note = Description of Artificial Sequence: Synthetic polynucleotide
  source 1..201: mol_type = other DNA
taaagtaaaataggataaacgatcgcggcgcgtcgacgtttggcgggttacggttataaagcgggttttagagttttttttaggcggcggtaaagggggcgttcgaggttatcggtaagagatagattattggcgtttcgggaaaatagagtggggaagggcgagattgtgtgtttatttacgttcgcgcgggtttgagtt

SEQ ID NO: 5100 - DNA, 201 bp, synthetic construct
  misc_feature 1..201: note = Description of Artificial Sequence: Synthetic polynucleotide
  source 1..201: mol_type = other DNA
acgttggcgaatgattatggaaataatatttaatagtagtgttttttatgttaggtatataatcgttttggcgtgggttgataattatgtttattttatcgcgtggtattgagtcgatcgtatatttagggtttcggtttttagggttcgtttattcgtttattgcgtgaagtatttattttcgtaggagtcggagtagga

SEQ ID NO: 5101 - DNA, 312 bp, synthetic construct
  misc_feature 1..312: note = Description of Artificial Sequence: Synthetic polynucleotide
  source 1..312: mol_type = other DNA
tggtcgtttttttcgcggttaggcgtattttgtagcgtttagatcgtcgcgtttttattcgcgtttttaatcgcgagcgttcgtttgggtcgggtcgggcgttcgagattcgggagagattaggggttcgtaaagtagaagagtagatttagaaagaaaaaaaaaaaagcgagaagtgcgagaaaaatatattgaatttagttaaatatacggtagatgaaaaaaatattttgtttagaagttaaaaacgagttttcgagtcgtgagatattgttgcgttttcgttaggcgtgtaggtcggatgttaggggg

SEQ ID NO: 5102 - DNA, 203 bp, synthetic construct
  misc_feature 1..203: note = Description of Artificial Sequence: Synthetic polynucleotide
  source 1..203: mol_type = other DNA
gcgttggtagggggaggtttcggtaacgtttgggggttttaggttagtttttttcgggttggaaggtatcgtataggggttttcgttaatttcggttttcgcgcggtcgggatacggttatatttgttcgcgggggtttgttttttaggtcgtcgtaggtttttcggagtttaagaggattttataagtagttaaagttagcg

SEQ ID NO: 5103 - DNA, 201 bp, synthetic construct
  misc_feature 1..201: note = Description of Artificial Sequence: Synthetic polynucleotide
  source 1..201: mol_type = other DNA
tttcggggcgggcggcgaggggcgggagtttagagagtgtttcgtttttgtttagtgttgggcggcgcgtggggggggtagggttttcgtttttttacgcggtttcgcgtattttaaggattttaatttgttaggtgagtttttgtttcggggaggggcgttgggggcggcggcgaggatttagttgcgcgcgcgtatgcg

SEQ ID NO: 5104 - DNA, 283 bp, synthetic construct
  misc_feature 1..283: note = Description of Artificial Sequence: Synthetic polynucleotide
  source 1..283: mol_type = other DNA
gtggtaaggtttggggattgagaggttcggtgagtgttagtttcgtaggttgcgtcggtgttcggtttttattttagttcgggggttttaggtttttcgcgggttttggggcgttggtgttcgcgtagttttagtcgttttcgtagttatcgtcgttcggtttcgcggaggcggcgcgtagcgggggcgttcgggcgttgtttttttgaggtttcgggggtttagggtggttcgtagtgttattggttagggtttgcgatttttggggttcgtcgtcgtcgtt

SEQ ID NO: 5105 - DNA, 201 bp, synthetic construct
  misc_feature 1..201: note = Description of Artificial Sequence: Synthetic polynucleotide
  source 1..201: mol_type = other DNA
gaacgttttttagttcggtttggtattggcgtcggtgttttttattttggttattacggtttttagggatttgtgggaggattatagtcgttatcgtttcgattataagattaattatttgggttgtttggtttttagtaggtgagttgggcgggcgggcgagcgagcgcgcggtggcgtagggtagggcgtttcgggaat

SEQ ID NO: 5106 - DNA, 247 bp, synthetic construct
  misc_feature 1..247: note = Description of Artificial Sequence: Synthetic polynucleotide
  source 1..247: mol_type = other DNA
aggcgtagatttacgagttggagcggcgttttcggtagtagcggtatttgtcggcgttcgagcgcgaatatttggttagttttattcgttttacgtttacgtaggttaagatttggttttagaattatcgttataagatgaagcgcgttcgggtcgagaaaggtatggaggtgacgtttttgttttcgtcgcgtcgggtggtcgtgttcgttttggttagggacggtaaattatgttacgcgtttaa

SEQ ID NO: 5107 - DNA, 427 bp, synthetic construct
  misc_feature 1..427: note = Description of Artificial Sequence: Synthetic polynucleotide
  source 1..427: mol_type = other DNA
tagcgcgtttcgggtttcgcgcgtcgttagtttttggttcgttcgtcggtttcgtcgcgttcgttagtttcgtagcggagtttcggttcggtttcgggtcgtcgttattacgtcgcgcgtcgtatttcgcgttaagaatggggcggttaagttgtttaagtcgttcgtcgtcgtcgtcgtcgtcgcggtcgaggcgttcggcgtcggcgcgggtatggagcgttcgtagagtcgttttagtttgttcgtttttttcgaggcgttcgttatttatttttcgtgtatgaattttttcgacgacgaggacgtaggtaagcgcgcggttcgttttttagattttcggggtgtttcgggatttaggttcggtagtttttttttcgattcgtgcgtttttttttttatttttaattttttgggaaggcgtttt

SEQ ID NO: 5108 - DNA, 246 bp, synthetic construct
  misc_feature 1..246: note = Description of Artificial Sequence: Synthetic polynucleotide
  source 1..246: mol_type = other DNA
ttcgggggcggttgtacgtggtcgtggttttgaattttttgcgggggtttcgaaattcgtttgcggggaggttagggcgatagaggattcgggagttatcgttggtgcgtggcggcgtggagcgcgtttgttacggttaaggtgcgggttcggtttcggtttattttaaggggttatcgggatgcgaagttcgggacgttcgtcgtcgcggtgatttcggcgggggcgtatttcggttgtgggtcg

SEQ ID NO: 5109 - DNA, 384 bp, synthetic construct
  misc_feature 1..384: note = Description of Artificial Sequence: Synthetic polynucleotide
  source 1..384: mol_type = other DNA
tggtggcggaattttcggggcggtcggaggcggcggtcggggagtcgagaagtaagtattagcgttttaggatcgcgcgcgtcgtttcgcgtcgtttcgcgtcgtttttcggtttagagtttttattttcggtttgtgagtttgcggcgttggtggagttcggttttaggaagaggagtttattcggttttttttgattggatagtagcgaggttttatcgggcgttttcgcggtttaaaatcgaagcgggggcgagggggaggtagagttcgttttttgcgcgtcgcggttgggagggagaggaggtgggagagaaggaagaggcggaggaggtagcgggcgtcgaggttttgggattcgtaggtaagttagatcgacgcgta

SEQ ID NO: 5110 - DNA, 415 bp, synthetic construct
  misc_feature 1..415: note = Description of Artificial Sequence: Synthetic polynucleotide
  source 1..415: mol_type = other DNA
cggggggggtaggggtttcgggtcgcggggtgcgggggttgcgttaaattttcgcggggcgtttcgggcgtacggagggttcggcgtttattcgttcgacggcgttttatttattggcgtttacggttcgtaggtaaagcgtggaaggagttgaacgcggcggagaagcggtttttcgtggaggaagtcgaacggttgcgcgtgtagtatttgcgcgattattttaattataagtatcggtcgcgtcgtaagaagtaggcgcgtaaggttcggcggttggagttcggttttttgttttcgggattagcgttttcgtagttatcgttcgagttttttttcgcggcgtttggttcggttcgcgtttttcgcgagttgttttcgttgggcgtcgagttcgacggtttggggttgttta

SEQ ID NO: 5111 - DNA, 543 bp, synthetic construct
  misc_feature 1..543: note = Description of Artificial Sequence: Synthetic polynucleotide
  source 1..543: mol_type = other DNA
cgttggaagaaaaatttttcgcgcgtcggtagaattgtagcgtttttttttagtgatttcgggagtttcggttgtagtcggttttgcgcgtttttttaacgaataatagaaattgttaattttaataatttagagtaggttaacgaggttttgttttttcgattcgaattaaaggtttttcgtttcgtgcgttgttacgagcggtgttttttggggttttaatgtagcgagttgtgttcgaggggttcggaaggcgtaagttgggtagcgatatggggaacgcggagcgggtttcggggtttcggagttttgggttagtatttacgttgttgttgttcgtcgcggcgttattggtcgtgtcggacgtattcgggcgttttttcgaggaggacgaggagttagtggtgtcggagttggagcgcgtttcgggatacgggattacgcgttttcgtttgtacgtttttgattagtagttggatttggagttgcggttcgatagtagttttttggcgttcggttttacgttttagaacgtggggcgta

SEQ ID NO: 5112 - DNA, 227 bp, synthetic construct
  misc_feature 1..227: note = Description of Artificial Sequence: Synthetic polynucleotide
  source 1..227: mol_type = other DNA
tttagggcgtagattttttattgtttttcgggtttttttcgggttttttttttgatttttttttttttttttttcgagtttttgtttatatttaggttgcgtttcggtttggttgttaaatagaacgacgtttttgcgtagagttgattaggggtggcggcgggaggtaaggttttcggtatcggaaagtaaagtaaagaaaaaggtattgtagttatcgtttttgg

SEQ ID NO: 5113 - DNA, 323 bp, synthetic construct
  misc_feature 1..323: note = Description of Artificial Sequence: Synthetic polynucleotide
  source 1..323: mol_type = other DNA
ttttgtttcgcgattggcgggagtcggagtttttttgaattcggcgtttatattatgggttgagttcgtcggcgtcgagggagttagtgcgattcggttcggcgcgtacggttaaggtacgcgcgttggtatacgcgggcgcggatacgcgcggatatatacgtgcgggatacgttttttttcgacggcggcgttaatttttcggtaagtttagcgttttacgcgatttgttcggtttttacgttggttatagcggttgcggggacggggaggaaggtagcggggtggttttaggggtttattttgtagggttttttcgacgg

SEQ ID NO: 5114 - DNA, 279 bp, synthetic construct
  misc_feature 1..279: note = Description of Artificial Sequence: Synthetic polynucleotide
  source 1..279: mol_type = other DNA
ggcgtagattatttggaaggggttgtggatgtcgtgcgtggtgtagagtatcgggtatatgtagtgtaaagtgtacgattcggtgttggttttgagtatcgaggtgtaggcggcgcgggcgtttatcgtgagcgtcgtgttgttggcgttcgttgcgtttttcgtgattttggcgggcgcgtagtgtattatttgcgtggtttcgggttcggttaaggcgcgtgtggtttttacgggaggcgtgttttatttgttttgcgggttgttggcgttcgtgtt

SEQ ID NO: 5115 - DNA, 261 bp, synthetic construct
  misc_feature 1..261: note = Description of Artificial Sequence: Synthetic polynucleotide
  source 1..261: mol_type = other DNA
ttttcgtcggtggaggtcgcggttggcggagatcgttaagttagaggaggggattcgaggtttcggttgggcgaaggttttggagggggagaagacggtcgaggcgtggaggggtagtcgcggcggggcgatttttatttgtttattgcggggtttgttcgtggggtcggggtagatttcgtaaaggacgcgtagtttgtaagttcgcggttcgcgcggcgcggggatggggagcgtgtgcgtcgaggagcgcgcgtcgag

SEQ ID NO: 5116 - DNA, 364 bp, synthetic construct
  misc_feature 1..364: note = Description of Artificial Sequence: Synthetic polynucleotide
  source 1..364: mol_type = other DNA
tgtacgcgcgcgtggttcgacgcgaggttcggtcggttcgggttcggggcgagattgggggtttgtcgttgtcgttatcgttcgagcgtaggaaatcgtcgttatttgatttcgttattaagtttaaggtgttttggatttacggtaagtatagcgtcgttgtagttggtcgtgcgtttttattatcgtcgttaggtttcgaggtcgcgtttagttttagtaagaggaaacggacgtttagcgataaatcggcgtatacggtcgaatacggtagttttcggattcgcgatttaacgtcgcgtttttcggggttgttcgaggaggcgatagttttcgttgcgttttcgtcgtttagggttcgagc

SEQ ID NO: 5117 - DNA, 242 bp, synthetic construct
  misc_feature 1..242: note = Description of Artificial Sequence: Synthetic polynucleotide
  source 1..242: mol_type = other DNA
tagggtggaggcggtgtttgattgtttttttgcgtgtgttttgggaggtgggtttgttttggggatagaggtgttggacgtgtaggagtagatatgtcgcgcgtttcgaggaagcgtcggaattattagaagtatagggacgcgggtgtcgagagtttttagtattgaaaacggggatttttttttttgtaagggattttttttttttgttttaatttatttttttagatttaagggacgtt

SEQ ID NO: 5118 - DNA, 285 bp, synthetic construct
  misc_feature 1..285: note = Description of Artificial Sequence: Synthetic polynucleotide
  source 1..285: mol_type = other DNA
tagtttcgggtcggggtggttgttttattttcgtggtttagggaggaggcgttgggtgcgtatgtttaggggtgtgttcgttgttagggttgtagcggtcgttatttttaattagttgtaagtcgagttgtttatttgggatcgggtcggttcggcgggtttggttttcggcgaaggcggcggcgttggtgcgcggcggttggggcgcgggacgtaggtagtgcgtggcgcggttggcgttttcgggcgtcgttatcgagcgagggtgcggtttcgggcggtcgt

SEQ ID NO: 5119 - DNA, 222 bp, synthetic construct
  misc_feature 1..222: note = Description of Artificial Sequence: Synthetic polynucleotide
  source 1..222: mol_type = other DNA
cgttatcgttgtcgtcgttttttcgcggagtgacgcgttttgtagttaatcggggtagtcgggggggaggttcgggaggggttttgggcggagtcgggtcgtttttttattttacgggttcggggttgtttttttcgaaaattttagttttaattgttttgggaatgttcgaggtagagaaagggagcgagggagtaagtaagaagttggaggattagtgtt

SEQ ID NO: 5120 - DNA, 201 bp, synthetic construct
  misc_feature 1..201: note = Description of Artificial Sequence: Synthetic polynucleotide
  source 1..201: mol_type = other DNA
gtagcgttttttggtttcgcgcgtcgttcgggggtcgttggttcggtgcgtgtggtcgtttcgtcgtttggttggagtttgtttcgcggcgtagggttgcgtttcgagggttcgttggttcggtggtttggggtttgttcggtttagcggtttatggttcggttttcgcgttttagttttcgtcgtcgtcgtcgtcgtcgt

SEQ ID NO: 5121 - DNA, 298 bp, synthetic construct
  misc_feature 1..298: note = Description of Artificial Sequence: Synthetic polynucleotide
  source 1..298: mol_type = other DNA
tcggttttgggtggcggcgtcggggtagcgcgttcggtcgagtcggggagaggagcgcgggagattcggagcggagcggtaggagagcgcggagcgaagcggtaggagtagtttatagttaggagcgttttttcgtttttaacgtcgcgtttttttttttaaaacggtttaaaaaaatttattaattgtatggtcgcgtatttttaaaaaggtattcgtcgttatttggtttcggtgaattttaggaggcggaggaagggcgcggggtgggtgcggtgatatcgtgggaggtggtttt

SEQ ID NO: 5122 - DNA, 272 bp, synthetic construct
  misc_feature 1..272: note = Description of Artificial Sequence: Synthetic polynucleotide
  source 1..272: mol_type = other DNA
tatttatttcgattcgaggttgtttattcggtttggtatgtttcggcgtttttggggtttttgtatttcgttggtttttcgttgtggtgtttcgtagttcgattatttttgtgtttttaggagtttattttgggcggtagggaggcgttgcgtggggtttacgagttttacgttgttatttttattagtttttattttttaggcgtttgttttttcgtattgttaggttttgttttcgtagtatttggtagatttgagttcggtttttgtta

SEQ ID NO: 5123 - DNA, 201 bp, synthetic construct
  misc_feature 1..201: note = Description of Artificial Sequence: Synthetic polynucleotide
  source 1..201: mol_type = other DNA
tttagtaatatttgtagggttggtttttcggtcgtttatttcgttagtttgggtttttgtgtggagtgcgtttttgtgtttttggttagtcgtcggttacgtgtattttttgttaggggttggtaggttttttatttgtttaaattagaaatataaggtatagtggtttttagttgagggatggtatttttttttatgttt

SEQ ID NO: 5124 - DNA, 251 bp, synthetic construct
  misc_feature 1..251: note = Description of Artificial Sequence: Synthetic polynucleotide
  source 1..251: mol_type = other DNA
tacgtttttcgcgttcgttcgcgtttgttttaggtttttatcgcggttttttttgttttcggggtcgttttgttttttatagattttattttcgggggtcgtttttaggattttcgttcgtttttttttgattcggtttttgttcgtttcgtttttttttttcgggttttttatttttttttcgtcggtttcgatttcgggggcgtttcggatttgtttttcgaatatttttagtttcgtttttagtttgc

SEQ ID NO: 5125 - DNA, 249 bp, synthetic construct
  misc_feature 1..249: note = Description of Artificial Sequence: Synthetic polynucleotide
  source 1..249: mol_type = other DNA
cggcggtttttatttggagtcgtatttggggcgtcgagtttcggggtcgcggaaagaatgcgcgtcgttcgtgcgtttcgtttgtcgcgtttggttattcgtagtcgtcgcgttcgtatttgattatggagtgcgtttttttgttcgcgtgtgttttttcggttgcgggttcgggttcgtcgaggggtttggcgggattggggcgcgtggttaaggtaggtgtcgtcgagcggagtttcgagagcgggt

SEQ ID NO: 5126 - DNA, 249 bp, synthetic construct
  misc_feature 1..249: note = Description of Artificial Sequence: Synthetic polynucleotide
  source 1..249: mol_type = other DNA
tttttagagttaattttttagatttggaggtttttaaggttttcgtaatttagtgagtttcggggtattaataaattttcgcgggggttatcgcgttcgcgaacgtagagtttatacgtggattttcgcgtttgtgatgtttcgattcgtttcgggttttcgtatagataatgtcgcgcgtttttttcgtagttatttcgggattcgcgtttcgcgtcgttcggacgtttttttgcgtttgtcggggat

SEQ ID NO: 5127 - DNA, 201 bp, synthetic construct
  misc_feature 1..201: note = Description of Artificial Sequence: Synthetic polynucleotide
  source 1..201: mol_type = other DNA
ggtcgcggcggtcggggtcggtgtcggcgtttttttgggcggtagcggcgaggagatgggtttcgtcgtcgtcgtggtgttcgtcgtgatcgtcgcggtcgtcgcgtagagcggcgcgggttcgtattattattattattattattacgtcgtcggttattattattattcgacggtcggcgcgttcggcgtcgcgggtag

SEQ ID NO: 5128 - DNA, 201 bp, synthetic construct
  misc_feature 1..201: note = Description of Artificial Sequence: Synthetic polynucleotide
  source 1..201: mol_type = other DNA
atggtttaggcggtcgtttcgcgcgttttagtttcgtcgcgcgtttgagttcggtgcggcgttagaagatagcgcgtagtcgtttttgagtcgtggaggcggggattaagttggaaggagtagcgattttcggatcgagtcgcgagtgtgcgtcgttcgtcgttcgtcggatttttcggatttttcgatcgtaagtgtcgt

SEQ ID NO: 5129 - DNA, 251 bp, synthetic construct
  misc_feature 1..251: note = Description of Artificial Sequence: Synthetic polynucleotide
  source 1..251: mol_type = other DNA
atcgcgtagttcgcgttttattgtcgatcggattttacgttgttgtttttagcgttgcgcgttttgcgcggattcgcgttgttggacgtcgttatttcgcgtttggggtttacgcgagtcgcgagtttttgtttgtttttgcgttatttcgatttcgcgttttgtattcgtttcgggttcgcgtttcgcgttcgtacgtaacggtattcggttttgtatacgcggttggttttacgcgttgttcggcgtcg

SEQ ID NO: 5130 - DNA, 201 bp, synthetic construct
  misc_feature 1..201: note = Description of Artificial Sequence: Synthetic polynucleotide
  source 1..201: mol_type = other DNA
ggggtttcgttgagttgagttttgcgattcggtttatgtgacgtgagttttattttaatttaagtgtgaggaagcgaatagcgttttgaaacgtagaaacgtgtttattcgaattgttaacgcgagcgtagagtttattgataaagtaaaataagataaatcgggagttagaaaatttagcgatttataggatttatcgtg

SEQ ID NO: 5131 - DNA, 201 bp, synthetic construct
  misc_feature 1..201: note = Description of Artificial Sequence: Synthetic polynucleotide
  source 1..201: mol_type = other DNA
ttttagaattcgcgggttattcgggagtttttttcgtagtattagtcgaaagtttttagtgtcgaggagggcgggtagttgtttttttcgatttcgtttcgttcgcgcggacgttttcggttttacgcggggattatttcgggattttcgtcggatttcgcgcgttcgcggttaatttgcgtgtatttgcgtttcgcgtta

SEQ ID NO: 5132 - DNA, 201 bp, synthetic construct
  misc_feature 1..201: note = Description of Artificial Sequence: Synthetic polynucleotide
  source 1..201: mol_type = other DNA
aggtcgagttcgtacggcgttttcgtgtagttagcggttagtgatcgcgcggttcgggcgtttttcgcgcgttttagttttttagacggggttcggacgcggacgttttttttgtagttttgttttgatcgttagggatgggttttgggtatttagcggttgagggtggggagcggttagcgtttgatgtttagtttttta

SEQ ID NO: 5133 - DNA, 337 bp, synthetic construct
  misc_feature 1..337: note = Description of Artificial Sequence: Synthetic polynucleotide
  source 1..337: mol_type = other DNA
gtggtttcgttttagggtcgcggggaggcgttttcgtgcggggcggagttgttatcgttttttttttaattttcggggattgtggtttttttttaagttcgcggcgtttttagttgttttttattcgtttcgttcgttagtttttttttcgcgcgatggtttcggcgttgagttatgtttttaagtttaagtttttcgtgattttgttcgttatttcgtttttgttgttgttattcgttattttgatgttcgttaaggttagttgtatttttaggtagtttttcggatattcggcgttttgtgtttattaacgggtatcgatttcgggagttttgag

SEQ ID NO: 5134 - DNA, 201 bp, synthetic construct
  misc_feature 1..201: note = Description of Artificial Sequence: Synthetic polynucleotide
  source 1..201: mol_type = other DNA
tgttttcggcgttttacgtgtggcggcggttagcggcggtttaggaggtagtcggtgagcgtttgcgagtagagtggcgggggtcgttgataggtttcgcgtagtttagtttagtttagttacgcggtttataggtggggtttaagagtagtttggagtaattcggcgttacggagaggggtggacggttttgtacgggtt

SEQ ID NO: 5135 - DNA, 201 bp, synthetic construct
  misc_feature 1..201: note = Description of Artificial Sequence: Synthetic polynucleotide
  source 1..201: mol_type = other DNA
ttttttgcggcgaggtcgtttgatgaatttaagggtattagtgtttcgcgagaattttttgtgggttgtgacgagaattaagcggagcgtaatttttatcgtattcggataggatgcgttgcgtaatttgtcgtagtttttttgttttatttcgggtggttcgaagttgtaattttgttaattttttattatacgttatgt

SEQ ID NO: 5136 - DNA, 201 bp, synthetic construct
  misc_feature 1..201: note = Description of Artificial Sequence: Synthetic polynucleotide
  source 1..201: mol_type = other DNA
ttttgtagttttgtttagattcggaagtcgtcgaggaagggaggaaggcgggggtggggagagcgcgattttaagcgttggcgggcggcgaggaggggtcgtagcggttcgaggaagcgtttggaggcgttaggggcgtcgagtttttagggaggtcgcgttttcgggaagttttttatcggttgttcggagtaggatcgg

SEQ ID NO: 5137 - DNA, 2567 bp, Homo sapiens
  source 1..2567: mol_type = unassigned DNA
gcgctgggcgatgagggaccgttgggtaattgggggcataggaccgggcttcgctgggttcggggcagaagcgccgaagctccgacccggaacgcggtgacttcatcaacgcagaagcccgcgcagccgagcagaggagtccctcgtaggcgaccctcggacagacgctcctgcgcggcccgcgtggctcagctccgccccaggaaacttttcgcgcagcccccgctccatgcgcccccacccagtccttcttcggggccgccccctccccaaagtagctctccgggtccactgggcgcccccgtaaccgggtcggaacctcgaacggcttcgcgtgccatccggttaccctggcaacaccatccggcggcgcccggcggtccaatcctagcctgcggcctctctcgagcctttcgcaaggtggggaccgggacgcgaccggggatggggaagggggctgcaggaggccccgcctgcgctgtcgcccctgctgggcacagcgccccccaccacccgcggcgaccccggcccccgcaaggtggggcggcgagcaggagccggggccaggccaggggctcgagctcccgttcgaggggcggggaaggcgggtgacgtgagccgggccgggcgggcggagttgggaccggctccgggaggcgggggcgagcgcgcggagaggcagacgcgaggagggaggcggctgagcagcgcgggcggctctgcggcgggcgcggtgggcgcgggcggcggggccccgggatccccgcgcgcctcctccgcgcggcgccgccgccgcgcgtccccacgccccgcgctccacggcgccctcgccccgcgcgcctctcgtgcccgcctcctgccagtctccgggccgcggccgtctgcagagcgagcgctcagacggagcccccgggcaacttgagtggcgccgatcggcggcggagcctctggcagagccccccgacccggcagcgcggaggggactcgcgtccgtccgcgtcgcgtcaccccaaaccctaagcagcgccgccccatcggcgcggagctccggctggaggcaagagccgcgcgccgggagacacgcaccgtgagcggcagcgccgccggcctccctcctcgccgccccggagggcgaagccgcggctccccagccctttgctgcgccgcgacagcgccggaacacgccccgcctcgctgccgccttcgctgtgccgccggcggagggggccgcgagccccgcgccccggccggaggatgtgcgcccccgcgggccgcccagcctgagccatgcgccccaacggcggcggcgcgccggccggcatggagccccgcgcggccgcgctctgactcgctgtgcgccccgcggccggcgggcggcgggaggcggcggaccgagagccggagaccggcgccgcgggacggaagcgagcgggcgcgggcgccgcgcagatggcctgggcgagccaggtctgaggccccgctccccgaaacgtgaccatgtggattcaacagcttttaggactcaggtgagcgacccggccggcgccgggtgcgtgtgggcgcgtgggtgccaggctgggcggaagcggcgctttcctctatgttgcaaatcaagggacccctcttcgcttcccgcaagcgggcaacggggtgcaccggtagccggaaaggggcgcccgcccggagcctggagcagcaccgcggccctggcggggagcggccgggtctccagggttccgcgcgtccggggtcggggcagcggcgcccgccccagcaacccgggaagtggggccggccaggcgcgcccgcagctctaggagccagcagcgcagtgtcctggccggctgccccggcgcgcctcctccccggggcccggggcgaggcgccggccgctgggcgcggcgggcgcgggggccggggctgccggggaaagctaaagctccgggctcccagcgagagcttcgcaggcggagttggaggaaaccacagccaaacagccactccgctcccccttctcctttctcggggccccggggctgagcaggggcctcccaggctcccagctgccgacccagctgtttgcgggtgacctccgggcccgacgggcgctcacagctggcgggcagctggggcgggagagctggggttcttggggagctccggcggccaccccgctgtaaacacacacgcacatacgcccgccggcgcgcccggggcttgtctgtgtctgggactccagggccagatggaagagggggttcgagcctagagcccgtggtgggggtgtccagaaagacccttctcggcaaactttgccagcccgccggggttctcgggcttctctggcttctgcctggggtggcccagggcccaccagagcacagctgtcgtttttgctgggcaggctgcctctgagccctcgccctcctgccggggcattcaccgagctcgtgcatttgggtcccgggttggaaccgcgagcggggaggacagaggtggaggcggagagcagcgtgcggttctcgagtttgtccactgggatgcactgcgctcccgcgttggggacg

SEQ ID NO: 5138 - DNA, 573 bp, Homo sapiens
  source 1..573: mol_type = unassigned DNA
gcgcccaagaagtcggggtcctccctggccacgcgcctccgggggcgctcgcgctctccaggccctggctgcctgggcgccgattcccgggacgcgccggccgacagcaggggaggcggcagcagggaccgcagcagcccccgcttccgcacggcccgccgggtcgcggtgagcaaggcgggcaggcgcggcgggaggcgtccgacgcccaccccgggcttggcgtccccttccggccaccacgcggcgccgccccccgggatcctccagtccccggagccccgcgcgcccagagccgctcggagcgcgggcggggtcagcttgggcagccgcgggtcgctgctgcgtcggaagtctccgtcgccagggagccccttgggcgccaggtcctgggcccctgggcgaagtcgacgccagaacatgcttggccccgcactcagctcaccgcaccctcagcgcgcgtgggtggggggcgccggctgaggtggggagggcatagtccagccccaggccatagtgccccgggcggggcagcgcggtgcggggtgaacgccaccggcccggcggacagcg

SEQ ID NO: 5139 - DNA, 383 bp, Homo sapiens
  source 1..383: mol_type = unassigned DNA
ccggcccccatagcggctccgggccctcggatggcgtgacggcttgtggggcctgcggggtgcgctgcccccggacctgcggggggaggcggctgagctggcggcgctcgcgggcccagtggtgagtgcggcgtcctcacgcccagcccgacgcctccggagcggccgccgcgcaggggtgggcgcgggcttccaggagggagggcggctgtgaacgcgccttgctttccgcgcctccgcagtttcttgcgcagttgatgatctttataatcagcctcgtcagctccatcttctgtggacatctgggcaaggtcgagccggacgctgtcacgctcgccgtcacggtgggtgcctgatttcgcccctgtaggagccgacgggcg

SEQ ID NO: 5140 - DNA, 853 bp, Homo sapiens
  source 1..853: mol_type = unassigned DNA
ccgccccaggggcactccgtaggcgagatccctgcagatcctagctaggaaacgccagtgaacggcagcgcagggaacggggcggggccgctggcttcgcccaccgccgcggtgttgggggctgggggtggccctcgggactggtgtggagcctgggcctgacccactgacttggctgagtggggagactggagggtcgcatccggagctgggcccggggacgcccgctggtgggaagggtgtgcgcgcgtcggaggccgcggctgaccctgctccggcgctgccaggtacggcatcagcccggacagcatcatcctgtaccggcagagcatcggcacggtgcccaccgtggacctggcctcgcgctacgagtgtgccgcggtggtgctgcactcgccgctcacctcgggcatgcgcgtcgccttccctgacaccaagacgacctactgcttcgacgccttccctaagtgagcggcccgggcggggacggaggcggggcggggacggaggcggggcggggcccgggccgggcgctaagtctcacccgctccacgcccctcccgcagcatcgagaaggtgtcctagatcacgtcgcccgtgctcatcatccacggcacggaggacgaggtgatcgacttctcgcacgggctggcgctctacgagcgctgccccaaggcggtggagccgctgtgggtggagggcgccgggcacaacgacatcgagctctacagccagtacctggagcgcctgcgtcgcttcatctcccaggagctgcccagccagcgcgcctagcggcggccccaaccggccggacctcagcaataaggcggcccccggacctcaccccgcgccg

SEQ ID NO: 5141 - DNA, 1062 bp, Homo sapiens
  source 1..1062: mol_type = unassigned DNA
ccgggatgaatgcagtcacggaacgcgccaatgcaggaggcccccaggacatcctgagcgctcgggagacgccaggcgcggcagcgggcacggatagcggaaaggggcgcgaccccgcggaatcctccggcagggcagggcctttgggtggctccgggtgtccagaggaaggggtgggctcggggacgcggagggaaactggggacgcggagggaaactgaggtcgcggaggacgcggccgttggcagctcgctgcgcctgccggccccgcgtgggccgccccactcgggaggacgcgggctccttttgtctgcagcgtccccgccgccgccgcccccgccgcctccccctctccctcccattttcgccgcggcccccgcccctcccctccccgccccctattgcccctcctccttcccctccccactcttctccttccctcccctcccctcccttcccctccggagcggctggggctgcggcgccgctgctgacacggatcggccgcggccgccaccgggcggaggctgcgcggcgcagacccagacgggcggccccggagggcgcgcggcgatggcggcggcgggcaggcggcgggcgcggcgggcgaggggtccgggctgagctgcgggccggcccggatggcgggcggcgcgggctggtcgggcgcccccgcggctctgctgcgctccgtgcgccgcctgcgcgaggtgttcgaggtgtgcggccgcgaccccgacggcttcctgcgcgtggagcgcgtcgcggcgctcggactgcgcttcggccagggcgaggaggtaagctggcccgaccccagtcccggcccggggaccccagcccagccccgccgcccctcccccagctcccccgccgggtcacccgcgtggcccgaggcggtggcctccctcccaatcccctccctccgccggagcccaggacctcggccccccccgggtatccctggcccagccgggccctcgctttccgccccccggcgcccgtgccccgagcgtcacgcgtcacgcctagggtggcttctgcgcccaccttccttcctcg

SEQ ID NO: 5142 - DNA, 918 bp, Homo sapiens
  source 1..918: mol_type = unassigned DNA
ccgccgcctccacagcgcgcctccaacaccgctgtctctgccccgcgccccagagcgctcccagctttctttcctacccttcccatgagtggagccgggcctggggcgccttaggcggtgacgatctgcagaagtctttgagaatgcaagatcttttggagccttcggtccgccagggccgggtccagtcaggacgccccgctcagaccccttcccagcctggggtgggcccaggcccgtctgcccccactgccttgtgttccaggagcccccgctcggagcccagacccggtgcccgaagatgagagtgccgcttctctccgtcgggtgagaagccagcccacgtcccgccggccaggcacggtgtctctcggggcgccccacgggaacccctgtgcctccatcggcgccctcggcggcggggcagtcttggcgctctcccctcgcccctggcccaggcccggctcgcgggtgtagctcttcctagggccccctcccctttccgggccgcgcgtccgccccgcatcgcggcggctcctcggcagtgtttgtttttattggacgcacagtgaccgtgacgggcacggggcgcgagctctcatcaccacaatgggtgtgcatggcgcggggcggggggcgctgccggcctcgagcgagggaggggagaggagggggtgcgcccgtgccctgcccgccccgagttcccgagtccgcgccccaccaccgcagcgagccgcccttctgggccgctcctctgttttcctttcccatccgttccctttgcctcggctgctcggagacatgtctggtggcgatcggggacccagagcccggcagccgctcctgtccctgtccctgcgatccctgtcccttccctttgtctccccgcgcagcgctctccgccgcggaaacttcgcg

SEQ ID NO: 5143 - DNA, 865 bp, Homo sapiens
  source 1..865: mol_type = unassigned DNA
acgtgcgcgcccgccggagaccagggatgaggtcactaaatgactgccccggccaacccccaccccgtctttatccgcaccgccccccccttaattgacctaactttctaaccctagctcttcgcttctggcaccggtcccctcccaagtctccagaccctaaccctggctcccgacccgccccgctacagcttgggaagcgggagaagcagcgcgcgcccttctgcggaccccctcccagggaagattgtggtgttagctgcctagggggaccagggggccaccgggacccagcgcaacctctgtctcgctccccaacccccggaagcgctaacagcacggttcttacgtaatgccgggcttctaagtacccccaacccgcacagcccccggggaggccgcgcagataccggggcccctcacagctcaccaccttggtgcctgaagccactttggagcccctaccgcaggggcggggaccagtgtcaatgggcagcggggcttggttctcccaaccagcaccccagaaagagggcccaggggcgggggcgggtggacagggagggaacgggcctgggtgaaaggggcctgtggagtttaaacccagtgaatagggtcctaagtgccgtgtcaggacgaaaagaaggcggaggtcttgggataggagctggcccgggggccgggggacgcctacctgcgccccgggaagcccctagctccgggcggctccagcgcagccgggcgctcagcgtttattgcttgtcaatcgctagcccggctcttaaagcggcaaggcctctccgcgagggggcggaggtccggaggagaggggaggtgaggagaacgcggaggccggcacaactcg

SEQ ID NO: 5144 - DNA, 408 bp, Homo sapiens
  source 1..408: mol_type = unassigned DNA
gcgctcggctgtcaggcaatccggtccccggttccccacggcggtctcctcggtgtgccccaccaagagcgacagggctggtgacccgaggggcgcgtgcgcggtcgtcagcctgggatttgcacggacccccttctccctagtacgctcgctcgggggcccctcctctgctacgccgctggggctcgcccgccacccacagccctcgcagagccctccgggcacaccgcggctggccgcccggggccaaggatggggcgggagcgcccacccacccccgcgccggccggggcatccaagaggcgcgctcgcagccacacggcgccccgcctcccgctccgaaaaagctcctgctcccctggcgcggtgtggcgtctccgtcagcccagccggattctccccgcttcg

SEQ ID NO: 5145 - DNA, 2245 bp, Homo sapiens
  source 1..2245: mol_type = unassigned DNA
acggccccggggtctggcggggaggcccaccgctgcccagagggctcggccggccgggagggggcgctgtgtcctccccacgccctgcccgcgggctcctagcagcgttcgccgcgctgcaacgcaatgcgcgcccggctttcccctgggcagcgttcagtgcccgcttgtcctgcagggcaccgccgtctccctttcatcctggggctcccaggtccaaagggttcccagatccagcctcttgcctgaaccaaagtggccaggcactcagtttgtaagatgaacaaatgaaggaaagaaggaacgaatgaataagggctcatcttgcagagcgttcgcgtctcagcgcgcaccaggcacatcagtgccaaaggtgctgggggtcgggcccagcgcccggcgcggctggaatgggggcggcgaggagctcctcctagccagccgcagggcgggaactgcccaaacgcaggtcgcagcctcactgggttccgcggcggctccgctcagtagggaccgccctgttccctagcccccaatagcctcgccctcataaattcacctgagcaccctggcccaagtcaccccagatccctgggacttcccaggccccgacctcggccgggcgggaggctgatcctttaccgcggcccccttcccccattcccggcttctccccgggctgcggcggccgccactgctgccagcgcgccccgaggactgccgcaaaccccgggcgcagggaaaggggatcctggcggcgggacacagagagcgggccgggggaaggggagggaacggaggaggcgaggaggagctgggagggagccgaggggcgaggcgcggaggagggaccgaaggggagcggaggggagagggagggggaggaaggggaggggacgagctgggcgagggggcggggagccgaggcgaggagcggcgcggaccgtgggggaggtggcgggggcgaggccggcaagaggcggccgcgggccgggctgcgtcgggaaacggcggccagacttccccgggaaggggcgagcgagagccgggccgggccgggccgggccgcggggccgggaagcgccgagccgggcatctcctcaccaggcagcgaccgaggagcccggccgcccaccccgtgccgcccgagcccgcagccgcccgccggtccctctgggatgtccgtaggacccgggcattcaggacggtagccgagcgagcccgaggatgggagggcacccgcagctccgtctcgtcaaggtaacagcccgccggccatccctcgagcgctggcgcccccggcccctggcggacgcgggacggggctgggctgtgggtgtgatgggggcgggggcgctgggagagccgtgcttaggtcggggaaggctgggctccggggcagcctaactctctggacctttggagccagggttgggtaggcagggggagactcaggtgagaaaagaaatcgtggcgaagccgccgggatgttggcggaggagggggtccgcccacccgggtagccggctccgcgccaagaatcgctctaggctctcgggcagacgcctaggggaggggaggttccacctcccacgcccttcctgcagacctcggccccgggactggagactctgaagcggggttcccacctcgccccagcgcccccaaacagctccccgactccgcacgcccccgccctagtcttgggagcgcgtcctgccccttcccctccgcggcgagctgcgagtccggagagatgaatgccgcccgcgcctgcgagcccttgatcaatatcgcagtctcgggggaggagacggtgcctctggcggcagttcctgttccccgaccgcggctgggagcgcgacgctcgttctccgagcctgggcacccgcgatccccgcgctgcgcggccgaccctgcgacgcggatcgggcgctggagtttaggaaagtagccagaccgcacgtccagcgtctgcccgctgaagttcgtgggcggtgggggcggcccgcgggttgtgtgagccagggaagggccgggaggccggcagtccggcccgccgctcgtgtcaggcgtcacttgcagccccaagcgctttccagagcgttttggttttgcagggtataggcgcgcccgctgcagccggccggagaggcgggtgggcctctgcgctgctgccgggacaccccgcttcgcgccagtctgggcatcgcctcacccggggctcgggactccgcagggtccg

SEQ ID NO: 5146 - DNA, 2972 bp, Homo sapiens
  source 1..2972: mol_type = unassigned DNA
gcgggccgcagccggagaggaacaggaaccgcagtggggacgccctggtccccgggcccacagcatccgggacggacgcgcagtagcgcgggccgggaactgggtaccagggcgggatgggtgagaggctctaagggacaaggcagggagaagcgcagcggggtgcggggaaccgcacgccctccctttgcctctgcttcccaccccgaggcggcagggcgggcgggcgcggttccgggggtgggcgggctgggcggggcggaggcggggccgcagcactggcttcacccagcctctcccgcccgcagccagagcgagccgagccgcggccagctccggcgggcagggggggcgctggagcgcagcgcagcgcagccccatcagtccgcaaagcggaccgagctggaagtcgagcgctgccgcgggaggcgggcgatgggggcaggtgccaccggccgcgccatggacgggccgcgcctgctgctgttgctgcttctgggggtgagtgttagccggagggggcccgctccctttcccgggatcagaactccgagaagagccgggcgccgccaccaaggaaacagaacagagcattggggtcccagatactgagggtgggtggtgggaaaggacctctgatgccgggaccacgaaggagggtctagggttcccggagcgcagaggcgactctccagggtggagatgagggcaagaccggagcacggatgccggtcctcaggtaccgcagggggcggtgggggagctgggaggggtctttcaagagggggcatggggctctccgatgcccaggttcttcggaagaggacactcgaatgccgggatcccgaagggactttcccctcagcatctcggtctctggagagtcgtgggacagaaccaaggcgagagaaggagggggaactggacggggactagagatgagaggggcgagctgggctggggcggggagcccgggacgacgggatggaacaatggaggaggtcggagggactggaggcagaggggacccggcaaggacaatggggaccggccagacaatgggggggaggggcgtcggagggagaggttggggagcgggagagaggttgagaagtgggttagggagggcagaagaggggcgacggcgagggcggcagagagatggaagcagaaggaaaggagacagagcggggcgcggaccctgaagtggtcggggtcccgcctgcccgctgagggacagtgagacgagaagagagagcagaggcttggacatttccagcgcctgtccccgcgctcctgctcgcggcctctcccagtcccggaattggggctgcggatctaaggctgggaggggagtgcccacttcgccggggcgaacccgctcccggggttcccccacggccggcgggctcctccgacgcgcgtgttctcacggcttgaagcagcgcagcggatcgcgagggacggagcgggtgtgcccctacccgggctggcggtggctacgtctcggggtgcagagcgccggggcgcactaggcggggacccttcctggccgcgcgcagctctggctacgcaggcgggaggcggcaggcagggggcgctgcggggcgaggcaagtgcagtccgccgctgcctgcctgcgagtctggggctgcgcgccgctccccacctagctgcgcgacccgagcgccgcgcccaccgcgctccgtgggctcccgcgcctcgaagggtcgggatccggtctgagcctctcctggctctcggtgcaagccgctgggcacctaacgagacgggggcgcccggacgcctcggattctgtagcgcggtatcccgggccaccgactcggcaaaggtcggcgggtcctccgggtggtccgacgagattgtcagatgtggcctgctttatggccatgaaccgaatgccctggaaggtctggcaacggaggaggcgtcttcactctccccgccagcatctttcatcagagcactgcgccccaaattccggctttacagatacggagactgaggctctgagagtttaaacgacttggccaagatctcacagcaagttgggccagagtcgtggctagactccccgacctgattcccagctcggtactcccccaccttttcagggggcagccgctgtcccagctcggggtcacggctgcgtttcccagcagggcggggggggttgacactgtccccagagtccgtcggcggtagagcctgcgggtgaggtgggcagagattctgtccgggtgcgggccccagcccgaaagctcagccccagttccctggagctgtcaggacctgtggctgcgtccggggatttgggagcgaccgcgggcacgtctgctgactaacgccgctggttagagacgctgctcagacgcgggtgggcgagcgtagaccaggagagcggggaggagggaccggatcccagaggggcaacgacttgggctccgggtctgggcaagagcgagggtccccgcgcgaagacccaaggaaggaggggagctgggcgtggaggacctgggcgcttgggaaggtgtaccccgacaggaacctgccgtctgcagcccctgcggctcccgcctccgcctcggcgcgcggctgctcggtctgggatggctgtgcgcggtccgagtttcttcctgggccgcggtgagagagagagggctgaaaccagagcgcgtcccggcgggtcggctggcgggccgcgccggtaatggaggcactttgtcattcagacgtctgtaaccagagccgccgggctggctaatgcgcctaatagggatggaacgagggcagcaaatgggcgtgcgtgagcggccgggctgagctgggtggatggtggatggggaggcagctccgcgggggacgggcccctaccgcactgttccagcccagtctggctcaagcgcctcgcttcttccctgggggaccgcgtggggaggcgggaataatcg

SEQ ID NO: 5147 - DNA, 1026 bp, Homo sapiens
  source 1..1026: mol_type = unassigned DNA
gcgggcgagtggagtgtcctttagactccgcggactcgacgggagggaccctgcaatgcttaattagaaccggttgccatggcgacagtctctaggcagcgtgggctgagctctccgtaggaataaagggtgggccgccgctggaccctgcgcgcgcccgccaccaactttccctccagatccgagaggggcggcgcgctccgcccccgggccgcgcacgtcggtgctcggcggcgcgcacgcctgcgggagccctctccaggcaacctagtgctgatcgctcgtgccggtgcggccgttaaccgcccttgccggagccctaggctcaaaagcagccccttacccttcctgggcttcccccaacccctttcccggtctgccctggggcatgagcagcgatggccggctgcatccctgaggagaaaacttaccggcgcttcctggagctattcctgggcgagtttcgcggaccgtgcggcggcggcgagccggagccggaacccgaacccgaacccgaacccgaacccgagtccgagcccgagcccgaacctgaactggtagaagctgaggcggccgaggcttcggtagaggaacccggggaggaggcggccacggtagccgcgacggaggagggggaccaggagcaagacccggagcccgaggaggaggcggcggttgagggtgaggaggaggaggagggcgcggcgacggcggcggcagccccggggcactcggccgtgccgccgccgccgccccagctgccgcctttgcccccgctcccgcgaccgctgtcagagcgcatcacccgcgaggaggtggagggcgaaagcctggacctgtgcctgcagcagctctacaaatagttaagtagctgggcttggctggtggtgggcccgcggtccccaccgcgccggcctcggacgcggctccctcggcccctcaaactgctctcttttctgctcctctcccccgcacccgcgcctgccgccgctgaaagcgcccccgctgctcggacccgggcggtcg

SEQ ID NO: 5148 - DNA, 10207 bp, Homo sapiens
  source 1..10207: mol_type = unassigned DNA
gcggaggcggcacagctggagcccggattgtggcacgccgtcaccgtgctgctccggggaatcccgacccgctccctgcgaaagcgtttccgaacgcgaacccagagcctgtgaacgcgccggcaagccccccactcccccaccgccgcccgtcgcaggtgggcccgtcctaggggtccttcctgcgctctaccccgtctctcaagtcactcagtcgatcgccccgttcacgctcccgtgatcccagacatccataaccacgatctcgcctccatgcacatccaacgcacgacggtgcacagacgtgcacctgacttctgcggaccaggtgtctcaagcgtacagcggccacccgcggaaccgcggcccggggccagtgagtcgtctgcagctccccgggttaggggattccccagaactccgggaaagtcacccgaagtccatccgggatgcggccttggttctcggccgcgtgatctcgcccttaggtgcagaacgacgcccttccagggcccacagctgccaggctgggccttgccctcgcatcccccgggaagaccagggacggggccacacaggccgtggctgcggagacgcttccccgggccaccccgcgaccaggagggagtcgagccgcccgctctccccgcgtcccccgccccatcccagccagttggccccaccctgcgcgggataattgggacgggagggaggcgacgggagggcggcggctccagagagactgcgcgcctgtcagcggcaatttgtttaagtggacgggacgggccgggccgctgcgggctggggtcaccgaggccgcggcccccaccccaaccagacctgggaccgcgggggagcccggtccggccgctaaaccgggctggctggcgccagggctccgggaggtgcggtccggcggggaagccgtgatgggaagcgactctgtccagggagtgtccttcaccaccacactcctcacgtccaggcagtgatcgacggcctggcggcaccctcacagcgggcccatagcacggggccacacacgtcccctgagcttagcctgggcacattcgtctgccaccgagggcttaagccagtctgcagcccgcgccccgtcactcggacgcaagtccgtcgtccgctctgccacgcggccgcacagcccgagcttcctgctgcccactgcccgcggggtcacgcaaccccggccctgcacacagaggaggaagcggcggggaccccctgccacctggaggctcaacccggggaaggtcccagcagtgccccttaaccctgcgagaggtgacggggccggaggacggaagggcagccacgccaggctcaggaccgcggccccacccggcccaggccgtccccgctcccgccccatttcactgttgcgggaagcgcggggcgcacagaccgcgcgccaccagcccaagcccgcccgacgccctggccggagaccgcctgcgagagggaggggcggccgagcgcgcgtcccccgcctgtctgcgggacctggccgatgcgaagtgacaggggccggagctttgttgtggagcctcggccgcctggcgccagccgcccccgcccgcgccctccccctccagccccgggcggcccgcgaggcgccccccggggcctcttaaaggaacacgcacactcggcccccggggctccgccaggggagggggttcctgggaagggggagggggccggcctaggtgggggaggggcccagcggaggcctcacggcgccgctccagggcctcccaggcctccccagcgccagctttcggtgagcctcgggcattcctagctggagagtttggctgggggtcgctacagactcttcagagcggctgcagcaggacctcagggtgatcgcgggaccgcggggcggggcgagtggtgggatcctggcccggacagagccccggaaagccagagggaaggtcggtgccactgtaggtggggtcgccgtccccagatgcagccgctgcactgtcgccgccaggtttctcggtcaaataacccaggcctgagtgtttcaaactcttcaggcctcggacccctggaccagctatggatggactaatgaaatggactaatgtctaaaacgcacacatttagatgtacacatactcttacaaggacaaaagtatgtgtctacacacacacacacacacacacacacacacacgcgcgcgcgcgcgcgcgcgactttgcgaatgtattcacggattcctaggccggtacctgggttcccggctaaggaaagctgccctggttattatctggtcacctcaccggctgcgcaaacgtgtccacaacgggtccctccccgagaggccacatctcgcctaaggtggagccagcaggtatttgcctgtggaaaactgcagtggatcctgccccgtctgcgtagactgcgcagctcggagtcaaagattcgttctggccagagaggaggtactaagagaggtgcgacctagccaagaacgaggtcgtggagaaaaccctgtgggggcggcgctcacatatgcggtgatgaggagttgtgagggccctggggtcggccccgaaaagtagggataacggtcgcagaggccatactgcttccgccggtcccgaatccgcactgccaggagagatccggccttcaaacgctgctcccaacgttcaacaacgaagtgccctgcgaccggtgtgcgcagtgggcgggcgcctgcatgggtcaatgttggatgtacgcgcccaccacgcggttgtacgggtgggaatgtcacccgtggctagtgcatgctctgtcttttccttcagaaaacgaccttcaggaatcagcctgagtgttcgcgcccgagcccgattggaagcaggtgcgtggtcgcttcactctccccgtgcacaccttgagttatagctctcgctgcgcacagagggcaccacacggggcccgacacacacacacacacacacacacacacacacacacacacacacaccatcacttcatgggggggaaactgaggctgccggaagacagaaaacgaagactgatcacagaagagggggcttcaatcacaggtgctcgcagacaccccaactccctcacgcgttactcagcactccttaacttaggagacgtgcgcttccgagagatgagaagaaactaaaaaagtggttggcagggcgaagagaggaagccggtatttcggaagaaggagactttcgtctccggtaccggatagggcgaaaattcgttgggtcgcgggtggagaatccggggtccgcccgcgcggtgccgccctgtgctcagcgaaaggtgcgctcaccttcctggccccgaggatccgctcctcccggccgctggaaagctcagggcggggcccgggcctgcggagaactccaggttccttccgagtcttccggtgaaggcgggcgcgggtagggggtccccgcgtttccccagcgcaaggccgcgtcccgctcccgcccgcgccggccccagcagggctcggccatggctccactcaccagctcccgccacctgggatccgctcccggacctcggccgcccgagcctcccgactcgcccgcccaccggcctcgctttccagtgcctgctgtctctttccggggcgcagggacccccaggcggcgccacgacccggagctgggtcggaggccaggctggggctcgggccagagcggccgggcctctgggcgcgggagaaggagggcgccccctctccgctcggggtcgtgtcaatgctttgcacttggggccggcgtgcggctgcgggtccttccccaaggccccgggacccgggctcccctcgcctcaggccctttcggcgggtcaggtcggccctccgcgctctccagtccggcgcaggcagccgcaggcgcgggcgggcggtgggggccggggcaggaggaggggtctcggggcccggcggcccgtcattggttaatattttattctgttgacatgttttcttactgctgaggcttccgacaccttctcccaggccccccctcccggccggagcttggcctgagctgtcaaaaccccgcccccggagacccacaattggtccaaaaagcgtaaaatcagcaatcaaggggggcctggctcgttagcgcaggggatccgagctgggcaggacatgtgagatagtcacagttttccagagatcacgacaagatctaaccagtcgcgcgtggtccccggcgccggagcgggccagctcagcccggcccagcccggccccgcgcagagcccccgccgcccccgcgcacagagccgggtgccccttgcggtgcgccggacgggaagccccgaggagcagctgctgcgcccgccacccgggtcgtccgtccaccgcgcgcgccgccgcccgggccgggggtccgagccgcgcgcccccggccccggccccggcccccgggcgcctgggccggatgtcccgatgagagagccggcgctggcggccagcgccatggcttaccacccgttccacgcgccacggcccgccgacttccccatgtccgcctttctggcggcggcgcagccctccttcttcccggcactcgcgctgccgcccggcgcgctggccaagccgctgcccgacccgggcctggcgggggcggcggccgcggcggcggcggcggcagcagcggccgaggcggggctgcacgtctcggcactgggcccgcacccgcccgccgcgcatctgcgctccctcaagagcctggagcccgaggacgaggtggaggacgaccccaaggtgacgctggaggccaaggagctgtgggaccagttccacaagctaggcacggagatggtcatcaccaagtccgggaggtagggctgccggccggctggaaggcgcgcgggcgggcgggcgggctggggcacgggactgcacggatcagagcagagctggggactcccggctcccggctcccggctccaggttctggccctgacgccacgcttcgctcccacggacaaccaagttgacttttctcgtttggcaccggagcgatttttttttaaaacaaaaacgctaaaatcctccgaatgaaataaaacgaaaacatactgctaaagaatagccccaaccgttctgagtcccagcgcagaggaggccccgcggcttggccctggcggtctcctccgccccgcgctctcgctcttctgcgtccgggtccgtctccgagctcgggggaaattcagcctctctcagactctgctccgaccccgaagcccctagtgggacctgggcccagctaaccccacgctggttgctcggttcctggcagcgagccccgggtcagccgagccctccgcctcaccgggctgggagccctttctccaccgcgggcatccgagccctggacgcatccgccgccccaggccttaaagcctgaagaaagccacagccccggcccctccacccttcgactcagccaccgagaatccaggcctcgggttcaccctcttcccccgaactgcacggccaggatgtcttatcaggctctgtagcccagttcccaatacaaacaccctccagatttatttctgggagcttccgtcccaagtgggtatttcccctgaacgaatttcggggagattaaggagaagcgagaatatttctagagggcctagacttctctcctgggcatcagctttcatctcagatcagggagaaagagggtccccagatctgagcacaaggcctaaaggaggctgtttaggagagggtctgacaggcagaaatgggatctcctgggagcaacaaccacaggtggggtcgtccgggcagtgatgagagggcagagcagccgaccacaggggaaacagccaggcggcagcggtgtgcgcaacgaggagggataaataaaggaggagtggggtcctggaacctagaacagccggttccaatgggatctcctcccttccctccctcccaggcggatgttcccccccttcaaggtgcgagtcagcggcctggacaagaaggccaagtatatcctgctgatggacattgtagccgctgacgattgccgctataagttccacaactcgcgctggatggtggcgggcaaggccgaccctgagatgcccaaacgcatgtacatccacccagacagcccagccacgggggagcagtggatggctaagcctgtggccttccacaagctgaagctgaccaacaacatctctgacaagcacggcttcgtgagtgttggggcagggtggggacggtgcaggagcttgttgacccagcactgcagctgagcaggagagcagggcggcaggatctcccagggggaagcgctgggcaaacccccagagtgcccctgcccgggtcactgccctgtggtctacgtgggctgggcctgggcctgggccccagcgctctcctttgcaagcctgggaaatggtggggtcagtggctggcagctcacaatctcagttcctcaggccgtggagggtcccttgtaccgtcaatagggaggcaggtgctgccaggactgggtctgcagtgctggaccacggaggtcaccctgctcttggcctgtaggtgccgagcttggaagacctgcccatgacctcaacttgtccatcacccttctgccaagacccgcgtccctggccctcccccaagactaggggatttaaaagttaaaccaccctccccacccacccccccagcctccctaagacctttccctcctcccacaggcagatgcccaactaggaggagagggtttgggggttctctccatttatgcctgagcaaggccccagcgaacgggggtggtgtttcatagggtaaaaggaactgcccattctgaggtagggcagttggtgagcccccgaaggttggaatctcctctttgtggggttagggggtttaccagtgccagaaaggaagagagtgttaagagtggaattgtagggctctgttttgttttattttgtttgggtttcttttgtggggaggggttgttttttggttggtttttttgttttgttttttgttttgttttgtttttgctctgtctcatttctgtttccaactgggaaattttttttaatggcaagagaaaaagaagctgtgaaaagagaaaagcgagaggaaaagtagaagaaaaagaaataagggtgagaaaagagcagagacaggagaaaatggggaagaggaagaaccgatagagagagagagagagagagagagagagagagagagagagaaagtggagaggaagaggtcaggtacccaaagaatagaaaagctcgggccggggctggtggctgccggctgacccccaccctccccgcagaccatcctaaactccatgcacaagtaccagccgcgcttccacatagtgcgagccaacgacatcctgaagctgccttacagcaccttccgcacctacgtgttcccggagaccgacttcatcgccgtcactgcctaccagaatgacaaggtgcgcgcggcgggcggtgggctaagcccctgcactgacgcccctcaacacgtgcaggcccaaccgtccgttcatcgcccctcgaagccccctgcacgggatccgcgctcttgcggcccgcccccgagcaccgagcctcgcatccatacgcgcagcactcacggaagtcctcaaggcgccctctcaatcccaccgcgcgcacacacaggctcccctggggcgagcgaacagctgggccgtcgttctgatggagatgtttacttaacaattagctgagactccgggcccgcgctgacatttttacattttattcgtttatttcttggctcaggaatgagaatgtaagtgaagagagggcgcccgaggcaatctgcccaggctctaccgatgctcagaacccggggcccagttttcactctctcggggggagccagagggtgggacaggtgacacagccccccaaagcactcctggctactgctctgggtcagtctaggccccagaccccttgggaggcgcttagagaattaccttccaatcaaagggctttttctgcttgcggcttctccacccttgttctagtggggcagagcatcacccctctaggcctgtgcccttgtgcgccactgtcgagtgaaagagagggtacgagtgtccgtgccggtcgttgtggctttgtgaaccaaggtgtacgctgggctgtgcgtgccccgtttggggtgtgttggatacctgtggaggcatgtgaattcgtttggttccgtaggcgtttgttatgtctgtgcacacttgcgtgtgtgcgagcccgtgagtgtgatttggctttgtgtgtacctgcagccttgcgtgtgaactgcagtctctgttcgcgcctgctcgggtgcggagtcgtttaacttgcgcaagcccgcgggcgggtgtgcatgcttgggctggttccgacactgtggcactgctttaggcctgtgtggggctgtctaggcctgtctagggataattcctcgaatgaagcttttggaggacagaccccgtcgctttccgcgaggccctcccaccggcctcagctcggggcgtcccatcccaggcgggtgggtaccaagtggacgctccccgggtcttccctctgcggccagcacccgctgacctcggggtgccaccgaccacgctggaagagccacggcctgacttagcgccgcccccttggtccccgcagatcacacagctgaagatcgacaacaacccgtttgccaagggcttccgggacaccgggaacggccggcgggagaaaaggtgagaggccgaggacagcagccctgtggcgggtgcccgcgggagcagcgagcaggagggatggagggatgggctccccgctgacctggttcatccgctcatccccaggaagcagctgacgctgccgtctctacgcttgtacgaggagcactgcaaacccgagcgcgatggcgcggagtcagacgcctcgtcgtgcgaccctccccccgcgcgggaaccacccacctccccgggcgcagcgcccagtccgctgcgcctgcaccgggcccgaggtgagggtcggaccggaggagggacagggaggtggcggcggggggtcctcaggtcgctgggctggtcttttgctgagccacccgctaacctgaaaggccaggaaggaaacgtcggcgagtgtctgggatggggtttccgtcccgggactcccctacgagggcggtccccggtagccagaagatccggccggactccgagcctggccccttgggcgccgtgtaattctatagctgtagggtttcctctccagggctgggttccttccactgtaaatctggggtcttggattaggtgacctgcagctgccctttgcccgactccagcagctcctccgactcggcctccccgagagcagcccttcccgagtgtccctgatcctgctcgtcggcctccgcccaggcccctgtaatccgcgcgccctctccccgcagctgaggagaagtcgtgcgccgcggacagcgacccggagcctgagcggttgagcgaggagcgtgcgggggcgccgctaggccgcagcccggctccagacagcgccagccccactcgcttgaccgaacccgagcgcgcccgggagcggcgtagtcccgagaggggcaaggagccggccgagagcggcggggacggcccgttcggcctgaggagcctggagaaggagcgcgccgaagctcggaggaaggacgaggggcgcaaggaggcggccgagggcaaggagcagggcctggcgccgctggtggtgcagacagacagtgcgtcccccctgggcgccggacacctgcccggcctggccttttccagccacttgcacgggcagcagttctttgggccgctgggagccggccagccgctcttcctgcaccctggacagttcaccatgggccctggcgccttctccgccatgggcatgggtcacctactggcctcggtggcaggcggcggcaacggcggaggtggcgggcctgggaccgccgcggggctggacgcaggcgggctgggtcccgcggccagcgcagcaagcaccgccgcgcccttcccgttccacctctcccagcacatgctggcatctcaggtaaggcctgtgaccccgcggcagcgccagcgagggagaaggcccagggagctggcggcgaggccagcg

SEQ ID NO: 5149 - DNA, 2392 bp, Homo sapiens
  source 1..2392: mol_type = unassigned DNA
ccggaccccctgcccttccggtgagccgcccctcctttgccgtcgggtttccctccctcccttttgcccagccaaaacccgaacccaggcgccaggggagaggaccgccgttctagcttgccccactgctgggggcacggagttcttgctcctccaaggctacggcccccgtctccgcggaccccgcccggactccccctggccaccgggacgccccgccccctcccctccgcagcaatctcttacactcgggctgtgaagttcggggtatttttaggccggcgataaataattcatagggaacgtggcatcaggctccccccgcgggaggagggggcgcgagcagcgagagccaccgtcacccgcggctcaaggacactcgcgatgcggcggcggcggcggcggcggcggctccgggcggggacccgcgccacgcctcctggcggccaagctgagcaccacgcacccggcgccccccgccccacgctgccccccgccggcgtccgcggctccggggcccccacccccactcccccaagctgggtcgtgaccccgagtcccgcagtggggggaccaagccagcctggcaggcggccccagtaccatcccaggcccgcccgggggccctgggcgaacccaggtgtcccggacctgcctacctgcccctggcacgctcttattcttcgggagtttagaaacaggctcaaagtcactagcaccgccaagacctggacgggctctgaaatacagccagcggaatggtaccctccccaaataagtgtctttcctcgattttcctgtggcccggggtcagggactgaactaagataacgccaccatccgagggctgggggaccgagccagaagtccccttggacgaccagggctgggaaaccgagtggacgaatggggtgggcatcagggcctggcgggaattcccgtcttgctcacccagcagctccttgcagggtcgcgggacgcacctgggggttcaggttgccgggtgcctttgctccgcgtgtccccgccctgcccgcgtaggcaggaaacaggagactcggggcttcccctccccgccgtcggggatcctgggcgaagcccccagagaccggcgcaggcggctggtgcgcagccagggcccagcgccaggtcttgctcgcccagtgccctctctgcctacccttccctttgcgctctggaagcccgggagccgggcacgggccagcatctgcaagatgccactactctggaagcccactccgattctcccaggtcgcaggaaggagagagctaggctggggcaaaggagatggggcagagctggaaggggaagaagcgggactcgcggcgggggaaggggtctgggcgccgaggcgagtgcgcagcaggtgcccagcagacctagggaaactggggcactgggctggggagccgcacagccccctttcaccttctcgactcctttccaacccctcgctctggtggatcccagccccggcccccactcccggccctgttccccgctctccgccccggcggcttccagcagcaacagtttgggtccgcggcagcccagactcccctggtcccgcggtgctgccgcgccaagcgaaggaggaggagggctcggcgaccctggggacgaacgtcttggacgcttcgcccgcgtccttctctcgcgtccgccgcgcgcctgtctgctcggcctcttcttcgccttctctccggccgcccgggtcaaaacccaaggccaggttcttgagggtccgggtcctccagccgccccctccttgagccccgagagtcctgcgtgggtccaaccccccgggtgtcccgcctctgtctccgccgtccttgctcgcgcgccgcgggaacccagccccaagttggcggcgaagttggtgcccctcgcccgccgctcgccacttaccgaggggaaggggcgctgcgcccgcgacgagagcccgcgccggccgcctccctcgcggtgtctgtcccagagcctcggccccggagggctggcgcgctcagtctcagctccgcgggcgccggagcccgggcgcggcggggcgggggcgggggcgggtggcgcggcctggtccgctggccccgacccgcccctgcgccccgcgaccctcccgaggctcgcacggcgcccggctccgtcccgggctgggctgcgcaccgcgcctcctgctcccagagctcgcagccgactgtgcgggagctctcaccgccgcccgcgagggcccgccccgccggggcccgccacctccgccccggcccggcccggcccgctgcccctcgaggcccctcccgccgcattcccgggcccctctcccctctccggaaccgcgtccccagacctgacactcggggcaagtgcgcctcg

SEQ ID NO: 5150 - DNA, 564 bp, Homo sapiens
  source 1..564: mol_type = unassigned DNA
ccgaccccctctcgtggtcgccagggtaggggtgggaggaatctggaagccacgtgcgatgctcggagctgcgtcctctgtcctggggcgtgggtccgcgagcgccgcgcagcctcccggaccgccctgagctgctgcgcccggcgctgctcctccttccccagctccgcgccttcccctcgcgatccccctcctgcctcttcggtcctggaagcgtcccaagatggggtgggggcatggagggagagaggggaggagggagctgcccgggggcagtgccgccaggaagtgggacggggactctggcgcccctccaggctgctgcgcgcgggctggggaccgtgcaccgctttgcgcgccagacgatgcatcttctggaacggcagctgaggcaatgcggggtgtgaagtggcggcgggcagaggggctcgcaggggctgggatccgcgtgcccctctctgcctcggtgcggagcacgatgtgcccgggcgggggcgaggacgtccgggaggggctgggctgcgcacgctcgcggggccgtcgcagatgggcggtttggaggcg

SEQ ID NO: 5151 - DNA, 3277 bp, Homo sapiens
  source 1..3277: mol_type = unassigned DNA
gcggctgtactgctgcggggtgcaagggcgggggaaaccacaccgttaggcgaggcgcggggaccgtgctggaaggcccgcggcgcggtcccctctgggcgactgcgggggcggcctggcagggagctggggcgagtggccgccgcggggcctcgcaggcgcggggaggcaccggccgggcacccgcgcggctgaggcgagggcgggggatgcctggccgggtagggaacggggtgggggagggcagaggggcgagcgagccggagggggaaccggagccgagggcgcgcgcggacctcgaggttctccaggcgggttttgagcgattgcaaagtttgcccgagttggctgagcgtctcggcggccggtgtccgggacaggtcgcccatggtgttcttgcccgagccgggctgcttgcggccgccgcccgcccgggcctcgccggctccggggtccagcgtgctctggctctcgcagcggcccagcttggcggtcagctcgcggatggtctccttctggctcaggatggtctccttctgctgcagcaccgtctcgcggagctgcagcacgctgctccggagctcctcggcgccgccggcggccacggacgcggcgcacatgtcggcgtccacgggcaccgaggtgcagatgaagcgcgtcggcccgaaatcctgggccccggcgcccaggaggcagagggcgagcagcgcacaggtgcgcgcggcgcggccggccggcatggctgcgggcaccgggcgctccgggcccggctcggctcggctggggctcggctccggctgggacccggctcgggctgtggctccgcgagcggcccgcgctctgggcgccgcgctcttcggccgcgcggtccacaccgccgcgctatcaggcccccactgccgcctgcgctgcggagcccgcgccttttatgccgccgcgggaggggcctcgagccgccgacgtcagcgggggaggaatcccgctttaattgtccgcggcccgggcccgcggcgcggcgggggtctcacgagcgcgccaccggggctgcctccgctcgcgtcccccccgcccttctgggagctgccgcggccccctcctcccccgcccccgcctgggccggcgctgctgccccgaaggctccgagagctcagggggaaggaagtcgggctccggccccggactcgaggatggaccacctgcgtggtgtccccgaacctccgacggggctccaggcgggcgggaaaccaccgcgtccgggagatagaattcggttcggccctcctggctgcactgaacacccttgggccggggtcgtttggagccgggctgggtgcccaaggacccaggtcgtcaacacccgagtgcccggtggtcaacggctcggagtggggcctcgcggcgccactaagtccagagcgggggtcaccgggccgccccgcgtttcttagatgtccgtgtgctattgagaagccgccgggcagcctgggtacagggacttcccacgggtcggggcccccggcgcctcccctcccccagctcccgggctctgtggacccggccccgtccccgggggactgtcagtccccaccccgtgcgggcggggcgctggggacttctcggaggcagacctagctgatcgagcctttcctgtccgcggcgccggcccgatcgcgggcaggcggcgtcgccggggctggacgttcgcagcggcgcttcggaagggggccccgcgggagcagccgcccgcgtctccagcagcttccccttgccaggcgccgcgcgcgcccggtatccccgggtgtccacctgtgcgtggggggctgtttcccgtctgtccagccgcgcccacttctcaggcccaaaggccagcaggaagggtcccggaggtggctgggggcgtccacctgagaagctccgctctcgctcagacaccccacccggcacccgcgcactcgcgccttcatctggaccgcggggctcggctcccgagatcgcggtccgggttccggcgccgggctgggggctcaggaccagggctggcgcagccgccccgccccgccccgccccggggctatcagagcggtcaaagcctcggaaatccctccgtccacgctcccgtggtacagagaaggaaactgaggctccgagactgcggggccgggctacagccgtggccccccgacccctccccgccgcccccggcttctctggtctctgcgttctgcagcctttccctgcgcgcagccgggggctgggggtccccagccagcagggacccacgggcagtcccgggtgccgggatcgggcgtccgcccctcgggcgggagcagaggccggctcgatggagacctttttgagaaatggcggcctctacccgccccccagcccccgagcgcccgccgtctgcgttcagcatctcagcttttaagcctccctgagccggggctgcgttctcgttgtctccttcggccgccgcttcctggcgccagagggaccccgcggcccgcacgggcctgtcctcggctccgctcggagggtgtgcgggttcccgctccgctggccccgcttgcccaccacggcgcgcccaaacccacgcggcccgcggccccttgcgtgctctgccgaccccgggccgcaggaggggttagcctcgccggtccccacgcggggtctgcgccggcagcgccacgggctggaacgcgcctcgggagaaattacccgcgcggggtcgcggcgtcttctgccccaactcccgtagggagccgctaggcgggtgccctcctggccccagcgctttggcctcgccgccctcccgcacgcgtccagtggggaggccgcgcccgtcaggcctggagccggaccgtgcccagccgagagcgcgcgggcgcgggagaggagccctgccctgcccagggcaggctgtttagacggggcgggaacccttagcctggccccgcgtctctatccccagcagccgtggagccttcctagccgcccaaggccagggaccctgcctggcttttcctccagggcagcagatctcagcggcctggcacctcggcacagaggagcgtgtcccccttccgcagaggaagggagtggacggcgtcagaaagggaggggagcctggggcggtgtctggggctagcgggacctctgggcactgtggggccccaggagaggagaccctcgggtccagcctgcaactgttgtgcaggaggcgctgggcgggacacctgcaggcgctgcacacacacgcgagggccaccatgccgcg

SEQ ID NO: 5152 - DNA, 5692 bp, Homo sapiens
  source 1..5692: mol_type = unassigned DNA
gcgcgtccccgcagcccgccggccacgcaccgcacgcacgcgtcctccccgcgcggggtggcggccggcgggagccacgtggagcagccgcggtgcctccggccacgcctggctcccgatgccgcgaagggggtcttggggcaggccccgctccccgaagctgtcgctgcggctcctgccagccgggagacgacgaggggaaggggtgggccgcgctgggccttccgtccatccgtccttccccagctctgcgggggctaaatccgtcttcaacaaacctcgcgaaaaagccgagggggggacgcgccgttgctggagaataggtcagaagtgacagcagaatgggccgctgagacccccgtccccgccccggtcctccgtcggcctggcgggcggcgacgtggggaggggccgctcagaagccggggtcgcccgggccggggaacttcctcgcgccgacgcccactccccacgggccgcactcgccgaggggccgaaaggggctccagtggaggacgcggtgggagctgggtcccgctctagctgccgacgccggcggtgcccgggtctccgggagcgcagtttttggcacaaagtagcgccgaagaccctgccgggtgtcccgccgcggctgccgctgtgcccgcgcagggccggctcgtgaatgcgtgcgggggctttcgagggcgcttcctctaccctgcgcgcccgggggagctgtccggtcgccgccggcaggcagaggcttcgggccccatgggtgcccccgagaccccggatcgtgcgctgagaatgtcgacgtttcaaacgagccagcagagcgggccggagccttggtcgggaaccggcgccgcgtgcgcactggccggcgaggcctctggcccgccggggaaggagcccagagcgcctgtctccccggtagaaaccaacacacacaaataattatccgtatttcccacactgggggattgggagtaaggagcaaggataggggaggggacaggatccaacccgctggttttttactttaaaaattatatattttatgtcacgatcgcttttcgttaagaccacaaacatccaatttggcttggcgtaataaaatcagccggagctcccttaaacggagccattccggtgaattaagttgtgaaatctaatctattatatccataaaggagaatgctttcattgtaaattcaggttacaaagaaactatacctgggccgccggcctccctttcggatttactacttgaaggcttatcaaattacttcaaaatgctgggctaccccctccatatctcatggcaacaaaaattaaacgtggcaacatttcttttaatagtaggaaaggtcaaaaacaaccgccacaacaaggggatataatttttaaaagacatccttccccaccccgggatgtcttctccgcgtttggaagcgcccttcctattttcccaattaattcgagtttttaaaatatctaaacgcgccacgacttccttcaggttctcccccgctccacgaggcgtctgaggcgcagctcccggatggatcgcacgtggggccgcagaccctgggcgcccggacgtcagccggaggcgcggggatctcgtggctccgctgcgaacctgcgccccaccgcggcccgcacacctgggccgagccggggccgcctcgggagcccctcgctggctcctgggcgccccactcggctcagcaatgtccgggccagacaaaggagtcgccagggaggggttaatccgcccctcacccttctccgtccttccttccgcccccttctcaggcggcgcggaggagagaagatgcggcccctaataatgtgtttggtttaacctgcggggtgtgggtatttgctgcgctttcttgggtgagggttgggccccttcccttccaccttcctccactcctgtgcatgataccctggctggggcctggggcgtcctgcgctggccagaagtcagggtcaccagggactctccgttctcgctcccgaagaggggacttgcgcggacggcgaggaggatcgatgcgttcctgagttcccagggaaacgaggccgcggctgttgtcacgtcgcgaggaagatttatgaggcgcgggccgagcatggcccggcccggcggaggccgcccgcgcacccaggctaatctttgatttccatctgattattttttttttcctgccatctccaagtcggcgtccggaaaggcgaacaaagggaggaggatgggggatgggggcgccaagcggtggcgagggctcggtccggcaaccttcctcctcagtgggggcccttgggcgccccaggctcgcgcccaatgcggggcccaggagggcgcagtttgaaaggtgaccgggctggggctgtcggagacccgctctgcggggtggcccttctagccgctaggcccacgacaggacttctagggaggggtccctgcaaatgcccttgggcgaagagaggacggaaagaatattctcccttaaattgcaattaagggtgtgcggggcgggggtgcttggggggtgctgcggcaggccgggttcgctcaaccggaggcagcagctcagccctgggccgataaggccgagggaaacgggatttctttgcttcccgcacggaaaagatccatccaagcgggtaagagggaagcgaagcttgcattttttatgttgaaaaaaaaattcaaaatggaaaatcattttattggtcaccacccataagtaaactaaaaacagggataattagagtgtggggatttggagggaccataaatctgcggcgccttttccactggaatcaggagcctttatggcttgttgttttattttgagagaaatgagatccctggctttggtgcaggcgggtgtgcgctccgagcgtctttcggcgggggggaggggggagcaggaggggcgaggagacttgcgcagtcagggagccgcgaaccccgagtctcggtcctcgaaggcggcaggagaaaccgcgcgctgtgccccgacctctctcgccctggccaaccgcgacttgggacgagctggaggagcttcccccgggctccggacgcccgcgccgaaaaccgggccatgggtaccaaacccgactctaggcggtcattcactttgtccccacccaaactctgatgagctatttgggagtgcgcggggactgggaagtgagggacttttataacattcttctttcgactccggcttccgagcccaccacccatcttgcctccttcgcctccgccctttgttctaaactggggaggggggaggggggagagaaaaggacacaaaatcaccgcccccccgtcaaatccttaaatttccaatcttccgcaaaatggcctggaatccatttcactccataggggttctatcccccaccgggtggaggccagctttccaatctcccacacaagcaggatcctttcccacttctgaaagtcttcaaacccagtcaccccaaatgcaaacatcgtgtgaaaccccattaatcaggtaagaaagtagggagagctctgactcagctgcctctaattttgggaggagaaagagaaagtgagtttctctttcatcaagtaccccaaaataacagcgctccttcccttcagcccgctccaaccgcagccttgcctttgttgaaagacccctgtccttcctaggaaggggggcggggaggacaggctcacattccgaagagttctgtccccaaaactgttcgaagattcttttgtttgacgtgcacatgggggaggggaaggagcccgctcaggccacccggcctcctcggaccccgctcaggccacccggcctcctcggaccccgctcaggccacccggcctcctcggaccccgcccaggccacccggcctcctcggaccccgcagaatacccccaaagcccatgggcgtctcctaaccgtgtaagtccggggctccgggggctaggaggggctgctccaagacaagggaagctgcccgccagattggggccaatatcgggctttcccaacccaagcttcctccgaaaacaaccccctcaaaactgagcatccctactagaaaaaatccgcattttccaggaggacggggtgggagagcttcggggaacaaagcccggtcctcccagctctgaggccgaggcagggcgcacctcctcctgggcgaattcaatcggagctgcagaagagacaagcatttccaaactggcacccgctccgagcccaaggtgagggtggagaagggtccctggtggaagctgcaggaacactttgggccggggtctaccccgcgttcggcggctccccgaatcccgcagaaagacacgtttgcagcgaaaggctcttacacaccagccgggattttattcgttccctaccgagagtgcgctctgggagcgcgggaaacaaggaaaacgcacgtacctggcggcgctccgagggcggcctcgcgggccctccgctggcgaaggcccccagaagccactccccgcccggctgctcgccccacggccagtccctccctccccggcgacgcaccccgccgagccagctcacaggaagcgccaggagccggagacctggctcgcctttccgggcgctgcgtccgtcttcgaccgccagggcccgcgtcctctccccggccacggcccaccagagggaccccgcggcgggtcctggctcgggcgcgtccttctgcgtccgagttcccaggttcccggccgagctgcggagacggacgcggagccctcggggaagacgaggcggcggcggccgccgtccgggcaggagccccggggcgggaggggtgcagggcggaggagcgggcgggatcccagcgccccgcgccccgcggccgccgccctccggggcgcccagccccacccacgtggaaccgccccgcccccgccgccccgcccccacgagggaaggcacccgagcctcgccgcacacccgcgcctcccggtcccgggcccgaaacaccgcgcccctcccccagcgccgtgctccccgcctctccagcgcgcggctcccgcccgacccgcgcgcccgcccgacccgcccccaaccccgcccaatcaccgccctccgcggctgctccctttgtctgagcccccggcgcaggccaatggaatcacgcggaggcgcgggcggcttggccaatggaaggcccagggggcgtggctggcgggaggggctgcgggcggccgggttctatgcgctgagacccgagactgcgtcgccggcgggtgcgcccaggtcgcccagctagagccggcaggatcccgccgccgggttgtgggtttttgactctccctccgctgtcgggagaagcgcctgagtggggagggaggtgggaggaggtggccccgcgtcgggggtgcggggagcgggacggcggcttggatggacacggtcagccccgggccggagagggttcggctcagagcagcctgggttctgttcagagccctactgtgcacgtttccgcgaggatctgcggagagacgtgcaggcgacgcaggccccgggaaggaaggagggtacctgggctcggacgagcgataacgctgtgttctgtgactccgtacaaacggatcctggagtccagggaaagcgtcccaggcccccagcccgggcagggttcgtgggattggcgtccg

SEQ ID NO: 5153 - DNA, 7937 bp, Homo sapiens
  source 1..7937: mol_type = unassigned DNA
gcgccgtctgcgaggggcgccctgcgtggacccggggcctcggggcgcgtccacttacccgagccaggagagactgggccccacggtgttagccccgcgctcgggctcgcgcgccgcttccagctcgcgcctcctccatccccggagggctccgcgggtccccggcgacgggtccctgcccagggtccgggaaccttcccctcccctcctttctcaagcgccatttctccggagccgggccggccgtcctcggtgtacgcgggaagcgggcagcctccgcctgcacccgcggggccgggacccggaggcacccgcttccccgacacactcgctggggccgctgctcgctgctccagcctcccgaggccacggcaagagcccgggggtcggcgccacacacccccagccggcgaccgcgcccagggacctaattcaatcgcccccagcctaatgaatagccgcgcgctaatcggatctccgcgcgcttcggggatttacgcttcccggctctccccctcgtgccccgcggcccgccagacgtcgcttccgaaggcgccggcctggggcctggccaggggctcggccgcggggggtcccggccgccggagccgggagacgccggagacgggagccgggcccgcgcgaccgccactcccgagccagccggggtgggccccgcgccttgtcctgcgtccccggcccggcccgcggagcgccggtgcttacctgcgagccccgggctctccggagctcccctccgggccgagccgcccgaagcgggcgccggcgtaggccccgactcaggcaggcgggaaatcccggagtccccgcccgcggcccgcagccccccaccccaggtcggcgtggcctgcgggggggaaggccggccggggccggccgcccgcttcccctttctctccagattcctttgatccgcgggctctccgccgcacctcggctcccgggctgccccggtcggcccgcggggatcctggaaacggtccccagcttatctcctttcatcaagcggccttgggccgccttgaaaccgcggagccagtaattgcttttttcaggaggcccagtgcggactggacaacagccaatcagcgccttgtttacactcggtgatggacagtccactggcggagtgccaaccaatcccagcggtcccgcgggagcgggagtgggggcggggaaacagagagacaacaggctttgagtttaactctttcgtgtccctgccggaatgagacggtggagaatttcgaatgcgtgtgaatctgtcagttggctcctagtttaaatatccttttttcccccagagggggaggcagagattcacatggagaaagaggagcaaaaataaatgtatccatcgccactaagacatcacctcgactccctgagaataaatagcatttgggtgggaaaccaaattctaacagaaatatttgtttgcggaatattttagaagtggtttgcatctgattacgataaaaattgttcagtggcttgctttagttggagtgaggatttagcagataggcagacagggagcagcattgagaaatactatacatggtttaccacaccatacccgcttcccccattaccaaactgaaaatattttctaaatctaggtgtagatgaagaaagggcaatccttgtcttctcaataaatccctgattttcattttagtagctgctctgttgcaaagtgtggcagagggagataaaattgagagccagtaatgtagacggctggagactcagaactcacttcccagggtctgatccccaggtcatggggaggagagagccggacgggctattcaaagcttttgctgcccaagcagcgggcgtgcgtgcgtgcatccgcgagctcgggtccgggcaggcagcagcttcagagcggtagatgggccaggcaacctggggaggcctctgggcttggaggtctggcctacctgccacctgccagacagattccagggagaaaaagcagctacttttaaggggtggtggtgtttcttcccttggccttctgtgcggcagaagccaaacgttagacctgctggattaaacatatatgtgtgtgtgtgtgtctgtgtctgtgtctacgcctccccctccgccgggacacgcgcactcgctcgctccagctccctctcccgccctgcgccaccacattcccattcagcagcaatgatctgcgcagaggagctgcgcagtcgccgggcttgaattaggcgccatcgggcttggtagtagccccgctgcttcctgattggcagttccctggcccggcgccagcctattgggaggcctgtttacgccgaatgagtggcacgagctcccggccgtggagggctgcgcggccaatcagcgcgctggctgttccgggctgagtggcacgagcttattagtatgcagggcccgtggctcgccgcgccaggctgcaggtttgagagccgctctggatgggctcgctagagtcgttgttgtggaagcggtgcatttacagtgcaacagtcagcacattgaaaataccaataggaatacaaaacaaagtcacatttactgatttaattgtattgcattcagttgtatccaggaaacagcctccagtaagtaactgaaattgctttcattttttttttgtttttgtatttttattattattttattttttattctggctttggggttttacattttttttagcaaaagaaattcaggattgtgatgttaagaagtatatatcttcccttttaacaaaatccgttaaaatgttgaggcttttttttttcttaaaaaatatggactatgagcgatttttttttctctgaaaaatcttatcgatcggtttaaaattacccccgtaatgcatccttgctttgctctgagcgcttgttgtctcgatcgacacccagcattaaaaacaaatactcgaagacaggacagggaccgccaggctgcgtctggcgcgagccgcgcgggtggcaccgggcggacagtaggcgaagtccgggcgccgccagcgtgcgcccagttctgggtgacccacgaacgaaccccaacattcgctcccctaccctgctcccctccccggaacagtcctgggttggccctgcccggtcggtccgcggcgaggggaactggccgggtcgtggtacccacggccgctgccctgaggggccttccgggccgaagctaggggccggggaggggaatggtcatggcgagtttttcgggtcttcgttcccaattcagaattttttttttccggagaagtgggggtggaggagggggaccgagcaaggccggcgcagcggggcgttttcaccgcgcgcgttcgggacggcgcgcggggctcgggtcacggcccgtgtggcggggtccgcgggctggttttcttcgggcgcgggggtcaggcgcgaccccagttctcatgactctcccagggagcgggtgcggctgtttcgcagggagcgggttctgcggcgacggccgagccactcgcgccccaaggcgcgcctggtcccagcccggcctgcaggccccaccgcgcccgcgctcccggagacgacgccggagggaggcagacgggccagagtcctggtctccggcaggcgggcgaggagagagcgggtttttagatgcaaaagcaggaaacaaagcaaacttgtagaagctccagatcctggagcgcgccagccacgcctggggccgcggcaagagggaccggcggctccagggtcacgccctgccttcccgggagggagccctgtgctcctaggttcagttccttccgaaatgccctcgtcagcgattctccgcccgcccggggccctctgcccgccgccacttttcgctccatttcctcccttacctcagcccgacctggcgctgcggcgccgtcctcgcggtcctccggcgcggcctctcctggagctgggctgggagtgggccccgggcctcggcactcggcgggtggcggcgtcgccgctgcgggactgtgggactcccagctcgggccgtgtggccgcccttcctcgccccacttcctggccgcctcaggctccccaggcccccgaagcccggcgcgggcagacgcggaggcgcggcgcggcctctccccgggaggagagaacacaaagaaaagctctctccaatccggtcagagccgtggcggcgcaggcaggcgacagtaatccacctcctgtttgcttaaaaagtcgagcaggctggtgagaaaggaacaatcgggcctgcgatccgcccgcagggggtgggagattaaaattgttgcttcgtagccgagcccgcgtcccgagaatcgccggcagctcgcgctttctcaactttgaaatttcttattggagagaaaaaaaaaaaaaaaaacaaccacaaaacaaaagcacagcacacacgactccctggaggccgccaggaagcctggcacccccgcgtgcgcagcccccggcccctctccggccttcggcgcctttgaagctgcaggtttctgacctccctccctttccttctttccctttgtcccgcccggcgccctccggggctcgggaggcgccggccggggctgggggcccccacgtccctagtccagcccgggcagcccctcccctgacccctgcgctcgcagccccctcgccagagcactctccgggccctggcggccgggcgctcgctttgcaggccgggatcggggcttgggagccgagctatttgttagacccggggagagagctggcgatccccagagggaagggagccccaaacgcctttgtatgtagttgccagacaaagagaactctttgtgtagacccatttatttacaatgcaaaagctctccgaataaatattaaaaaagcttatcagctgagcaaatatgtattcacttaatacattatgttttcggttatagattaaatcaaacacaaaatagtctgcaaataagacgttttagaacccggaccataaaatatcgcaatttaaaaaggtattcagtagatggaaaacatcttaatcgctttgttgtcatggtggaatggctacaaaaacacaaggttttccgcaaagttcctaattaggaatatcaagcctatccatctcccttttgttggaggtgataaacattaaaacaatacgtatttagaagatgaggagtaatatgtgaagtgcgtccagggagcgccttcggagggacgcctgggagcacggtggtgcacgcagcttctatcactggctccgaccctccgcacccagagtctaaaattgtccccaatttcgcctgagtggatgctccgcgttgggtgggggtggaagaaaatggaggtgagggttattttaggtggccgaggtccgggcagggtctgctggcagaaggttgtgctgggccgggcccaccttccccggctagagggccgagctgggcgccgcagaccccgcgtacccaggccgcccggtactgcccggagcggagaccggcctctgctcgcggtccccggcaggcgctgaaggaagaaatcccagggccgatttgggccgttgagagagagcattctgactctgaaagcaccccccccacacacacccccaagcccccaatccgcagaggaagatcctgggcgaatttgattggggggcggggtgattgttacagcctcaacaggaagctcccggctccgggacagcaggccgggcactgcggcgtggcggcccaggtgatgccggtggcggttgcgggcctccggggctctgaggagccggcctggggtcctagcgcgatgctggggacaggagctggtcccgctggggctggggaggggggaccacggtggattcagaagaatgggccgaaagatgcatgagggggatgggagtggggagaaaaggaaggttattaaaaaaaaaaaaaactcttgagttacaatcaataaaattactcgcttaattagcatggttattcggttaagcggaatgcagtaaaagctggacctcggcatgaggtggggagagggggagagctagtgtggaccccaggccttttcctccgagacacctttgggcagcgggggaggggagagggtgtgcgtgtgagtgtgtgtgtgtgtgtgtgtgtgtgcgagtgtgcgtgatggcttcgcagatttgggtttttatcacccagcagagccagcagcctcttcgccgcggcgccctagctgcagggacccgcggggacgagaacgggaggcggcgagcagtgcggctgggttcccccggctgccccgggccaagcgtggccgggacggtgcgtgcgcgcgcggggccccgggtgctgggctgcgcgcgcgtgcggcggggagacaccgagcgccccggccccgccacccggcctggccgccgctcgctcgggccggcgggggtggggggtggggggagtgggtgagcgggcggggcggggacccccgggcgagccgagccccccagtcacccgtgtctcctctgcttttgcctccacagaccatggacccgcacagcggccgctggctcggtgcgcggccgcccgccgagaagcccagtcctcccgcgtgctgaccggccccgccgccaccaccgcctgtgaccccggacgccgccgcctctgcgccgcccgcgcgccgagccgcccccgggccccggccgcgctgctccgaggaagcggcggcggaccggggccggggcccggcatggatggccgcgactttgcgccgccgccgcatctgctgtcggagcgcgggagcctgggccaccgcagcgccgctgccgccgcgcgtctcgccccggctgggcccgccgcgcagccccccgcacacttccagccgggaaagtacttcccgtcgccgttgcccatggcttcgcacacaggtcagtgctcggccggggcgggcgcgggacgggagcgttcgagagcggaacagggcgcccacccctccgctcccgggagcagagaagctttggtttcatttcccggccccggccgcggtggctgcctgggcgctgagcggggccgcgcgtcccgccagccccccaagctgcgtcgccgcggcttagagaggcccttccctggccaccctcccccgggggtctcggaggggcagccccggagccggctgaaattaaagcctttccgcgcctcgccaccctcccccgccccctcctgcagatctaaattccacggaaacctcttttctgcattctgcattcacctccctaagacgttccggggctgggacaacgaggcgctttctgcggaaacaaaacggctgttgtggcggggggaggggaccagggtacgccgcggcctcgcggattagagtggtgtgtgcgccgggcgagcgttaatagggactgctggtgtaagacgagcaaatcctgtttctatataaagccttaaagtgtcagggcgagaatgggtttgcagggatgcatttgccttaacgagtgcctctggtatcccgctaaagccggacaaagcgtggccagagtgcggcccagcctctcagcctgcggcccggggaggagggcagcgcgggcgcgggctgggggtggcgcggggcggcgctcaggatttcggtgcaggcgagagtgcggcggatttgctccaagaggagagcgaggcggatttgctccaagaggagagcgtggggcgccgtgctgggcctcgcagggacggatcctctcgggcggtcccctctgactccctgcccgagaggatcagtccttggcagagcgggcccaggcctccagggcagccctcttcccggtggctttgatatgagtgtcgagggaggtcagggtaggggcagctaccacgcctgaagccctagaggtcaccaggcggcgcgggtagattcgggggaagcgcgcagggctgcgctagggacccgccg

SEQ ID NO: 5154 - DNA, 1408 bp, Homo sapiens
  source 1..1408: mol_type = unassigned DNA
ccgaggtctcccgacgtggacacctaacgcccttggaaagggagtgaattggtaggatatcatcgctccggttagttccgcgggagctgcccttcagaaaaaaaactttccagagccaaaagttactttccaagcgccttggggcttcccgggcgcctccctcggacggcaaccctagaagtcaaagcgattgcatcgccaggtctgtggcggctggaagcggggtgaccgcggtcagatggcatttcgcacccacgcagggctgtgttatcctagcacagaaccagcaactctcacacgaagccttgtgtaaacaccacgcgggcccattcctgaacgactctttgatgcctccgctgcggttacttatctcatacataaatcaggattccgctgacaaatctccgtgtttccactaaacagaaggctgccctgcagtccttctcgtgcttctttctaaagtacgataacatctgacacttccataaaccggcctgcagaggacaccgcgcagggggcgactaaccagctgaggtgtgtcaccccaaaacaccagtgggcacaccccaaggcgggcacgtggaagggacgcggaaccgagggcaactattttccagtcggtgaatctgatggagaaagatgccaaatgcacttcccgagccagctgaactcctcgggcacctaatcattgccagatgtggcgagggcgcacggagaacatccccagtcccggagaaaacacccggccgccagcgcggggaccgctcgggccgggaaacggctagaggcgggaggagagaggactgggcgagcgtggggagcgctgcggcgtggaaaagcgaccgggagggatggcgatgcctccactctcctcggcaggttttttcaattaaaaagttggaaacgggaatccgtaaacaacgacttagggcttcaaactacttgcaaagacgcgatggggaggggaatacttgcgcgcttcaaaaccccaacctcgaggtctccagccgcgcctgacccgggagccgggtgcgcccccagtgtccgcgcacgaacccggcgccctggcagccccgactccccgggcccgcagcccaagggaaggttcgcgcgggaggcacctccgtggcctcccgcgcgccccgaagcccgttccccccgcccagagccccgcggagctgccgccgccctacctttcatggtgaccgtggggacgcaccgccggccggggagctccgcgcgagcgccgcgcagccgaggaagtcgtcccgagcggctgctcaccgcacgcccatggtagccgcgccgcgcgccggccgtctgcgcccccgtcctccctcgccgccgccggcccgcgctccccgcgctcccggctccgcgctctgctgcctcggggctgccgcgcgcg

SEQ ID NO: 5155 - DNA, 208 bp, Homo sapiens
  source 1..208: mol_type = unassigned DNA
gcgggcgtgggggggaaggggaagaagtccggcgagattagaggggaaatccgaaaaagcaagcccctgcggcagcagccaggaaacactcgccaggaactggctgcgaccccaactccagcggtccgaagccctagcctccccacccccaccgcggcagagccgccttcgcagacacctcccgaggagaatcgcggccccgagggcg

SEQ ID NO: 5156 - DNA, 805 bp, Homo sapiens
  source 1..805: mol_type = unassigned DNA
tcgccccctgtcccccgcacctccccgggggaggggccggcccgcgctcgcccccagcccgaggggcaacttaaaacatggcgccccgggcgggggatttgtgcaaattggcggagaagggacgcggggaccgagtcgccccttcggccagggatcccagggaggcccccaggccggaggccggggctcaggctctgcgcgccggcccagccactactgcgccgcggcgggcggagcgggcggggggcgcggcgcgcaggctcggcccggtgggggtcccggcgagcgggagggcggttggggaccccggccgcgccgggcgcggggctcgggattcgggagaccgcgcggcgccgaagccacgcgtcagccccactgtcccgcgcgcctcgccccaggcctcgggctcttcctccgcacctcgtaaagccgagaccccctcgcagtcccccactccgagaggcggaaaagttacctgggatcagcagggagcccgggcgcgccgcggcgtggggactaggctcgggcgcgcgtcctcggcggcggtgcgcaggagactcgggcgtggggaggaagccgcagcccagggctgctcgccgctgttccccccgccccctgttgcaggagacaccgaggctccgcggagctgcggcgggggcccacgcccagagaccgtgcgaggaaagccaacctcgtcctgcctgccctcccagccgcgggggagggggccaccgcagtacttcaggacagttacatgggcacagcctcctccgtcctggcgcagggtcaggctccgcggacgacg

SEQ ID NO: 5157 - DNA, 2462 bp, Homo sapiens
  source 1..2462: mol_type = unassigned DNA
tcgcggcccagtcttaatccatcgcacttcagagggaattacgagggagttgcggactggcgggggcgggggtctgtaactaacaccaggtgcctgtgagagagccccaagggcgggggcagcacctcctggctgggttgggtccgcctggcctcgcctcgcctccgggatccttggcgctcagcgccgccctcccgctactgcgctacccgccagagcccggcgtcttccctttccttgtcttgtggacgccgcccttcgctcccgggaggatttcgcctccagcacctcaggcttttctggcgcaaaggtcgccagcccgagcgagcccaggcggcggcttcacttctgcagagggaaagcgaaagacgcggccggcgggccgagggggcggccgaacgcgccgcgtggttgctgctcccgaatccgcagcggcggcgccagggcggtcaccgagccctgcggaccccggctcaacttccagcgccactcgggtgccccgagcccgccgcagctcccggcgcgccctccagccgcggcacgcagcccctgacgcgcccggggcgccctcccgcagcaccagccaggccaccccacctcccgcgccgcgcttccccgccagccgccggccaggagctccccggcttctgagcaggacgcgccaaagggagttgggaggctcagcagcccccagcgtcgccttctcgggtgacgtgacgctctctctggagcgcgggcccgcctccgccaagcctccaccgcaggtccttacagccgagccacgggaagatgcaacgccgggcgaggggcgcctcccggattttgaaaaacagcctcattcgcctcgggaacgcctcgatcccccacccgcaccctttggccagatgattttaatcctgggattccgcgttggtcgtgggggtaccgggagctggagctggaggagaggagccggcagcgcggagttgccggggtgcagctgcgcgcagctggcggcgaggggaggcggtccctgcggctccgccgggctgggggaactggctcctgcgcctctgcctcccggaggatcgcactcgctcatccttacacaccacacacacacacacacacacacacacacacacactgccgctagcgccccccacgccacaagccggaatgcggaggtcagagccactgtccacttgaaagcaggaaagcaggggctgaaacgctgagatggaggcggaggctctggcctcatctgcgaggttcgcaccttcccggaaggcccccccctcccccgcgtttccccagggcgagcaaggtctagcttctgagactccgctctctgggctagcggttcgagctgcaggggggcggggacggattcggagggagcactagagagagagcccgcgctcactcctgccctcctcgcaaagaactggccagccccactcgcgtccagcccacaactaggctgccgggaccggggagccagaccccaggtcgctccaactccggcgagggcggggaggggagtgacagcagcaactagcgcgcgctggcaaaagcacagagtctcggaataggctaaacggccggcgcggaggggtggaggcaagagggggcggaggaggagttgcccgagcggagagggatgacgtcctccagggccttgggctccgaggaaccgaagactggtgcgctcgccgggccccgcgcactagctctggggttcgcagaggcgccgcgcccggcttccgcggcagctccaacacagcgcgcaggcggtcgatcccggtcagcttaaaccgggcgcaagccctctgtccccctcaaagcacctctctgctcgtccctagtctccaggtgcccgtctgagagtccctgtcgcctccgggcggacccggccaggcagcccccggtcgggccagcctcgccccttcctcgctttctcccccatcgacctcgagccaagggcaggcggcccgcacccgcgcccctgcccacggggctaggcggcgctcccggcctacgcccggctgccaagaagagaaaggcgctcacctgagtcaccgaagccttcctttggggcccctcccggagcttgttcgcagcccgcaggcacaaccttccttggagaaaaaaagtagcgcaagggcagagagaggtagggctgctcacaggtccctccgcaggggctctttccttcgaattctccggggtccagtctcgggctcggcggcgggaaagagctcctggaggctggaaggggccgccagacccgggctcctcccgcagctgcggtggcggcacctccaagttgccacctgcagcgcgcttcgggcgcctgtgacagcccgcgccgctcagccctcgcgggcccgccctccccgtccgctcgttggctgcgcccggtgcccgggcggtccccgcgctctgccccgccctgagcccgcctcccagccgcgcgctcg

SEQ ID NO: 5158 - DNA, 990 bp, Homo sapiens
  source 1..990: mol_type = unassigned DNA
acgtggtgtgtgtgtgcgcgcgcgagtgtgtgagcgccaggggccgcccgcccgccgcggctccccgtgggctggccgggccaatgagcgcgcggctgtaggggcggcgggcggggagggggcgccgagccctgcggatggaggcgcgggcagcgcggcgcgctcattccgcgcgggcgttgctggcggggggcggcgcagccactggacccggaccggggccgcgacccggggtggcgggtggcgtgggcggcgcccggggctgggatgcgccgggggctcagtggcggcggcggcgttggcggtggcgtcggcggctgcagggggacgagctagcgccgcggcgctgggagccagttgagcccggccggcgagcggaggcggcagcgcaggcagagcggcggcggcagcgggagcccgagcgctgcgcgcccaccatggccgcccagggagagcccggctacctggcggcgcagtcggaccccggctccaacagcgagcgcagcaccgactccccagtgcccggctccgaggacgacttggtcgccggggcgaccctgcacagcccggagtggagcgaggagcgcttccgcgtggacaggaagaaacttgaggccatgttacaaggtaggcatccctcgtgttctcggactctccgactgagcctctaactccttttcggacatccccaccgcgcgctccggcgcccgctactccagcctacggccggccggtttagctccaggcccgctcccccgcggagccggaggacacccagggactggagacttcgcgggactccccacccttccacgcctctcagatttccaggcgctgggggccctgtgcgaacttgactggcttcagaaaagccgaaggccgagtttgtactggcgcgcccaagttgcgttctggactttggagatgccaactttagcccggacacctgggctgtgccatccggaccactcgggccgcacagagtatgcg

SEQ ID NO: 5159 - DNA, 2274 bp, Homo sapiens
  source 1..2274: mol_type = unassigned DNA
ccgccttccgtgtactgcctgcggctcgcttcgggcccacacgggacaccgaggcatgatgaggacgcagaacagcagaagcgcgccctgcttcccgggcgccagtgctcggggccagcggcgtgtacccggcgggcccggccgggagcgggctggcgatcgcggggctcggcgctcccggctcccgcgccatctcccggcgcccgccaacttcgctccgcccgcggcgtagagaagctcgcagccctccggagcctcagcgatctcctggctcgcttttcccgcagccgccgagcagcgcaggcccggcgactccgggtgcagctggccctgtgcggtgacatcgccgtccggcgccaggctcgaagccgcctggccgcgcccgcggggtcgcaggccgctggtcccgcccggccgcgctcacaaactactcgcggctcgtgacccgggacaaacttctggcggcggcgcagcctcttccacagtcaccctccccagagccagctaccaaaatagaagacgcggccggggcgaggaggtgggcggggggagcccggtggccgctcctccccgcgcggctgacgcccgcttcggcggcggtagtggctgtggccgcggggccgcccccagccgagctcccggaggcgctcgggcgcgggccggcggggcacgggcgctcacgccctctagcgggccgcggcggcgccgggcggccgtgacgtgagcgctcccttcagccggcctgcggggcaccgccagtcagtcggggagcaagagccccgcgcgcagccggcgcgggctcggtcatcggcgcgccgccgcccggggctgggcttggggctgcctgtggagaggcggcgggcggaacgcgcgcggccacggccacggccaccgccacggccacggccggcagctcgggtcccgggtcccgggcaggggaaggggagaggcggcgagctcagcaaccggaaccgagggaagattttggctccgcgggctcgccctccgctccctctgccagcggcgccagacgccgagtggggccagggacaggggaggaggacccaggaccctgtgcccgcgcccctggagccgctggagttcggacttctgcaactgttggcactttgggggcttggcttagcgctctgctgtttacccgtctctcctcgctgcctcggaaccaaagctcccggccccctccgccctcgcgcgcccacccaccgccgccggggagcggcccggcccgcactcagcaccatgaggggacttgggacttgcctggcgactttggccggacttttgctaactgcggcgggcgagacgttctcaggtaagcgggaccgcctctgccgcccccgaggcgcgcgggccggcgcgggacgcccgggacgccgacagctccctggtggtagagccctaaggctggcgtcggggccgggcggggggcgcggcgggccggacaccgcttctgcctgtgagccgggcgctgggcgaggggccgtggggctggcaggcacccagtcctcgggcgggcggagcggacggaccccgagggcgagctccccagccgggactgccagctcggccgccgtccttccgcggcctgggctagtgctcaaggttgggcggcttgcactcttgagtccctggccggctgcaaaaggaacagcagaaaactttgcttgaagttcccagttgcagccgccgggccgcctggcgtaggcgctgcgcggtccccgccgaccccgagcagcggccgggcccaggccgctggtgttcggctgcgcccgcagcgatcgccgggaactggcggccgctccggcggcggcgatctcccggtgccctgccctccctgtcgccccctgcccggcgcggctggcgaccccgggaggtccccgcggtcgtgcagcgtctgcggagaggctggggggagttcctcgccggtcccagcggtagggcttggcggccgcggagggaagcgggcaggtccccaggccctggccacggccctgcgccccgctgggctccccctccccaccctcgtccccctagcggagcgccgcggccagctgcaacttgttcatccagcccggctgcccgggggtcccaggtgggaaggagaggcactggcggtgtgcgagcaagcgtgtgagtgtgtgcgcgtgtgtgcctgcacgcgcgcgcgggggcgttctaagcccagaggaacccctcacggagaggatctgtggatcggagtcgggggtccggcgtgggggcgaacccggcacg

SEQ ID NO: 5160 - DNA, 882 bp, Homo sapiens
  source 1..882: mol_type = unassigned DNA
gcgaagtgaccccctacgcctggacaaagcgctcgaaagcccaggcccgcgggttagctccagccgctgggcttgacaggggtcagggaggcgggccggccccacagccaagtcacagctccagggcctggtcgcacctgagcagcgcggcctcgggctgctgctggcgctgcaggctccgcgcctgaccctccagcctgcgcagcgggcactcggccgggaagaacctctccagcaggcggctcagcactacgttcacgcgcccgcgcccgcgcccgcgcccgtggccgcgcgggccccagctccacgcagcgctcacagaccgtgagcccgcagggcagtgtcaccggcttgtgcagcagccccgggcagccaagcaggtcgcggggcgcgccgggcgccagggccggccctccctagccttgagctcgccgcccggcttcctcgccaacagtggccgttcgcgcaggccgggacacaccaggccgcccgccagctcccccagctcctccggccgcagcgcctccagcctcccggctacacggaacgcgcccagggccaccgggaggcggccggcgcgggtcagagcgtcccccagcctcaggcaccggccgcggtcgggctgcgccagccgggccagcatggagcggaagagcccgactgctttctggtactcgctcgcgcggaaggcctcgtcgccctcctccaagcgctgggcgattggcttcccgcagcagcagcccgtcactggggcggcggcgggaccggctcagtgctgatccccgcggggctgagaccgtgcgggcctggagcgaaggcgcggagcaggggcgatgagctgctgctgggaactggccggcgggagcgcggccacagccttcg

SEQ ID NO: 5161 - DNA, 4359 bp, Homo sapiens
  source 1..4359: mol_type = unassigned DNA
tcgtgtttcacggaaaccaccaccaccgcatccacaggctccgaggggcggatacaaagtcttttgggggaagtggggccgcagatttcccccgacccgaacacagactcgtacagggcgcgcttgggcgcagcctcggatttcacgtcgggcccgacctggctgtctttggggaggatgtaagtgttccccagcgagggcggctgggggcggtggtggtgggagggatgggtgggggggtggtgggagtggtgccgtgccgccccgttcagagcctcggcgtagcagccctgcggggcgggcgagcccagcttggtgccaatgcccgcgatgctgttgagcgtggcgatggagacggcgccgatgcagtggttggtgtaggtcttggagagcttggccgccttggagagcatctgcatccgagtgcctagcaagttcttgccgatggctttgttctcgtaccaggtcacatcgccctcgctgcagtggtcccggggccgctggaagaacgccttgcagagagggttgcgtttcgacaggtacttgacgaagctggcgtaggggcagaactcggtgcccgtctcatacatgcggggcaagttctcctcgtcgctgctctcggcgcgcttcttgctccacgacgacgagcgcgacttgtggtagggcccgagggacttgaagtagacgaacttgcgaccgtcctcgtccatggccagcccaaaagagtcctcctccaactcacgctggttctcgcggccgcgggtacagaagtacatgcacgtctcgaaccagaccttgttgagcagcccgaagggcgtgttggtgctgaagacgctggaggtgtacagcttgcgcaggtcggcgcgcgtgatggcttgcttctgcaccaccggcccggcgccctgctcctcgagcttgcggatgaccgcggccagcgtcaggttggcgctgcgcagctcggggtccttggtgaggtcgagcgtgcggcagtacgggggctcattgaggtagcggttgagggagctgcggatgctgatgagcgacgacttgctgtagagctggccgcttttggagcgggcctcggcatagaaggagcgcagcacgcggcacagcgcccccttgtccatggtctcgaagtccgggctctgcgccttctcgctcaggtactcccggaagatgcgcacggcgtagcgggtggccagccgggtgttctcgctcagccgggcccgctcggggcgctgcagcacgtcggggtccagctcggagccgtccccgggcggcccaccgcgggcccggggcgccagcagtcgcggcggcgcctcgggctccagcgcggcgctctggtccatattgatcatatggaccggctcgggctccagctcctccccggccgagtcctcgggctccaggggctcgtcccagtccagccccatctcctcctcttcctcctcctcctcgtcctcctccagccccccacctccgtcctcctcctcctcctcgtcccccgttatctgcacctcctggatctcgtcctcctcctcctcttcctcctcctcctcgcccgcgctgcagtagtgcggacggctgtggcggcggccgcggccccccgcgccgcgctcgccctcgccccgctccccattgttctcggcggcggcggcggcagcgctggcgctgccgcccgcgctggtgttacagtccccgctgccaggcattctcgccatattgccgtctctctgccagtcctcgggcagggcgcatgcgctatattggaccgcagcgctgagagcttttgtgtttaatgaccttcagctaccgggaggcaaagccgggctcttaaaggagccgcgctccaattgtcattcccgagcgcagctccggaggggcagcggcgcgcaggggatggaggggaggggggagggggggacaagttagaccggagagatagggtaaaggacggaggctgaccagaccttcttcctcccccacccggctcccacttctaagaaaactttgaaggaaaaaaaaaaggaaagggagggagagctgtcggtgggggcgaaacactcccaacttaccctctggcggagaattgcgcgggcccgggcgggagagagggagggccggcgagagggcgggacggtctcgtttctctaagtaatgcccgaggagcagtgccccttccactgccccctcattgccccccggagccggggggtcggggcggcggctgcgccgggcgggccgcgggtgctgccgcgggaaacccgtgtctggggccgcccggagcggagcggagcaggcaggttaatgagcagggtggaggaggcacggcgaggccccgcaccctctcggcgcccgcggccagggcgcagcgggcgaggcttgggagcgggatggggctggcggcggcggcggctcccccacctacttgctggcggcgaggcgcgggggcctggggccagccgcgcggctcccaactccctttccgactcttgcaaaggagcgaaacacgccccacgtcagccacatccctttcgacttttccaacagccacatttaagctgtcattaaagacctggggcgctccccgtaggtctggggcaagtccgcgccggtccagccagccccgggaaggagcgaggcagagaagactgggaggggccggtgggaggggagacgagggaagaggcgcttgggaccccaggggccacagggacccttccccacccgcccagggcgccgccctccctgcccctgagcaaagtgacacaactccctcgggcgaggcgctccaccaagctggagctgaagtctccctaaggcccatcgggcaggcggaaaaagcgaacttgtgtctcggccgaccctgccgcagccacaattcggcaattcggatccggagcgcactctcactcaaagtttgccaaccgccattcgttcgccctccgggctgcgctgcctcaggcgcgcgggggcgggcacctcggaaactggaaaagcagccaaagagctcgccgggtctcgctttcccataggagacactgccccacttccagccaaacgcccgcccccggcgcgcccaggctccgggcgcgtccttgcgtcgccgcctcccgctctcccggcccaggggcagcttcccagagccgccggggacctcggctgttctcttaggaggcacagcccaggccactctcggagctcgtgctgcatcctaactttcaccttctcccgcagcccgtgtgtaccctggcgcgcgggccagctgcgagtccctggggtgaggggacacgagggagtcaggtccccagcagtgcgccccggtgccaggccgtcctgctgggaggcagcctcgcctgctcctcgggtgcgtcctcgaatttacctccaagtccgaattctcggcagttaggctgtgagagttatgtcaactgcctgtttcccccttccctggccctcctgtcttgctctcaagggaagcattttacgcatcaattgaaacccatccatcaatttgcattttttttttttaagaaagaatgaaagaccaggtctcagggcagtgtgggcttctgagtgggagttgacgatgtctttttctgcagcgaacgctgctggtcctccgcgtgcctgcccggccctggacgccacccgagcttcggggaaaccgcgccaggtgtgaaacaagttagagcaagtccctgcctcgcgggccgcctccggctccttagggaaacacaagacacacagacacacacacacacacacacacacacacacacacacacaccacgctctcatccgcccggctctccgcggagaaccgtccgggaatcgtccccgaggtgcggcgcgggaggtggccggctttgttcacaatgcactgcccgccgcacccgccctggacacgtgcagaaaggcgtgctcgtttctccgaggctgcggtgagcagctaagttagttgcacactgggacccccacatacgagctggcacacactagtcacacacggctaattccagagggctggccctttgtcctgggacgctcccaggttttcgggccgcggtgcggagaactcaggtgggtgcccggcaagttacctaccaggggctgttcccccgcgaccctcgccataagcgcagggacccgggggccgcgctggctccgggctgcgctcctggcttggcaggggaccaggcccacgctgcagcctgggagcggagccgccccccaggtctccccacctctgcgggcggcggggtccacccccctcccaccagctcccctccctactgggcgagctgctttgaattgctcgcagtttgccggaggcggtgtgctgggttggacgctccg

SEQ ID NO: 5162 - DNA, 2762 bp, Homo sapiens
  source 1..2762: mol_type = unassigned DNA
acgacccgggaggagagcgtggagccgggcagggacaggcgtgccgcaccatggcgcaccatggacagggctccgcgcggcggcggcccacgaccgtctaggggttgcgggagaaagcgcgagagactgcggaggccagccccgtccagcccctgcccccgccccagcagcactcaccccccggcgggccggagcgcgccaggccctgacccgtgaagaccacggagcggggtaatccacaccacctgtctccacccccggagcaggcacttccgagctgcgtccgcacttttcggggctgccagctggcagtagagcacctctccccttgccccgagggcgacaggcagggggaccctccgtggattttcctgccccgcggcgagggtgggcacgcccctttcccgcaaccttcgagggaccccacggcaggcggagaccgacttgggaccagggcactgcacccgcccagctagagggtcccggccgaggctgtgtgaagtggcctccaggcctgggctggctggtcgggaggagcctgggggcatcctcgggttggaggcggcggaaagttgggctgcccccgggctgggaacccgcagcgtgcagtggcgagggaacctgcgcccggactggagcaggtgcttcctgccgcggaggagcctcttagtagagattaaatgaaaaggctcgctggctctctcccgagggtatgaaaagtacggaaggctccaggcaaaggcgcccccggggcgcatatagggcacaggcagccggacagagaaaggagcagccgcgtaacggaacttctcgcccgggggagatactaggcgtgagaggccagactcgttctacaggcaggcgctgaccggcagagactcctccgggcaagagggccagattttctttccaggtgggacgaacacagaatattgtgagggcaagagaagaagaaaaggaggcaactccagactgggataaagacaataggacagtagagcccttgagcaccgggaggcgcacgggtgcagggtggggtaaggtggaggcaagtcccgtaactaagacaccagagtgagaattcctactgtaaactcgcgacccatccctgcagaaataaacaaaaaaattggagcaaagtactatgcgaggggcgaaaggcacagaaaactgcaaaacctgggagttatcctgcctcaccctcctgctgcctggggacaccccccgcgagcttgctcggccccgaagaaggagcagaggggacccgcaatccagcccctagagccccgccaggaaaggcgcgagagacctactggccccggcaaccctgccccggcgcccggacggagcccgatgcctgcgcagctaccggccgcgcggcgcggcgcggcgcggcgtggcacctcccttcccgggtgcgcagcccggccccgcagcggcgcggggaacaaagggacccggcgccgcccgccccaccccgcccgtggcccggcccgcggggaccgccgcgtacctgaagcagggccgccagcagcggcagcagggtccgcagcgctcccgctatccggcacatggaggcggagaggggccgagcgaagagccggaggaggcggcggcggcggcggcggcggcggaggaggaggaggcagcggcagcaccaacagcggcgcggagaaacggctccaggcagtttccacccccttcccttcccctcccctccccacccccttcttcgctgctctccgctccccgccaatggagagcgagctgatgacaaatagcgggccgcggagtccgcgggactcgcaccaggagtaataaaacagacccagagatcaaggagctggggagggggcgggggaacagggagggagagcgtgtgagcgtctgcgagtgtgtggaggcggctgctgtggcagcgcaggcggctcggctccggcccggagcgcagcggaagccgcgagggatgcagcggcggggaccttggccggtggaggatgtggaggtggaagtggagcggatggcgctccccaagagctccgccacgcgaggtttcgggctcgtggttttgcttcctccgggtccccgctccagggccgctcggcgcgacgaagacgccggggacagcgccgcggggagggcgctccgggtcgtgcgtgctgcacccacaaagagcagcagtcccgccactccgcgcctccgctgcgtgggggccgaggggcgcttctcggctcctctttccggtcccccggcgagttggagactgttctccggcctcggccgcaagggggtgaggcgaggggccggcgcggtctctcccgccgcggctccgtcccgcgcagctgctgccgcagccgcccctgctgcccgcgcaccggcacccgcccgccggtcctcgccctgcgccgctcactcgcgcgcgccgccctccgtcgccgaccgcgcaccccgctcggcctccgctgcgcgacctgggcgagccgccgccgctctccccgcgctcgccccacgcgctgcctggctgcgcggcccgctcccctctcctattcctcccgccgccgccgccgccctcgcccccgcctccctcctccgccgagcctccccgcccgcgtcgtggccaatcggaggccaccaagctgcggctgtagccggccggatccgcggcagccgcccgcccccgccccgccgaagcgccccgtattttgctgcagcccgcggggggtcgccggagggaagcctagagtgcgccgagcaccgccccg

SEQ ID NO: 5163 - DNA, 338 bp, Homo sapiens
  source 1..338: mol_type = unassigned DNA
ccgcgggagtcgcgcaggcgggcggccagggggagtgggcgccgcccggcagcgccccgcgccgaggcacaagcgcccgcgccgaggcacaagcgcccccgactcaccggctccgcgcgtttccccgcgcgtctcccggacccgcgcctgcccacccctccggctctgctgcggtcgaggccccaagtcggttatcccgtgtccaggcaaccgcgggggcggcggcggcggcgtgaggagcgggcggctgctgctccggggcctcctggctcgagcccttagcccccgactcccggcgtttcggcgcccgatcagcgctccaggccgcccccgctccg

SEQ ID NO: 5164 - DNA, 1435 bp, Homo sapiens
  source 1..1435: mol_type = unassigned DNA
tcgcggcaacgatctctgggagtgatcgaggcattcgggctgccccgtgcctcccgggcagcgatctaacgataaaacctgacagtgtcctggggaaaaccccacatccaccgctagcgctacattcgggctttatgccaataaggagacactgtagactatcgatcagactcgtctgctctcagagcgtgcggccgggcttccagcctggcctttaggcgcggtggcggcggtgggacacgcgccaggcgcccagagaaggacatgggacaatggcccagcccgaggacgccagacgccgccgcccgacccggggaaggaagctcctgcagccggtccgggaacccgaggcggggagggaggccagctctggaggtgcgctgccgctttaaaataaaggaccacaaagactgtacagtggggaaaacgcgcctggctaatgcgagtggggacgacttggggagggggttgaggaaggtagggggcacacgagccaacggcggctcacggctccccctctctcccgcctctctccttcctccctccccgccgggctgctccggcagacaaataacagaggaaggcgagtcactcaccgtggtcttgacaggcacgtagagcacttgcttggcgccgccgcctcccccgcggacctcgtccggctggcccagctggaagcccttcgatttgacccagaatttaaatttggcgttgtccgtggagctcgactcggagccattgaggagctggacgatccgttcgtattttttacgggtcaccgtcttggtcttgcctgagtccccgtaagtcctgaggcaccagtcctggaactggcggtacatgtcgcgctcgctctccatgttccccgcgctcggccgctggccggatgctcccagcgcacttcgcacctgttcaccctaggctcatgaaaaatgcagccccggccacgttgcagggatgcgaggtcccggccgcagcgggagcctgctttgggtgggggaagggatgggaagaggggaggagggtccggttgggcaccagcaatcaatgccccgtgctaccaagtctggtccattcgtaattgcaacggctgtctcggacgtttttcctgttcccttagcggtcggtctctttaatattttgtgaccaggaccatcccaacaccattctggcccagaggagctgggttttcaataattaaaatcccattccttggtttattaaaaatcccaatattgaattggggtggtccctagacgcctcgcccccgggctgcgtccggggctgggcaggtggagcgcagcgccgcctccccgcgcgcgccccagaagcttccccagccactggccccgtggtccaggagtgagggctgcgcctctcccgaaagcagccgcccgcccagcgcctttgagccccgaagggcacacgggtcccg

SEQ ID NO: 5165 - DNA, 510 bp, Homo sapiens
  source 1..510: mol_type = unassigned DNA
ccgaggcgcgatagtttatcaaagacgagggctggctccttaaataaaccgcggtgatctcacttgcggcgccccctcccacgccggccccctcctcccccactagagcggcccgcgtcgactcgatgggcggactcgatcgcgcacgcggcccgcgggcccggcggaggcagctcccgctccggggacccgggacgcgccgctcccccgccccaggctgcccgcgcaggaacttcacggccacggccaagtggggcccctgtcccggatcccgttgggcccggacggccgagagcccagggatttgggggggcgcgcgggctcccgagctcaggcggggcggcgggcgccctgccgtcctctccccgcgcgccgcgccgccgcccggcctcccgaagtcgccccctgtcggcgcgtcggccgcttgcgccacggcgggcgccacttaccccgggcagagtcttctgctcgtgcagcgcgctctgggccttcagcgctgactcacgctcg

SEQ ID NO: 5166 - DNA, 2722 bp, Homo sapiens
  source 1..2722: mol_type = unassigned DNA
acggcgatggacagcaccctcggtcctcggccggccaggagcccgcgagtccgtccgctcagcgtcctgggctcgaccggtgcagccttccccatccccatctttcaggtcgctgtacccaaaaatccaagccccgtctcctcgatcccctctctctttctcttcatcggcgcccgctgctctctccatggcatcgttcctatcagcacctcgcccaaaacccagtcttgccccagcgaacagctccccacgcaccccagctctggtctccgctgcccgagcgcctccctccaccgcgcccgcccgaggcttcctctcgcttagtccgccgctcgtcagtcgccggccggccggtcggcccgccagcccgctcctgctccccggcaaagttgggagggaaaggtgtactcacctttgtgcatgcctgtgaacctgtccttcagaaccgtaagctcgtagattttgccaaactcctcgaagaggggcttgaggtccttctcatccaggttgcgggggatctgcccaatgaacagcttgatggcatcgtggtccttcatgggaatggtcgacgggttccccgggctgtggcttaatccgttcatgtgcccggcactgcccgggctgctgccgagcccgttggtactgaggcttgcgttgtcagcctgtccgtttgctaacgtggccatctttatatacatagagaaaatcttctttccttttattctttctcgctcacactctctcgctcctctctctcgctcgctcgcgctcacacacgcacacgcatacacacactcgggttctctccccctcggtttctctacacctcgctctccgctcgctctctgctctctctctttctcctcttctctcgctcgctcgcgctcgcgctctctctctgctctcccccctctctctctccctccctccctctcctctctctctccctctctctctccctctctctctccctctctcctctctctctcggtctgatctgattttttttttctttttttcttttttttttttttttttttttttttacattgaacagacaggatctctgtcctttccgtttaaacaggctggaccggttcaagttcccagccagaccaggggtgggggtggcgagtgtgcgcgcgcggaggagggcgcggggggccgggaatgggcgcgctgtgggggcccgcgccacggcgggcggcggccgggggcagggcggcgtggggcggcggccaccgcgcctcccccgtcggcggccccgcgccgtggcgatggtacagtccgagacggcccccggctataaatagcgccaggcgcatggctcttcgggaggcgctgagattccgggcccggcggccgcggggagcgggtgtccgtgaggagccgggcagccggcctcctctctttgccttttgggggttctttttgtaatagcagcaggtgcaactttttgtattttaaaaatagtgatttttattttcgtgtgggtatgtaggggggctttatccaccaagctatgctctattagggcgccaggcgggcgaagcaaaggcagggatggcgggcggggcggcggcggaggtggaatgggcgcttttttcttccatctggctttatttatttatttagactagaaaagcgagccggcttggagggagtccgcccggggatccgagcgcgcattcatcagtgtcgagagaaaaaaagctacataaatatatattatgtggataaatctatagacaagagctctctcgcgcgcgctctctccctgtctctctgtgtgtgtctttctctgtttttttttcctcctcgcacccccaacctgccagagcagccccacatcttcctcccgcccggcatctaccgccacccaagccacctgccaggatggggctgggagctgtcgggccgcgccggggggcagagggacggggagtagagactcggggtccgacccccgccccaacccgcttccgaaggcggaaggtgggggtccccgtcccgggcggcctcccccgccccggagagcgcggctggtcccccggtggctggcgggaggaaggtaggagtcgggcgcccctgcccgctcgcccgccggagggggaggaaggcgctgggcgcggtggccggtgagccagcgcgggggatggcttgatttgccctcgtctgctttacgggttcaaatagaatatatttttttaatcaccatcaaaagaataaagcccctgaatcgctatctgggttgccgccggaccgagactcgcgcggcgtgcgctgcccccgcgggtttcgttttcggcacctacagctcccgaggtgcgaggctgagtcgttcctgccgtggggaccgggggtcgagccgcccggtccggaccccgccggactccccgccaggcccactggggctggcatctcggctgcgcgggaaagggagtggcaggcgcggagccgggagcagggtccgagcggccccgcctgtaggggtgaatactggtggtgaacttggctggggtagcagattttcacgttaatgatatttacctgcaccccgtcctctctcatgtttgctttttcagggcagcctcttcgcttcagaagcctggcaaattgaaataacgcgcccgctcccccgcgggctgcggggctggggagctggggcggcggggctgagcggctggcctaacccccgccggccctcggctagccactttcg

SEQ ID NO: 5167 - DNA, 1133 bp, Homo sapiens
  source 1..1133: mol_type = unassigned DNA
acgacgcggtgcgccaggcagagagcctggggagtgtgcgtgtcttacctgtgtctgcatcgtgtgttccctctgtgtgtctctgagaatgcgttcttggcacgcgtcctgcgttaacaaggcgtttggtgtgtgcatgtctgtgtgacagtgcctgggtcctgtttgcggctgcttgttcgcattccagcttcccttgtgcccgcagtcaggctctacacgtgcgccagcctccgagcgcacgtccccgagtgacccgtgcgcggtgtgcagggacctcagggtcgtgtgcactaagggcgctcgtgcccgtctctctgcactaaggaacgcacctccacatgtctgagtgcacgtccctctccatgtgtgcacgttccgtgttcacgccgcccatgtctgtgcaggggcgcttcacgcgcgccctctccggcccgcgggcggccagggacccgcgctgggctccacgcttcccgtggggctgacccctccctcgcgccccgcagcgggccgcagcgattggccgccggcccccttccagccgtcacccctccctccctccgccacccgcgcgcccgcggtccccgctgtcccccgcggttccggcgaggccgcgccgcgctgcgctccgctcccattggctgcgcgcgcctttgtgtggcggcagctgcggccccagcgcctttgaatgtcgagaggggccgggaagggagcctttccatgggccatctgtctccccgccagccgccgccccaccgccgcccgcgccccgcgctccgcctcccgccccggcggctcccgcagccccgccgccgcccgcgcccgcgccccggagccgcgccacaaagggcccgcgcgcagccgccgccgccgccgccgcgcgaggagccaggatggtcctggtccacgtcggctatctcgtgcttccagtgtttggctctgtgcgaaacagaggtatcgctttttcctttcggggtctgcttcggagcgtggatcgccgcaggcaccggggcgggggcgggcgccgcgggcggccgggggctcagggcacacccgcgaggacgcagggcgagcggtggcttccccccaccccattttagggggacccccgagggtgggggcggccgccctcg

SEQ ID NO: 5168 - DNA, 2401 bp, Homo sapiens
  source 1..2401: mol_type = unassigned DNA
tcgaaggtgtcgccagcctcagtgccggtgggcgtctgcaccaggaatagctaaagccgacgacatctagccacctcgagcgccagggaagacgctccgcgtaaaaccgcggcctcaggcggactcccgctccagctccgcgctgctggtggcatttccggggacccaaagtgggtggcctgggggcaaaggaacagaggccgaagaacttggggtatgttccactagagcacctaagggacggagtgggaggttacatcagatatgcgacctcgacacattccaaaagtggcagccccgtgggctacccccaatagtgggatggatctccccaacttctctcgcccctcgaagtccccctgttatctcgggccatgctcctcccccgggattcccttgtgcaaaattattctctcccttgcccaaaggatttttcccttctttctgaccccacgaactcatctccccaacaggttcctaaagtatgggcggatgtgctccctctcgcccaccgccaggagccgagccccggcaggtgagcggtgcaaaacacgcacccagctgcccccagcttcctccgtccccgctgagttggctgtccccaccccgcaccacggcacccgagcctgtgagtccccgaccccggccccagccgcagccgccaacaaccctacaataaacaagaggacaggattgagcgtccgcgtcccggagcgcactggctgggggcaactcctcacccccggcgcgccgcccgctgccccgatccgagagcaccgggagagccgagggaagggaaggcggcgaggggaaggcaggcggggatggagggaggcacggcgcggcgcggagcgaggaggtgggctgcaggggacgccgagaagcggtggggctggcgcagagggcgggcgcccggggcgcgcgttaccttcgtcttgcccccgcagtggcagcacacggtccacaggtacttgagcgtccgccagagcaagatgatgaagaggcccccgaagaaagtcaccatggaggaggccaggaaagcccaccacatgcgttggccccggctgtcgcacggcacctccatggtcaccgggatgatgagcgcatccatcttgggctcgtggaccgaggacgaggaggaagaggaggaggaagaagaagaagaggaagaggaggaggaggaggaggaggacgcgtctaggctgagatggttcgcgtggatattgctactcattctaagactgctgcctccgccgccgccgccgccgccgctgctgccgccgccgccgccgccaccatttgccatagctagcaacgggcagccggcgcaggggctcgggggagctcctcccgccgccagcgccaccccaaacacccatcaacagccatattgctgctactgctgccgccgccgccgccgccgcggagcgcgggaggggggcggggaggcgcctgggctcggggcgctgtgcgcgacctggcggggtgcgccgagatatatacagcgagccgccgccgcccgcccgggggggagggggatggagtgcgcgggcagctccccctccccggcccgcgccccgctcgccccgggctgcgctggccccgagcgccgagagccagggggcgccgcgggccgcccgcgcccggggtctgcgccgcccccgggcccgccccggctccgcgcgcggtcccgggtgtcctcggcgccgcgccgcccgccgtgcgccacgggtgtgcgctgcgctcggccggtgacccccttccccgagcgcctcccgcgcggctaacgagccgctctccgcttattaggtggtaactcgttaataatggataatcggccccctccgcccgggcgcccctgcgccagccctcctcccccggctgcgctcggctccggctcgccgcgccagtgcgcgcccggccgcggcaggttcaccgcgtccggccgccggcccgtggccgcctgctagcccatgttctcgggaccccctagtcctgtcgccacgccgctgagcccctcggcctccgctcgctcttcctccttgccgcctccgactcctcctcgtccccgtcctcgccgcccaagcctcttcggcgcgcgccccgcgctccccgcagccgccagcagcagcagctgcagcaactggagcgggcgcggactcaggacgacccaggcgggaggggaggaggctcgccgcgctggctcgcctgggctccgggctgggcaggggtgggcagggcccctcggcagcggcccggcaagcgcccctgacccccagggcgcaaggtagagcgcccccagcccaggcgcggggccaggcgcctctctccaaggtgctgcgcccccagccgagagcggtggggtacactgggaggacggcggggcgccccggtcaggccg

SEQ ID NO: 5169 - DNA, 769 bp, Homo sapiens
  source 1..769: mol_type = unassigned DNA
ccgggaacgaacgtgcgtggggcagttcaaattcctgagctcagatttcgtttcccgcggtcagatggtgcggtcggtggggcccgagggatgcgcacagctgtgcctgagaggtgctgctctcccgccaccgaagtcgctgggaaattctgctgcactgagacattttaatgtcggatgttctaatcctgcgggcaaaaaaaaaaaaaaagtttgaaccaggtactgggcttttgtcacggtgaaccccacccgcgccccgcgccgtcccttcattcactcaggcgaggtggcttggatttgcacctcgttgaagaagcctcccatgcgacatctccgccagcaccccgcgcggacttggctgggcggcggcggggagtcagcttgtcaccgcacggcggccgggaccgcagcccctgggtgcgcagtgcgcctctcgctgcgccctcctagagcgcgggtcccgtgcctgtgcccggcgcgacgcgatctccctgctagtcgggctccgcgtgctccccgcgcttcccgcagcctccgcgcagcccgcagcgccctccagccccgcctcgcggccgcgggaacccggcgcctgcagccccgcccggaaccgaccgccaggcgctgttgccgccggccacgcaacgcggggcctctgcctggcaccagccccaggtgccttgtctcgggtcgtgctgtcgcgcgacactggggacccaacaggccgccggctactcagctggccccgcagcttccctgcggctcagcg

SEQ ID NO: 5170 - DNA, 1169 bp, Homo sapiens
  source 1..1169: mol_type = unassigned DNA
ccgtgctccctccgagtggacttggccccggctccaaacccagccgagggtcggctcgctcctggggacccgcggatgtcgcgagggggcgccgcgccactgaaggctgggacgggggcggtgcgcggggcggcgccggagtccgggatgccggctccagagacgccgcgctccgccccgaggaggccgccggccgggtaagcggagcccggagctcgcggagtctggaccgcaggtaaagttgagcgcgccgtggggccgggggtggggggtccgcggcgaaggagccggggccgcagtgggcggtggggcggggggcgcgggctcctgtctgatggttccgcgcgcagcttcttctccgggtgcgcggtgcgcgcgggcgcgggagggtcgaaggggaccttggaatccccctgttcgggccaagggggcgggggcggctcggggccgggcggggctggtgcctccccctcccgctcagcgcccagagtccgggagtcgaggggggcgtcgggccggaggcgctcgccggtctggccgcgccgcgcgcgtggatggaggtctcggccgcggatcgccccgtctattcgcgctggtcctgcgggagcccgggtgagccgaaggcgaggaaggggcgcgggtctcgggaaaacccgactctcccggcgcccgccccggttcggttgggggcgcacccggctcgcgcggagagcgggcggggtgtgggcgaatgctcggcgcgctgcgcctttcccggtcccccttctccccggagatgaacgccccactcccgctcggacacacggccgcacccctactctgcctcctccgaccagccggggcgcggcccgaattgggggagagaagacccagctcccgcagccgcgaattctgcaaacccggagcccatgcgccccgtcctccggcccggggagctcccagccttgcccgccgagcgcagcccgggtccggactgtggtcactggggacgagaagggtccctcctgcggggctcccgggttcggatggacggagggggcgtccggcaggtgaactgggcccgctccgcgtcccgaacgttcccctaaacccacaagtcccggagaccctggggcattctgcgatttcggagtgaccggtggagcccccgcccgcgcgcctggctcccg

SEQ ID NO: 5171 - DNA, 6036 bp, Homo sapiens
  source 1..6036: mol_type = unassigned DNA
tcgcacagcctgaccatcgtgagcaacgcgtgcggcacgctctggaacctgtcggcccgcagcgcccgtgaccaggagctgctgtgggacctgggcgccgtgggcatgctgcgtaatctggtgcactccaagcacaagatgatcgccatgggcagcgccgccgccctgcgcaacctgctggcccatcggcccgccaagcaccaggcggccgccaccgccgtgtccccaggcagctgcgtgcccagcctgtacgtgcgcaagcagcgggcgctggaggccgagctggacgcacggcacctcgcgcaggcgctggagcacctggagaagcagggcccgccggcagccgaggccgccactaagaagccgctgccgcccctgcgacacctggacggcctggcccaagactatgcttccgattcgggctgctttgacgacgacgatgcaccgtcatccctggctgcggccgcggccaccggggagccagccagccctgccgcgctgtccctcttcctgggcagccccttcctgcaggggcaggcgctggctcgcaccccgcccacccgccgaggcggcaaggaggcagagaaggacaccagtggggaggcagccgtggcggccaaggccaaggccaagctggcgcttgcagtggcgcgcatcgaccagctggtggaggacatctccgccctgcacacctcgtccgacgatagcttcagcctcagctctggagacccgggacaggaggcgccacgggagggccgcgcccagtcctgctcgccatgccgcggcccggagggcgggcggcgagaggcaggaagccgggcgcacccgctgctgcggctcaaggcggcccacgccagcctctccaacgacagcctcaacagcggcagtgccagcgacgggtactgcccacgcgaacatatgctgccctgcccgctggccgcactggcttcgcgccgcgaggaccccaggtgtgggcagcctcggcccagccggcttgaccttgacctgcccggctgccaggccgagcccccggcccgcgaggccacctccgccgacgcccgcgtgcgcaccatcaagctgtcgcctacctatcagcacgtgccactgcttgagggtgcctcaagggcgggtgcagagcccctcgcggggcctggaatctctccaggggcccggaagcaggcctggctgccggcagaccacctgagcaaggttcccgagaagctggcggctgccccgctgtctgtggccagcaaggcactgcagaaactggcggcgcaagaggggccactctcgctgtcccgatgcagctccctttcctcgctgtcctcggccggccgcccaggccccagcgagggtggtgacctggatgacagtgactcctccctggaggggctggaggaggccggccccagcgaggctgagctggacagcacgtggcgggcgcccggggccacctcgctgcccgtagccattccggctccccggcgtaaccgaggccggggcctgggggtggaagacgccacgccgtccagctcgtcggagaactacgtgcaggagacaccgcttgtgctgagccgctgcagctctgtgagctcgctgggcagcttcgagagcccgtccatcgccagctccatccccagtgaaccttgcagcgggcagggcagcggcaccatcagccctagcgagctgcccgacagccccggacagaccatgcctcccagccggagcaagacgccaccgctggcgcccgcgccacagggtccccccgaggccacccagttcagcctgcagtgggagagctacgtgaagcgcttcctggacatcgccgactgccgggagcgctgccggctgccatctgagctggacgcaggcagcgtgcgctttaccgtggagaagccagacgagaacttctcgtgcgcctccagcctcagcgcgctggccttgcacgagcactacgtgcagcaggacgtggagctgcggctgctgccctcggcctgccccgagcgcggcgggggcgccgggggcgccggcctccactttgcagggcaccggcggcgggaggaggggccggcgcccacgggttctcgccctcgcggcgccgcggaccaggagctggaactgctgcgggagtgcctgggagccgccgtgcctgcccggctgcgcaaggtggcctccgcgctggtgccaggtcgccgcgcactccccgtgcccgtctacatgttggtgcccgccccggccccggcccaggaggacgactcctgcactgactccgcggagggcacgccggtcaacttctctagcgccgcctcgctcagcgacgagacgctgcagggaccccccagggaccagcccgggggaccagcgggcaggcaaagacccaccggccgccccacctctgccagacaggccatggggcaccggcacaaggcgggaggcgccggccgcagcgcggagcagtctcggggcgcgggcaagaacagagcagggctggagctgcccctgggccggcccccgagcgcccccgcagacaaggacggctcaaagcccggccggacccgcggggacggggcgctccagtcgctgtgcctcacgacgcccactgaggaggccgtgtactgcttctacggcaacgactcggacgaggagcccccggcggccgcgcccacgccaacccaccggcgcacatcggccatccctcgcgcttttacgcgggagcgtccgcagggccggaaggaggcccctgccccgtccaaggctgcaccagctgccccgccgcccgcccggacccagcccagcctcattgctgacgagaccccgccctgctactccctgagctcctccgccagctccctcagcgagcccgagccctcggagccgccggccgtccatccacgaggccgggagcccgcggtcaccaaggacccgggcccaggaggcggacgcgacagctcgcccagcccgcgggccgcggaggagcttctgcagcggtgcatcagctcggccctgcccaggcgccggccccccgtgtctggcctgcggcgccgcaagccccgagccacccggctggatgagcggcccgcagaggggtcccgggaacgcggcgaggaggcagcgggctcggaccgggcctccgacctggatagcgtggagtggcgcgccatccaggagggcgccaattcaattgtcacgtggctgcaccaggcagcagctgccacgcgggaggcctcgtccgagtccgactccatcctgtccttcgtatccgggctgtcagtgggatccaccctacagccccccaagcacaggaagggacgacaggcggagggagaaatgggcagtgcccggcggccagagaaaaggggcgcagcctcagtcaagaccagcgggagcccccgttcccctgcaggccccgagaagccacgtggcacacagaagaccacgcccggggtgccagctgtgctccggggacgaacagtgatctacgtccccagcccggcaccccgtgcccagcccaaagggacccccggcccccgcgccacaccgcggaaggtggcgcccccttgcctggcacagcccgcggctccagccaaagtcccgagccccgggcagcagcggtcgcggagcctacaccggcctgccaagacctcggagctggcgacgctgagccagccccccagaagcgccacaccgcccgcccgcctcgccaagaccccctcctccagctcctcccagacctcgcccgcctcccagcccctgcccagaaagcgccccccggtcacccaggctgctggggccctgcccggccccggagcctccccggtgcccaaaacgccggcgcgcacccttctggcgaagcagcacaagacgcagagatcgcccgtgcggatcccgttcatgcagaggccggcccggcgtgggccgccaccgctggctcgggcagtcccggagccgggccccaggggccgggcggggaccgaggcgggcccgggggcgcgcgggggccgcctgggcctggtgcgtgtggcctcagccctctccagcggcagcgagtcctccgaccgctcgggcttccggcgacagctaaccttcatcaaggagtcgccgggcttgcggcgccgccgctccgagctgtcctcggccgagtccgcggcctctgccccccagggcgcctcgccccgccgcggccggcccgcgctgcccgccgtcttcctctgctcctcgcgctgcgaagagctccgagcggcaccccggcagggcccggccccggcccggcagcggccccccgcggcccgacccagccctggcgagcgccctgcccggcgcaccacctccgagagcccgtcccgcctgcctgtgcgcgcgcccgccgcccggccggagactgtcaagcgctacgcgtcgctgccgcacatcagcgtggcccgcaggcccgacggcgccgtccccgcggcccctgcctcagccgacgccgcgcgccgcagcagcgacggggagccccggccgctccccagggtggccgcgccgggcacgacctggcggcgcatccgagatgaggacgtgccccacatcctgcgcagcacgcttcccgccacggccctgccactgcggggctccacgcccgaggacgccccggccgggcccccgccgcgcaagaccagcgacgccgtggtccagaccgaggaggtcgccgcccccaagaccaactccagcacgtccccgagcctggagaccagggagccccccggggcccccgccggcggccagctctccctcctcggcagcgacgtggacggtcccagcctcgccaaggctcccatctccgcacccttcgtgcacgagggcctgggggtcgccgtggggggcttccccgccagccggcacggctcccccagccgctcggcccgagtaccccccttcaactatgtgcccagccccatggtggtcgcagccaccaccgactcggccgcggagaaagccccggccactgcctccgccaccctcctggaatagtggcctaggccggccttctggaacgttctctcccggccctgcggcgcggtctggctgccccatgggcctgcgctgtagacgtcccccataggtcgccccagggcctctgcccacccgagccccaccactctcagaacccccgcccagcgcacggcgacctcgcgcctcaccggaagaccttgcctctgtgccgcggaggtccaggaggaaacggggcggccgctaggcctcaagtcccgaccgtggagcgctggcaagggcgtcctggcccagccctgagcgcgcggcccttcccctgtcggaagccgttgcttgaccccgggcgagggaggcggtagcctccgggtccgggtctgggtctgggtccgctgcttcgcagggacagcgctggggaggtgacggcgcccgccgcaggtggggcgaggctgggggagggcggcgccgcggcgggcctgccagctgggggcctttgcggcgcgcaggggcgaagcctgtaatcactgcagccgccggtaattcgctaatgagggctttgcagggattgttttcattctcagccccagctgtgggagtgcgggtgggggtgtggccgagccccggcaggaagccccgcccagacggtgttcagggaacccggagcccaagcgctccggcggagcccaaaagggtgggggtgggaggggcagaggccaacggatccccctgcctgtcgcaccccttggcgggagacgggaaggcagcgggctgcgtacgatgggaccctggtgcagacgccgggccggctgacatttggaccccatcccagaggagatgctggctaccagctggggcgaccccaagggtcgctggagtcagtatcggcccggcgcagccgcggcgggcgaggccaatggaaaggagactgaggggagtcccggcagtgagcccgaggccctgggacctggagcccgcgctggcctctccccagcggagcctgcacgttacggagaccatcacatgtgggcgtggtcagtgcccaggaccgcaccg

SEQ ID NO: 5172 - DNA, 3400 bp, Homo sapiens
  source 1..3400: mol_type = unassigned DNA
gcgtagaaccagtggcgatgggaggaaggggaccggtagagcggggctgggtaagcctccatccagccgggctgagccctggtctccgcagagcctctgcccctcccgagacacccgctacctggtgttagcggtggaccgccctgcgggggcctggcgcggctccgggctggccttgaccctgcagccccgcggagagggtaggtccgcgtggagagggacggggagccgggtcgactgcccccgggcccccagcccctgagccagccgcgtgcccacccaccgcagactcccggctgagtaccgcccggctgcaggcactgctgttcggcgacgaccaccgctgcttcacacggatgaccccggccctgctcctgctgccgcggtccgagcccgcgccgctgcctgcgcacggccagctggacaccgtgcccttcccgccgcccaggtgcgcgcaggcaccgggacacggggcaggagcgggcgggggcggcgtggcctcgtggccgctctcaactcctccaattgcgggttccaggccatccgcggaactcgaggagtcgccacccagcgcagaccccttcctggagacgctcacgcgcctggtgcgggcgctgcgggtccccccggcccgggcctccgcgccgcgcctggccctggatccggacgcgctggccggcttcccgcagggcctagtcaacctgtcggaccccgcggcgctggagcgcctactcgacggcgaggagccgctgctgctgctgctgaggcccactgcggccaccaccggggatcctgcgcccctgcacgaccccacgtcggcgccgtgggccacggccctggcgcgccgcgtggctgctgaactgcaagcggcggctgccgagctgcgaagcctcccgggtctgcctccggccacagccccgctgctggcgcgcctgctcgcgctctgcccaggtggccccggcggcctcggcgatcccctgcgagcgctgctgctcctgaaggcgctgcagggcctgcgcgtggagtggcgcgggcgggatccgcgcgggccgggtcgggcacagcgcagcgcgggggccaccgccgccgacgggccgtgcgcgctgcgcgagctcagcgtagacctccgcgccgagcgctccgtactcatccccgagacctaccaggccaacaattgccagggcgtgtgcggctggcctcagtccgaccgcaacccgcgctacggcaaccacgtggtgctgctgctgaagatgcaggtccgtggggccgccctggcgcgcccaccctgctgcgtgcccaccgcctacgcgggcaagctgctcatcagcctgtcggaggagcgcatcagcgcgcaccacgtgcccaacatggtggccaccgagtgtggctgccggtgacccctgcgccgcgcggactcctgccccgagggtccggacgcgccccagctcgcgccccttcccatatttattcggaccccaagcatcgccccaataaagaccagcaagcaaccggctggggtgtccgtgcgtgttagggggcccgtgggacctcccttgccgtctctcctcgcgcacggcccgggtccgccctgtagcgctcgctgtctctcccctgcctgaagcgccccaccaccgtctttcaggccccggacttggtgccgggtccaggcgtaaaggagcaggtgactctgcggccgcagcactcgctttatttcgccagagtcgcggggcgtccagaaggggcccctggactccggcgcggggccggctcagtcccgccccttgcctgcgcggagcttctggcgactcccaggccgctgctcctcgtcgggacgcctcggggacacccaggcctgcttcttcctgggctcggcgtccctggagtcccgtgcccacggccggtggcccccttcgcgtgactcccagcgctggggtagggcttcccggggctccctggcggcccgtggcctctcctctttccgcggcctctctttcttaggtctctcctccttccgcggcttctccttccgcggcttcccctctctccgaggcctctccttgggtccccggtctgcgagggtcacacggtcctcccggacggcctctccggtggcctcgccgggctcctcttcgtcgttctctgcagcctcccgactcccgggaatcttgggtctgacctctgcctcggcccggggcgcaggcggcgctgatggaggcgcctgggcctcgaacttaggctgcaagacagagtggggtcctggggtaagcgcccaccttccccccggcccgggctccttctttccttggggatgaaggtcccaatgcccgcggtcagtggaaggaagctcttaccaggggcgacgatggctccctcggggctgagcttggcgggacccagggctcgggcacacgtgcttggagtgctgcctccccagggacggcgtctgcagcgacagggtcgggacccgagtcagctgggccgaggcacggtccacactgtccatccctccctcacccctagagcccccctccctggacagttggagtggggctcccccggtacggctgagactaaggatgcccccgagccgtgggaagggactccgggactccgctgccgcggcgccccttctccgaacctcgctctttcaattggtcattcttccccccgaccacgggctgtaggaggcccctagcaagggaggggtcgcaggagtgcccccggggggcgctcacgagctgagcggtccccagagagggcgcaggggaaaggcggcagaacgctacgaggcaggaggggttgcacaaggttcatccggaagccagaacctactcgcggcgaggggaatgggccccgcaaaaggtccacaccgggtgagaggggcgcgcaaggcccgtcacttaaggggagatgcacaaaccaactttgggggcgtgcaagacccagccctggagaggaggctcccagaccccaccctggcggcacagcgcctttccttggaggaataggcgcacaggtggaccccagcctcgccccacctctggggagcctgcgctcaccgcggcacagctggaaagccgagcccagcagcgccaccagcgaggcgagcaccaggcacttgttgagcgacaggtctccccagggcagctcctcgctcagggccgggggcggcggcggcggctgcaggggcggcgcggtctgcgccttcttgcgcgcggggacgctccgagggcctgcgggggcaagtgcgcgctgcgctgtggtcactggctctgtgccgcccccttccccgggcgcaggggacaagagacaggcctgtgccctgaacccggctctctctgcctgcctgtgcggccccgggcgcaggtgaacccagccccgggtgccccgcagctgcacg

SEQ ID NO: 5173 - DNA, 1143 bp, Homo sapiens
  source 1..1143: mol_type = unassigned DNA
ccgaccgctagtggctgggaagtgggcggtgctggggggtgagtctcggcccctccaagatgcgcctcccatgaaatcctccagtcccacgtgtactcacacgcatacggatgcatgcacacgcacagaaacacacagggctcggacacagctgcgcgcagacaagcaaaggaccacgtccacgtggaaacaggtgtgcgcacacgtccccgcgcatccgcgcgcacaagcgctccacacctgggaacgtgcgcacctgtcccccgcccccggcacacacacagccgccccacactggaacacctgggcgccagcgccgggccactcgggcacgcagggcgctacgcagggccgcgcacacgcttttcggccacacgcgcacagccctccacgtggacgcgcgggtacacacgcccggggctcgtagccgcgcacacccgcacccaggaaaccccagccaccaccacgcggggtccgatcgcctctgagcaccctccgccccagccgcgcacccgctgcgcgcccgggacgcgcacactcgcgcacacaccggcccttcctgcgcacgtcccgggcccacccccgcctagagccctcggggtttccccccaccccggcctcggggtctctccacgtctccccgccgacgtgctcacctgctcagggggcgcccccgagccgcgccccgcgcccgcccccaggagggcctccgcgagccggctgcacaccccgaggcggtcccggctgcacaacttggagcgagttgctccgtttcctcattttgggggcgaagaagggtcggggagtgggggaaagcgggaggcgccgcggcctgggaggcccccgcgggtcctagcgccggccgcactgcggtctcctccgcgcgccgccgccgccgccggcccctccccgccccgcctccgcggcccccggcgcctcccgcgcgccccgggcggggtcccggggcgcacgcgggctccacgcctggccctgacctggccctgtcgggcgtgcaccccccacccaccctgggaagcggggttcttggagcgtggaacgggcgccgccagtgcgcgcggcggggaccgggggtgagggagagtgagctgcccgtccggggagataagcaaggcgccaagcccg

SEQ ID NO: 5174 - DNA, 220 bp, Homo sapiens
  source 1..220: mol_type = unassigned DNA
acgtgccggtgacgcttcgtggagctggcgagcctcgcctgtcccgcgactgagcttgcggtcgccccgattctctagtagaccctggcgtggggcacctgagatctccgccactgaaaaggcgctatagaaatgcaaggaattatgattttaataaaattgtctcatttaggagcgagcttctgcgctgcctctgtcgtcggagcccgggtttgccacg

SEQ ID NO: 5175 - DNA, 1860 bp, Homo sapiens
  source 1..1860: mol_type = unassigned DNA
ccgcgatgtcagccacggcccgcggcggtcacggagccacttcagcacctcgcgatggacagtgacccccggcgtggcgcgagttccctgcggtccccacgcgggcctgggcggcgggtccctccacggctccgtccagacacccggaggcacctgccaaagctgcggaggtggacgaccgggcgtccaagcacgaactttctcgccgaggcacggctgccgggctccgtcctgagggtttggggcggcgaggaccgccggggaggagggcgcgcgagccggaggccagagccgggccgggcagggcgcgcccaggagcaggggagacggcgacccgggccgaggcgggacggggacacgttacctgcccgtggagcgcggggaaggggtgcgcggcggcggcggcggcggagtctggcgcagagggcagcggcagcagcgggagcaccggctcgctcggggccggccagccggggagaccggggagcagcggggccgcgggcggcggggccgaggcgagcagcaccgggggaaccacgacccccgcgctgagccggagcagcccggccgagcccggcaccatccagacccagggcggcggcggcggcggctctgcgtccatcggccagaggagaggctgccgccgccggggctgctgctgctgcagctgccgccgccgccgctggaacctggcgcccgcctgcatcctacatccccgcgctgacggcggcggcgggggcggcgggcgcccgagatgctgggccggcggcggcgcggctccggagcgaactcacttggctccgcggcgcggccgctcgctccgcccctgccccgcgcgggaagctcctcctcctcccgcccgcgccgccgccgcccccggacccggcccccgccccggtccccgcccgcccgcgcccctccccgccggaccccgccccgccctcgcgctccccggccctggccggggtctcctccccgctgcgcccctggacccgggcggccgcggaggacgtgggtgggagagggccgagggcgcgcccggctgggctcccgccgatgccggccccctggtggcctctggccctctgggacccagcgcaccgcgagggaggctccgggctccgcactcaagggcaagcggaagccgaggtggcggcgccggagccaggcatgtcccgctgcccagcgcggggctgagggcgcagacggggaccgcgcgagccgctctctacctggcctcctcggagtccagggcgcggagggtactgggctgcggatccggcgcaggcggccccggacgctgctaggcgcgggcggatttctgttgcacaaatgggccaaacaggttcgtaaggcccccgcgggtcccctggcccggaagttgagccgcgggtgcctggtctgaagttccgcgccccacagtggcccgcgggcctcggcggctcctgccctacgccctccaaggcaccaggcaggtggccccagggcctttgcccacgacaccccctgggtggggcaggaccacccctctgtgaattcgtcctggatgcccccaggcacagtctgtactcctccctcccccagcacacgcggcctctgacgctgcacgccgagcttcctgggacccaggacgaaccgggctccaaggaccctcgctccgcccggaccacacgcaggcagcgccggccgagccgagcctgggtccgcactggccacgcgcagccaccgccagacggcgctagccctcccccgctgtagaccctgcttcggaggccgccagcctcctccccatcccgggtccacagcttcagtgcagcccctggcgacgcgcgctgacagctgggcagagacttccgtgcg

SEQ ID NO: 5176 - DNA, 441 bp, Homo sapiens
  source 1..441: mol_type = unassigned DNA
gcggggccttaaacgttatccaatcggggacactgggcggggggccgtccaatcaggcccgcagctggagcagacagggcggcttccgggatttggcgcggcctttgtttctcgctgccgccgaagctccaattttcgtctgtctgctttgtgtcctctgcacgtagaagcccagcctgtgtggccctgcgacctgcgggtattgggagatccacagctaagacgccagggccccctggaagcctagaaatggtgagagtgccggtccgacatcccgagagagggaacggggctggttggaaccggtgggaagcggctgtggcgggacccaggcctccccgcagtcagcttcacaatctgcgcccagagttcttgcccagctcggcctcagtccccttcagccatacgatggcggccgcgctgacagccggggccccggcg

SEQ ID NO: 5177 - DNA, 5587 bp, Homo sapiens
  source 1..5587: mol_type = unassigned DNA
gcggtgcctccgggaggctggtagccggggaagcaggcacgtgaatccaccgggctgccccaccccaacctgaggtcagagctgaggcgtaggggccggggtaggggcagaggtgccgaaacgcactagctggggactcccgggggaaggagataggagagacccaaggcgagccttaggactcgcccctatgactatgactacgcgctgcgtccgaaccacatgtccaccccgcatttgccttcggggaccagaccgcgctccctcagatggctggggagggagcagactccgggtgaaggctgggggaggtaccgggatgccgagtacgccagagcaggcgggggatgggttccggcttcctgccgcctcggcatctcgctttgcaccgggcaaagaaggggccacgaccggcgaagagcgcgtggagacacagggacccgcgatccaggggcaggaaccccgccccctcccggaaacctcccgggccctgagtcgtgcccggcgctccccaccccaccccacccccgccgcccctgccgtcactcacggccgctgcgggctggctagcgtgtgcgctctccgcgccgcaggcacctgctcgctgggcgctgtgcgctcacttctccctcgcgcactgcagactcccggcgctgccgccgccacccagcgtagtctccggctgggcacagcgttccgcccttctcgcggccccgggcgcccacccatccgtcatggcccaggcctgggccaaacagcggggcagctggttgcccaaactggggtaaggagttgagggctgggagctgcagagaggaccgagggacacacggggagcagggatgagcggccgtctcgagccgtgcagactgggaagaagccagggagagtttgggtgggaggactcccaacccaagcgggtgcggggcggggctgtactccaaccagaaagacggtggtccctccgagcgacccccgaggagagagggggagcgctctggggcgggggcggggcgggctgtggcaggagaggggagggcgggggcgatgcagcggtggaggcggcttggcgcccagccactgaccgccccctcccttcccctcccctccccctctccccgcctctctccggctccgggtccgccacgccggacccgctctccccgcgctgcgctgggtcggacgccaggtctgcgcgccgcggctgagcgcccactcgccctgcggaaagagccgcggaggaaccggcgggggcggctgcgggagccgaaggaggtggcaatcgggagcagaaccagaaggagacagggaggcagaagctcgcggctccgtggcacgcactccctcggccagggatgggtcccggcgcggcccagcccctgcccggcccgccgggcagagactgaaccgcggatccccaccgtcctgtggacgaccggacagagagaggcactgaccgatcgccagcagcctcccggtgggaccgcgtctcctgcacaccccgcgcagcgccccccgccggagccgcaccgggcaagccggcgagggagcggggctgattggcggccgccggcggccaggggagggggcgccgcgcggggccatggcaggctcggaggcgtcctagcccgagccggagccgatccgagcccacgcggccgccgcctctccgctcccgggcccccgccgccaccgcgccccccgcgggagatggaacagcggaaccggctcggtgccctcggatacctgccgcctctgctgctgcatgccctgctgctcttcgtggccgacggtgagcgcgggaactttgctgccgctgtggactcgggggggtctttgctggggccgccaccgagaagaagaagaaagagaacgaaccgggaagcttcgcggtctccagcaatcccgctgtgcagcctgggcccggaggggtagggagaggcgagcggcgaagggtcgccgcagcagcagcgccgcgcccgagtcgttcccagtcccgccggggccccggctgcggaaaggatgcctgcggggagcgggagtaggcgcgccccagccaggctctggcggtgcggccaggggcgggggagaagcacgagtcgcccctgccgccccgccccatccggagggaagcagtaggcagccgatggccggtccctgcctcggccctgcagccgcttccccgaactttgctagcccctccggccgtgcgccagggagcagctgcggggtggggggcacaaggccagccagccagagaccgactgcctcgctttaggttgccccaggcccccgacctacagctggtcacgcctctctctctctccccacccccagctgcattcacagaagtccccaaagatgtgacagtacgggagggagacgacatcgaaatgccctgcgcgttccgggccagcggagccacctcgtattcgctggagattcagtggtggtacctcaaggagccaccccgggagctgctgcacgagctggcgctcagcgtgccgggcgcccggagcaaggtaacccgccgcccacgcggtaccggcgcgcgcccggctcgcgcccggggcggcgaaggctaacccagggagggaagcagcgggcttcactcgcgcagggcgccgccctgtggcgcagcccatcttccaccttcgcatcccaaagcatcttcaaagtcagcagtggttacccccaaacctgtcaattattttgacagcatcgctgttcccaccacctcccagaactccattcacgcccagcccctaaagagccacacctcagcctggtcgcttgctcgtgctcgctggctgcggccctctgatgggtgctgggtagtgaaggaagcccccttggtcccatcaggctctccccgccctctgccactttgaggaccccagggctcccacggctgcgttccagaggccaccagaaaaccgagtaccggaaagccggcaggacctccagccctcaggggcacagaggggccacttctctgtggccgaaaacaggcccacgctgcctgtctgcctcaaaacccacactctcttacacactctagtgtgctcgcgtgcacacacacctacacacacacctacacctacacacacctacattctcccagggtcccacccagagttactcccactgagcctcccgctgggtgctgtccagacacagcggccctccctccagttcttcacggctcccagtgagctgggggaggattttgagccacgcggcagggcctaaggatgcccagagggaaggagaggggctttccttcccaccctggtgtccatccagtctccccagttcagccggcaggtgtgcaccagggcagccacccgttggtcaggcaccatgctagctccaaagcccgcttcctcctgggaaactcttggaaagccggacgtcctttgtgccctcaacccccatcccccgggcggtttcggtcctagcctgccggaggagggtgcccttgcctaaaggcggatccgagttcccctagccagaaggccgcgagcctcacgtctctctctccctctttgcattttaggtaacaaataaggatgcaactaaaatcagcgtaagtgtggagcccagcgcgggccgcgggagaccccttctggccgcctcgggtcccgcagctccctcccttagcaagccgcggcggccgcgcatgtggggccgcgcaagtagggcagcgatcgcagccttgcatcggtggctgctcggcgtgtccgggcgccatctgtcgccggttgcagggtcgggttctcttttgtgtaaatcaagggtccaaggcttgagtcccctaattcggctcggcgctgacctgtaaaactccccttggtcggactgcgcgcttagggcctctcgcgcctgccagcctccgctctgcgggcattcctcctagcaccgggagcgcgcggctgctcgccctcgccgcgaccgtggcgccagcttcccgccccctctgccccgccctgagcatctgctctgcgccctccgctgcaaccctttatcctccgcctggattgcgggtctgggtgcggggtgttgcaggcttgcaggggacggggtagggggtggttgtgccaggctgcgaggggcccgggtcatggggttgctaactctgggaggagatgcgcccaagcttcccacctggagcgtagaaaggcctggagatgacgaagcctcctcgtgggctcggttcagaggtgagggctccctgggtgtttgttgagagccgtagagcagtacttcccgaagtccccaccggggcgcaggggaggagcacttcgctggggggcttctggagatcccgcggaaaggcgggttggtagcaggtggccagggagccaggcagcagcctcagcgttgcttgccttcttaagaaagcacagtgttagctgtaaagggcggggtccggtgacagggtggctttccttaggaagcgattcgggcaggccctccgtgctccgggaggtgaggagggccggctggggcgggactgtcggttggagcgcgtcggggcgggaaagacgtggggaagttaaggaacaaggaatccagcctggggtttcctgaaggtgcaggagggaggaaggagaggtggactctgcccttctgaagcgccagctacgggaagacaagcagtgttggtttgtatgggcggggcagatgcaaggtgggcgtttggttaacgtgatggggacgtggggacacagtccaaagagctggctgcctggcgtccacgcagagttggaagccctatgccactgggtagacgcgggtgaaagggaagccggatcgtgatggtgggcaaaccaggatccgggaagtgttggggtgcgcggatgagggggcgcgacggccagggtggccagaagagtaggtttgggagctgcccagcccggcctctaaccctgctctcttgcagaccgtacgcgtccagggcaatgacatctcacaccggcttcggctgtctgccgtgcggctgcaggacgagggcgtgtacgagtgccgcgtgtcggactacagcgacgacgacacgcaggagcacaaggcccaggcgatgctgcgcgtgctctcgcgcttcgcgccgcccaacatgcaggccgccgaggccgtgtcccacatccagagcagcggcccgcgtcgccacggcccagccagcgccgccaacgccaacaacgcgggcgccgcgagccgtaccacctccgagcccggccgcggcgacaagagcccgccgcccgggagccctcccgccgccatcgatcccgcagtccccgaggccgcggcagcctcggcggcccacacgcccaccaccacagtcgcggcagctgctgctgcctcgtcagcgtcgccgccatcgggacaggcggtcctgctgcgccagaggcacggctcgggtaagggatcgcggagagggggcgcacgcgcggggatggcgcagggctagggctgcgccgggacgccccggggggctccggacccaggacccgccccctgggcgcatttgcatatgcatactccttcctagttaggtcgggagcgccccccccagggccttcttcccgcg

SEQ ID NO: 5178 - DNA, 3643 bp, Homo sapiens
  source 1..3643: mol_type = unassigned DNA
acggggcgattctgaaaagaggctgatgaaaatcgagcccgccctgccccggctgggctgggaacagttcgcagggctctgccgagtgggcgagtgaggcgcgcgagcagggcgcccgtcccccctcagccccggaaaatgatcaagtcaatcgtgtgggcatgtttcattattcattgaacacaatcttttacaacgctccgtttacgtgcccgagtttgctcctgacgcccgcgtttcaatgtttaaggtaaggaaaacaaaggtgggggggggatcgcggggcgcggcgcggtgcggggggcgcggcgcgggggggcggcggcgggtgggggggcagcttcggcgtccgggaggtggcaaagtgagtttggactcttggcgcggcccccccgtcccctccccctccccatctcggcgaggcctgccgcccggttccttctcgccccatcgcgattaaaaaatacggtctaattaaatatccgtggctgtgacgttggcgagagaagctgtcagcgggtggggggtggggggaaagaagaggaaaaccgagccggcggctgcggccgggcatcgtatggcgctagagaacttcggcggcgagcgggacctgcgcctgggccgccgcctccccgcccgcggtcccgggaccgttactttgaaaaggagtcccgaggcctggcgcccggcgcgcgatcgggaccccgcgtccagctccggggacccggccggcgccccccacccgcgagcggcccgcgagccactctcaggccccgggaaactttcaagagggtctggggggtggggggagtaaaaaggggagggggtaggctggggccgcggaaacttctgctcaagtgactttccccattttctcctctgcctgggacgggggttcgccttgcgctctttctctggtccgcgctcactgcggggttccggcccctccgcccgtggagagagggtaatttgcaaccttttttttttttcaattaaagttagctgatgcttacaatgtgtcaaacttgcgggcgccgagagccgctgagatctgccattttgtgattgcatcggcctcctgtgccccgggagcctggccaggctgaggccggagagttggtttcagggctgaggtgccagggtccgaacccgcgaccccaggaaaggccgtggcgcctgcaagcgcaggcggcgcccgcagcacctgccccagccgggcctcggcctgggggcccagccgggggccaaagaggaaataaataaataaataagtaacaggttatggagggaaaagagccggccagtcccaggctggagaaatgaggccaatcagagcgaggaagtgcgggcgtgggggctctggaaggcagaggagaggcagggcttgcgcggcgtctgggaagagtgcaatctggggggacgcctcccgtccccccagcgcagatgcatgactggggtaggaatgatctttgctgataagcctttttctgtttgcttcaagacattatttttcgaagatgaattgaggaaaacagtcgtaggcgagactcggggtgtattttaggcaaaaaaaaaaaagttagggttgggggagagctttcctttgatgagtaggaaagtgtccagatctcgacgcgcccatctgttgcagttttgcaaataatttaaaatatagatatctccatatagacggatgtatgtgaagtggaggaaggtcgaaacgcggggaagttagggaaaaagaaagaaaaagggctgggcagagagagacctgtgttgctcactcttcactctgcggagtgaactccggcagggctttctttggggacaggtggaaagttaagtcccccccttttcacttctgtattgtgagtggttcctactgtgtgcctgttggagaacatgtccaccgttcccgagttaggtggaggattggaatgttggggggcggggagcgttggagttgaggacgcagtggccaggggctgggggccgagaaagagcagggcggggtctcagccccgcgtgcgggtggcagcggcggccgggttttgtttgccagatattgttatgtctaacgggtgcctcgccggagacgtgatttgtcagccgccttcgttttcactttagcagaaaatacggcagctgcgaggtgtcccggcctgcggggctcgggcacccggtgcgtcctgggggctgggtcgtgtgcgcgggtgggagccggcggccggcggggccggggcgaggggcgagcgggaggggcggagtgagcgagcgcgcggtacggccctccggttcctcctgcgccttctcccggcagccgccgccgccgccgccgccgctgtgcaatttagcagaaatccgacaggggccgcgtttgctgagcgcatccggcggccgggcagcccgagcgggccgccgggcctggtcggccggtgtagaggcgcggagggggccggcggaggggaccggcggggatgggcgcgggaagcacgcctgaccagagcacgcgccgttccccaaccctggtgtccccggcgagttgggcagccccgcgcgccctgaccttgacgccccagtctccagccagggcttaggtgaacttggggtggggtgtgcgtgcgtgcgtgtgtatgtgcgtgcgtgtgtgtgtgtggaaggggtggtgagactgggaacgcgctgttttctttcccagtttgatactagcaactggatttttactttaagaccggctttgctctctgctggggttgggagggggggcgatcttttcccatcactcacatctttgttcattgttcactgagtggaaggcaggcgacttaaagagacgaaagagaggaaaaaggggtgagagacggagagaggaaaaagaggggggcggccagaagagggaaggagaggcgtggggacagggcccccgcccccgccggggtcgggtttgatggtgaaatagtaaacccacgcacggagggtcgccaggaaagtggacattaccgctttaattaacttcgagatgctccggcggcgggacctggcgtagccgtgacgcgcccccataaatctgcccggcccggggctgctccgagaactcgtacagtagcggcgtcagatccatcccgcgcctcccagtccggagtccatttgcataattggattttttttttttgcctccttctttctccctgaaacttgtttgaaaacccaagtgaaaaccgcgacgatctgcacactcaaaagcaagtgccaagtaagtgccctgcggtggcctcggcgcgccccggggtgagcgcgcaaagccgggagcgaggtgccgcgagctgcgcgccgccccgggccggcctcgcgtgtgggcggctgggcggctgggcggcgggaggacggcctccgcgggctccgggactgcccggctggctgctcgcacaactttttttttttcccccgtctgctgacttttcgggccaggtgaagtgtttgggccacgcgtgtacctgtggcgagactcgggaggcgatcttggggggcgcgcggtcgcagttgggcatcttgcctgggtcgggggcgggcagtcggtcccagtggccgccgctgagggcagagctgcgagcgagcggggccggctgctggtcgcgccgcgccg

SEQ ID NO: 5179 - DNA, 808 bp, Homo sapiens
  source 1..808: mol_type = unassigned DNA
ccgggggagctgcgaggccacccccagccggcgcccgggcggattgcgagcccccgcgggtccggccgggggagcggagactggccccccgcccgggctggggcgcctgccgcccgcgagccggaagagcgccccattcacgagcaggcagccctggcagagggttaattgaggatcattgttgttggttccaggaggagcgaagcgcctggagatcgggcgcgcgggcgcggctctgggagcgggggaaggtgaggggaaatgggacatgatggcattaataatcgttaccaaagacggtgggagtaacaaaggaatgcgtctccgagacgccgcccagccccggggtgttttctggcgcggtcgcggtgcaggaacgcgagccccgccgccgagcctcccgccgcctgcgttcgttggcgcggcgcccggcggtagtgccaccccgaggccgagcgctgcccccgccggcccgcggctgccagccggccctgcccgcgcccgggccccgcgagcggccgcacttcaccttacggaggggagataatgagatcaattagaggcgccgtcaccgcgccggagacagctgccgccgcatagtaatcacccgcgggctgggtgcgcgggggctccccgctacctgcgcgcctgctgctcccaccacgcggcaccgacccgggcgcgcccccggcccctgtccgcagcccacagccacaccgcgcaccctacaccctccttgcgcctctgctggggagctcaccccctccactcgcacagtgcgctgcggcccggggtgtgggaggtcccg

SEQ ID NO: 5180 - DNA, 3415 bp, Homo sapiens
  source 1..3415: mol_type = unassigned DNA
ccgaggggaccggctcgctcactcgttcgcgctccctggctcggcggacaccaggcagtcccccggcggtcggccgctcggaggacgcggaagatgtcccggggaactcaggtgaccccgcccgccacccacagaaagagccaggccggggttgcttcccattccctctgcagccggagagctgaggaggtagggacctggcgcggctcagcgcgctccgcgagcggctccccaaatgggtgcgagagggaagagggcagagcgcggcggggcgtccggggggcgcccggtacccgaggcgggcgcacgcacccaaacaggagagcggcgcccggagttactcagtgcgggcagaagagcggggcgaggagcggggtcgcgcccgctggaggcgcggggcgagcggaggaagaggaggaggagagcagaaggaaggggaagcggctcgtacctgctgcgcgccggggcgcctgctgcttcctcctcggcatgatgcttctccggcgactgccactgccgccgccgccgccgctgccgggctgaggacagggagggagggggcggcgggcccgcgggggggcgaggcgggcctgctctcagcctcccccccggagagcggccgcccgcaggatgctgctgcgcccaggctctccgcgtcccccccgcgccgcgctccgccgcgaaccccgaacgtgcggagggaagaaggagggcgggcgagggaggctcggggagggaggagcacgggggggaggaggaggcagaggaggaggaggtggaggaggaggaggaggaccgcgctgccggcggaatgggaagtttgacaaatcgctccagaggccagaggaggagggggcggggaggagcggcggccctgcccccccccgccccgtccccagacgaggtgcgcggggttcggggctggggggcggggagagggcgggcagagcggtgggaggaggagcgcgggagcggcccggaccggtactgccccggcccccgcccctaggccgggggtcacggcatccggggggacgcgcagccgccgccgcggcccggggctcggcggtccagtcttctgcccgtggcgcggctggagcggcggcgtcggcaacaggcaagcttaaaggaaaaggagatgatcgtgtcaatcgcccgcccgcgggggcgccgcgcccccgcccccggccccaggcccgcgtgggacccccgccccgccagcgaaaggggtgccgcccctccgcctccgccccgtgcgcacacgcgggggcgcggcgccagccccgccgagcccgtcccggggcgctcgttaccccccacccctattcccacccagcgttcgtccccagccaccccccagctgccccacccggctcgcactcctctccacccgccgactccggagcccccagcgtggtccccgggccggggctggcgtcccccggggaagccagagcccacgggcaggccccctccagggaggaggcgggcgcgggccggggcgggtgggggcagccctcagaccccgcgccacccagctcctcccccaggacccgccgtagccacttcccccaattttttttccccggacaaactttcctgggcccgtcccgggggtcggtgtgggagggggttccttcaagtttcctctcctgactttgggatgatcagggtccctccaccccgcccctcgcccccgggagccgggccgcgccccccatccacggcgcgggccgatcctagggcgggacgggggcgggagaaggaaaccgggctcccctgcccatcccccgccaggggctccccccgagagcctagggggccgccgcgccgtgtcccgcgcccggcctgccggggctgctggactagagggattgattattgattggtgatcggggtcgctgaggctccgggccggcccggccgactggccgcggcaagaaggagctggctgggcggcgtgggcggcggggcgacgcgggctcacttacgggcggcggtgagggcgcgggtgggccggagctcatgcgggcgacccccgggcggcggcggctgagcgggagccggagcccgagcggcgcgggcggcggcgcatcgatgcgctgcgggctcgattgcgtctccctgggccagctctcaggccgggaatggggcggccgcgccggggccggctccgggcgctgccgggcggcggctgctggagcgcgggggcggcctccgggcccactatccccgaggcggccctgcgcccgggcgcgccggctggggctctggcgctctcgcaggccccgaggccgacagtcccggcgagggcgggcgccccgcgctccagcaccggctgcctgagcgctcctggagcagcaaaccccagacttcttcctccttctctccttccttccttccccctccccttatctttttctttttttagtctctttctccctctttttctgccctgtgtcctttttattttttctctacgactgtttttgcaagtttgtttcaaaagttcacagcatgctttcttttcttttagaccgggagacagtgatctcacccacacggtaagatcaaaagtctccgctcgcccagcctgcgggcttgggctgggtccagacgtctcccaggatgcagatgcgccgccgctggcctccccggctataaagccgcctccagcgcctttccgcgcgcaggagcgctcggagttgtggggtacggaccccaggcggggcagggagtccgaggcgggctgcggcggggctctcgggctggcggactcgggggctgaggcgccgtgcgcgttgggtgcccgcggccgcagaggccagaaccgctactcctccaggccggggagacgcggccgtggagcgtgaaacgcttcttgcaagcgaggaaacggtgagttggccgacaccgccggcggcctcaccattctggtggccgcgctgagctcctgtcgcctggaggcgggttgcgccgcacggggtcagctcccgccggctcccagctcaccttcgaagctcccacttaggcgcgcccggtgcggcgtgtgcacagcgcggggcgccgcacacggaagcgtgtagttctccctggtcgcgcttttctcctcctttccatcccctcgctgttcttgcaaacctctgttccttcggccccctcccactgcgggccgcggcctgaactcgggtctccgcgtagccggccgccgccgctgggtcgctgcctggccctcccccgctcaggcgccgagcgctgtgcgatccgccctaacatctgtccgtccaaccattggcgcatccatcagtgtcaatgggctgcacattgcagcgacagcccgccacgcacaacacgggctatgcggagtgcacgcagcaaccatactgccatgtcgggacacgcaaaaaggcccccg

SEQ ID NO: 5181 - DNA, 3415 bp, Homo sapiens; identical to SEQ ID NO: 5180
  source 1..3415: mol_type = unassigned DNA

SEQ ID NO: 5182 - DNA, 1592 bp, Homo sapiens
  source 1..1592: mol_type = unassigned DNA
gcgaagcgacccagcgcgaggaccagtccccaaccaacccgctcctagttctgggcgccttccccagcagtcagatgggggcttcagaggccggtgcgcggccacatggccccgggccaggcagggggtcgtggggacgcatctgcgctaggcgcacagtattcctgggcgcgggacgggcgaagcgccgtgggttccaagctgagctgggtcggccctgcagcgccggagagcaaggcggcgcagggaagggagatggggcgggatgtggggaaagctgtcgactgcttggatctctccggcccggatggcgccagctgcctccagctcagcctgcggaaatccgagctcttcccagcggcccgacggcccgggcgccccgcagaccctgggctctccccgcggtgcctccgccgcccgcccctgcgtcctggcccggcctccacgcccctccgaggtcccggcgcagcgcggccgccgccactccccccacattccagaggccgcagcgccgtctccttcctcgcattcctgcccccgcaaaggagtccctccgccccgcgcgaggccgcggcgaggagggggcgcggcccggcgcctgggagcttacattcctccgccgcgcgcgccgccgagcagggcgccgcgtcccccggcccgcgcgtggccgccggaacgaccccggcccggcgccggccccgccccgccccgcgcccaggggtcccggggcgggctccgggcttcgggcggacgatgcggcggcccggccggagcggcggcgggaagcggaggcggaggtgacgcgccagggccggcgggccgggccatgcagcgctccagggcgggcgcggacgaggcggccctactcctggccgggctggccctgcgggagctggagcccgggtgcggctctcccggtcgggggcggcgggggccgcggcctgggcctggagacgaggcggcgcccgcgctgggccgcagagggaagggcagcggcggccccgaggccggggcggacggactgagccgcggggagcggggtccccggcgcgcggcggttccggagctcagcgcgcagcctgcgggcagcccacgggccagcctggcggggtccgacggcggcggcggtggcggcagcgcccgatccagcggcatcagcctgggctacgaccagcgccacggcagcccgcgctccggtcgctcggacccgcgtcccggtcccgggccgccttcggtgggcagcgcccgctccagcgtttccagcctcggctcccggggctcggccggcgcctacgctgacttcctcccgcccggcgcctgccccgcgcccgctcgctccccggagcctgcggggccggctcccttcccgctgcctgcactcccgctgccccctggccgggagggcggcccaagcgcggccgagcggcggctggaggcgctcacccgggagctggagcgggcgctcgaggcgcgcacggcgcgggactacttcggtgagctcgctcggcccggcagttccctgcgcgcatggctggggtccggggttccgagactgcctcgggtaggcggccggatcagcggaggagagcacg

SEQ ID NO: 5183 - DNA, 903 bp, Homo sapiens
  source 1..903: mol_type = unassigned DNA
gcgatcccagaactcgttccccaccccgagcccgtttcccgccgcctcctcgcccctgggagggcggccccattaaccctcgcgacccgggccgctcctggcggtcctgaccccgccaccccgtcccgcggcgggggtttgggggtgaggggcgcgccctggggcagaggattgcgcggcagggtctgccacagggcagaggccagggctctccgggaaaaaggcaggcgcatatatgcccccctttctgggaaaagacggggaggggggcttctcctgggagactccaggcttcgaaattcctcgttccctatcctccggcccccgcacccctcctcctccccgccacgcaccctctcccctccccagccatctgttccactccgcagcgccgcgacaaacacggctccagctcgcttccgcccctgcccagccccctccccaagccccggggagtgggggagtgagcagacgcccttctcctaggaggccggaatttctgcctccatctcccaccggggtccggctggccagaggcaagcttcgagaccccccaccaaccaccaccaccgttgcgagggccggtgaggctgcagataacgcttgcaaggacgggagtcggggagggtgtagggcgagtttaaaggacgggcagagcaagccccgggaagaggcaggggttttccctcccgggtcgccgccccccgcaccctcggagccagccgcagccacgcagcgccgcctgccgggcacaccaaggacctggcgcgcacgtggcgcttacccccacccccgggtccgctcctggctcgcgctcagcctccccagactattcgcaaattgaggatcccggacacagagtgcagagaccccggcaagcctactgaaagccagccgaacccg

SEQ ID NO: 5184 - DNA, 1592 bp, Homo sapiens; identical to SEQ ID NO: 5182
  source 1..1592: mol_type = unassigned DNA

SEQ ID NO: 5185 - DNA, 382 bp, Homo sapiens
  source 1..382: mol_type = unassigned DNA
acggactgttcgcctagtaacatctgatcacgtttcccattggtcaccgtttccggaagcccgctctcccgtttccggaatccccgcaggcgctgggtctgcagatggcgtccaggtacacagtggcgagtgtgattccgcagtcttgggctgtttggccaagcgcccgccggacatggtacgccgaagggtcatcggcgtggagtcctcgctttcagcgtccgcggctgggaaatcggccatcgctacggcgggaactgggactcgggctgcgtcccggcccttccacatcggtccaccgcactcgtgggcgcccgcattggtgctgacataatttcctgacctctgacccgtattgtctcgcgattaaaggtaaaaaacg

SEQ ID NO: 5186 - DNA, 665 bp, Homo sapiens
  source 1..665: mol_type = unassigned DNA
gcgcctccacgaaatccgcttacggacacgatcccggggccacactcagccagacgaatgtctggcaaatgacagtcacttcacgccagactctcacagtccttcacacgccactcccactgcctcagggaaccacaagcacaggcatcgccccgcccggcgtcctcctccaaagattggggcaccaggaccgcgggcccccactcccacccagcacaaagagtccggcgctcagagctagcggtttcccgaggactcaccaccaagcccgcggacacaggccccgattccacacttaacgctgccaaagtggcagagccggcgcgggctgggacagaggcggcactgaggccggcgctgtcggtggctgagagcgccacaagtctcggtccgttacaccaggggcgacgcttcccagaggcccccgcggctcacccgggcgggactggcttcactgtttgcgcgtcctgagaagcagaccacggtgttccagggctcacagctccgcgcaggggagctcagcctaggttttgcacgagcggcctcccgcgagcccagctctgagagattgggagcgcaacttggtgctgagaagaatcgaatcgttccgctgcttcctgcgccgaactacatttcccagaggccttcgcggccctacttccccg

SEQ ID NO: 5187 - DNA, 764 bp, Homo sapiens
  source 1..764: mol_type = unassigned DNA
acgcgccactagcgcgttcccacgcacaaaccttttccctgcggccaacctgcgattctcaactccccgccctggttgctaagggaggcgcgcagagcgcttgtgcctgcgcacttccacaccagcccgtgtagtgtgacgctgggccccgtccctgtgaccgggccaggctcggagctgcagggaatccggactttcgggctctctggaaggccggggagaggccagtgtgggaggacctggtggggaggaggccgtgttacaaaccctgcgcggagctgcaccgctgctgccagacactgcgacgccgcgaccttttctactccggactacgtttcccagcggaccccgcgggagttgggccggcggcccctttgtgtcctccgggggcggaggcagctgaggcgcttctttccgggcccgtaagggctgggttccatccaactaagggtagcggtgagacccgagtgcagattccccgagccttcggggcaggaaggagatcttccaccagttctgttctgcaggtcgggagtgggctgaggagtggcgtgtgggtctccggaagctcgtcgcaggccatctgtgtgactccggtgcgagtggaggttggtaccgttcagtgcgaggctgtcaccccgtgtgcctgtccacgtcctgtgtgactgggtgcgaggaagtcaatggcaccgtggaatgtgaggctgtgagttgaggcgggagcgggcgactgttcgctgcaccttgttgggccgatacccgcg

SEQ ID NO: 5188 - DNA, 1394 bp, Homo sapiens
  source 1..1394: mol_type = unassigned DNA
ccgcgtctgggttcgcagctccgggtacgctgtagttccgcacccggttgcccacgcccgggaccacccactgtgtcttttcggaactgtccagcgtgtcctcctagaccccagacacccaccccaaatctaggtcccagcgttttgcaggggaccttcatcctggggcgttcacctctgacttccctcttgggccttttcgctacggccgagcctaagtggctgaagcgcggacgaggatgcgcggggcctcggtctccaactgcaccacaggccgcacccacgaacctggtccggcacagttactaccgcccgggcctccaggcctcagggctgcagaagctcagtcccgggaaaaaaagcacaccggcctgaggctccacaggaaccttttctccaccttggcccggcctgcaaaacctggcccactccgcgctcttttccctcagaaaagcagcggccacagtggcgcccggctcccagccccagcctcacccgactcagaggatagcccagccctgggagtcagcggcgccagaatacgggagagcgcctgtctccgtcgcgaatgcgctagcgcgcgggggggcggaggcaagtcccgcagctgctccgggccgggaggggcgcgtggggccgggtctcggcggggatagtcgggccggggagacggagccagaggggccgcagtgtccctcgcctcaggcctctacctgtaatggccgccccgtgactgaccagtgccattaaagataatccaggcctgctcccctgtggacactgcggtccaaaatttaaaaaaacaatattccgcctttttatttttcatttggttctcggctcggagacaggcggaggctgcgagccccgccccgcccccagcgacgcctcaccggaacctttggaaatcggcttctgcctcgagtgcgcaagcgcgcggggggcgaacgctggggcccttcagggagcaagggagaagtgtggggccgcacctgccgaggggtcgggaggtttggaggagggtggaggttggctacaggatcccgatggggatggagtgttcaaatctaggcctgtagccgtgaccctggcgtgagttggatggaggaaaccccagtatcgcgagcctggaccaaggcgcggcgcgtgctgcctgtggtgtttgctgagtgacggccgccgcgcccccgcgtacctggaccgagtgcctggccgctggcggagtagtgtttccgtgcacggggctgctgcgtgcgcgtgtgccgttctctagcgggggattaggatggtgccgcagagaaggctgcgcggtggtgcctgactctgacgctggctgtagcgggtctctggggtctttgcggtttgtgtctgcgtttgtgacgtacctgacatcg

SEQ ID NO: 5189 - DNA, 949 bp, Homo sapiens
  source 1..949: mol_type = unassigned DNA
acgtcgtgtttcgttactttaaaaaagaaaagtcacttccgtcaggcccccctttctcctcaccctcgtgtgtgcttcgaggccgagatgcagagagcaagaaaaaggagcgaaggggatccctgcgcgtcccaagcacccaccagcgcctacggtgtgagatgaaggcgcaccccctgggcgcgaagcttttaaagcacctgcccagggagacatttttgaagttgtcagggcccctcctctgtcccctcccagacccgggtcctgcacaaatcctggagggttagcgggcgaggcggccaccgcagcggccgccaacgagcagctgcacggaggtgcagaagaaggaggccactgccattctcctgacaagctgggggcgtgggaggcctcgggagctcgaagtcgcctcgagcgggggtgggcggtgagcggacccccgggtgttgaccaggtgtttggtggtagagcagggaaggggggaacggacgtcgaccctagggatccctcacccgctcacgctccttggcgttggccacacgccgccgctccagcaccaactggaggttttcagtggacgagtagccgcccgagggcagccgcttgagccggcagacagcggccagctggggcagcggcccgaactgctcccgcaacacgtcctccagcacctcggcttgcggggtgcccaggagcgcgggcggcgcggcgcggggatctaggacgccgggcgcggggtccatggcagggccgaggccgctgaggccgggctttcacctgcgcacccggggccgcacgaggcccgggcgggggcggggcgggggcgggagctggaccacctgcaaccattccccggctgcgtattccaatcccggcctcctctctggaggctgcgtccaggcatcgcgttgaataagccgcacaggtgtgactcgggagcgctggagcg

SEQ ID NO: 5190 - DNA, 1365 bp, Homo sapiens
  source 1..1365: mol_type = unassigned DNA
ccgcgcggtcctaggtgaatctggccgaggcttctgcgtcaaggacggcgcgggtcagctgaggccaagaccgcaggcactgccctaccgctctccagatcacagctccgcctctgcaaggccccggggaaacgggcatcccttcttcagtgagcaaaggagaaagacggagcccggtggctgggtgtttcgcccaggatcaccagcgagctcagagtcctccccacgaccgccccagggtgggcatttttaaaagcggaggaagggagggaacacactctttggtgctgtgcccaccttgcctcgcacagagcgggcgctcacaggctttgggggccccgcccggaccgcagtggggagaggccgccccatgccccgccccgccaaatttaagagccttcgccgagcgccaggaggttcccagacaaccggtcttgctcgctgccttttgcagaatcttctcacttctcccgagctcccttccttgcgtccgtccgggcaacggccgcgtcatgcctagccccaggccgcgaggcagcccgccacccgctccctcgggctctcgggtccgacctccgcgctctggccgctctccggcgcccaggtcccctactggcccgaacacgccccgcgctcccggacgcttcgagtcccctttctcggtcgaggccatcctggcgaggcccgacccctgcgcgccggcggcctcccagccgtcgggctccgcctgcgtccacccggccttctggaccgctgcttccctgtgcgccaccgggggtctgccctgggcttgcccgacatcgtggctgcccgcctacctgagcgtaggtttttaccctgtgccagggccgcgcgtggctcccgtctgcggcctgctgggcttcggcgtcacaggtactgcggtcccggcgcccgcacgcgggggactgggcgggggctggagagcctaggtcgccactgccggcgccccagtgcaggagagggcactgagtgtgagaatcacacacggctggagtgggaaggggctctgccaccgtttaccttgcagttgaagccgaggaccgcgacagtcttgctgaaaaagaccccggcgcgaggcttcccccgcacgctgctgaggtgggagagggtgggtgtgagggcggcgcagcgcctgaatgcggtgggcaggaggccagcgctggggctgcaaggggacccagccctgctcccggtctccgcgtcccttgactccctcgcacaccccggggtagcgcttagtgacagagacgcttcccaaagcggctctcgacccgaaccaatggccctgttttttttttttacggggtagggggaagtggacgctccgggcggtgctgttgagcg

SEQ ID NO: 5191 - DNA, 2638 bp, Homo sapiens
  source 1..2638: mol_type = unassigned DNA
ccgggggtcgcgttggaaccccacaggaaaaaggcgcggaaagccgccgggcattttccggggttccatagatgtccccagtgtcctagtccgtgcatcagctcgcgcactcggagggactctaggcagggggagggccccgcggccagtatgtgcgtccgaggctttcccgcagggggcagtgccgcccgcccgcgcgccgatacggtgggagggggtgggaacctgcgcggagttctggaggttctttgggagaaagttaggggatgcggaggggtgggcgcaagacttccaggactccagggaggccgtggggagggccgccgagggtgcagtgtgaggcgcaggagggggttgggggcggtgcacgttgcagggagacgcagcccctggaagatgcgagtgtgaacgtgtgagtgtgagtgcgtgtgtatgtgtgtgtgtgcgcgcgcaccgcagctctccgggttccgcgaggcgcgcgggtgtcagcttgcagccggggctcctccctccggcccccctgcccagcccggcggtccctcctccctccctccccgctcgcccctccccggcgggccaggggctgggacgccccggcggagcaggcggcggcggtggcgagttggggagccctaggctcggcgctgccggaggggcccgagccgagccgcctgcgccccggccgggcagcgccgggcccgcttcccgcggggccacgccctgtcaaactttgttgcggcggctagcgcagcgggcccgcaagcgggcgggaggggcgccgggccgggccgggcagggcgcgggcggctaggggctccgagagcggcggccccggcccgcggccccaccatgccccagctcggcggcgggggcggcggcggcggcggcggcagcgggggaggcggcggctccagcgccggggcggccggcggaggggacgacctcggggcgaacgacgagctgatccccttccaggacgaggggggcgaggagcaggagccgagcagcgatagcgcctcggcgcagcgggacctagacgaggtcaagtcgtccctggtcaacgagtcggagaaccagagcagcagctcggactcggaggtaaggaagcaccgcggccacccccgggggatcccggccctgcgtccgctcacccgctcttgcctttgtgtctcctccgcaggcggagaggcgcccgcagcccgtccgggacactttccagaagccgcgggactatttcgccgaaggtatgtgcccgctgggacagccccccactctcgattcccgctgcgctccgctgctcagcccgggcggcccaccgtcccccttgcttgggtggacgcacccttgccctccgcctttattggcggcagcccccgtggggcgcgcgtggggggcgctggggtccccagctcccgcctcgagccccctgccgcggcgctgtcagtcccgggggcctgggcctcacctcgccttggtcttgttcgcagtgagaaggcctcaggacagcgcgttctttaaaggacccccgtaccctgggtaccccttcctgatgatcccggacctgagcagcccgtacctctccaacggacccctgtctcccggaggagcgcgcaccgtgagtgcccgtcgggcgcgccggggagggtgggaggccgcggcccgcaggatgcgcccccgggcttggccatggagtgggggatggggccttctgcgccgatcccaagcagaacttgtttgcggagttgaactactctctggcggccgagcgcgaggctgcgctggccagtgcctggatgaaagtaaagttactttaacttttcccctcttgcgggttgaggttttggagtccacctctgggatcttccttggcctccagaattcttcgcctgcaccgaaggaaacttggatttgtgcccgctttgggggggtctcgctttccttcttggaaatcggtcagctttctctggcagtggggcaaggggcctagggagctgggttggcgacgttgtcctccgactccgggttcactgggcggctgcaggctggttcctaagaaacccagttttcgtggcgggttattcacagcccccgttcccacccccagccctcgcaccggggcctcagcttttctgcggagctagctccgaattttaaactcgcgtagatgatttcgaggcgacccaaggcattcttcaagttgaggaacttggctttttcccccttttgtcgcctgcttttctcatttaaagcgagcgctgcgacactttaaacctgttaatgggcgcgtattgtgtgctgcccgctggcatttagagcggtgattaagcaaattgaccgggccccagacgacgtgcaaatgagggcggattccttcgccccctctctctggctctaaactcccgccccccgcgttgcgaggggcgcagctgggggctggcgaggcctttgtgtcccccaagccgccactccacccctaggctccctgcccaggtgctgggtccgatgacagatgttgggtgaacgcctacctactgtgtgccaggttcccgcgtgctgctgcttgggcgcgatgtgaatcgtagtagttctttgcttcccgcccagattcccattgcctgccacttcgctgtcgacg

SEQ ID NO: 5192 - DNA, 1531 bp, Homo sapiens
  source 1..1531: mol_type = unassigned DNA
ccgcacaccgacccctgcgccggcccttgcgacccgcgtccgccctccccggctgggaagcacctgccagcggccctcacctgggtcgtcctcgtcgcggggcaccttcttgaagcagtcgttgagcgacaggttgtggcggatggagttctgccagccggccttgctgcgctggtagaaggggaagctatcggcgacgaactggtagatgtggctgagagtgagtttgcgctcgggcgcgctctgaatggccatggcgatgagcgccgaatacgagtagggcggccgcaccatcttcatcaggtcctcgcggctggccatggacagccagcccagctccccgggccccgcgggcgcggcgggcgaggcgggcgcggcgggcgcgggctgcgcgaagggccgctgagagcagccgaagtgccggcggcaggcggtggctgcagaaagggcccggccgcggccccggggggcggcggcggcggcggagcgcccaggtacgcggcggcggctgcggcggcggcggagggcgggcctcccacgccgggcccgttgagccacaggtaggggttggcggcggcggccggcggcgcggcgtagtcggccagcccgtaaggcgccctggctgccgggggggcgcccggggcggcggcggtggcggcgggcgggggcaggccgggctgcgaatacactccgaagttgtcgccgcagtagagggccatgtcggcggccgtgggcggctgcggcgcggccgcggcgaggggcgagcggggctggtctcgccgctcgggcgagagcatccctttgggggccaaccctgcggctccgccttcacccgcgctgggcgcccggtgctccgggccggggtcgggcgggtgctagcggagcgcctgctagccggcctcttataaccgagcccggcgcggctcctcctgggccggcccggagcggggcggtggccgcgggcctgggctctccacgcccccgccacgccccacctgcccgcgcgcccaaacccggagcccgcccgccccgcccctaccgcccctctgcccgggcccgggagcgtctgggaggccggcgcctccaggtttcgggcaaaaagcagcaccccattcctagcccacgtttcttaacatcataataagtaaagccacgaatattaaagagaagataacccgaacagtacgaatgatttctaaaaagttaacttggggtggccgctcgggccacctgcctagtcatccttttggcttttctacctctttcctcctaaccttttgtgatcgagtcgcggaattcacgtccagtctcaaccgatcggcttccagtcgaaaataatcgatgtgatttacaacgctttggggtatacggtagaggttattaacaggcccgcttggcgtgtccccttctcctcggggattctgtgattggaggaacggaaatcagtgttgagtttttctaaccaaactgtaggttcgctcacattcgggaagcatttattcgttttctgtgcggtttgtacgggctttcg

SEQ ID NO: 5193 - DNA, 2045 bp, Homo sapiens
  source 1..2045: mol_type = unassigned DNA
gcgaaacggcagaggccggcagcccgcggcccacgtgcacttgctcagggaaccgttccagcgaaacctgacccggatcggaatcctcccgcagcacagcggccgtgtttatcggaatggaacgctacaagttgtcacctgcatccctctcccagctttgacagggaacacgcgctgcccccacgcccacaccgacacccggatccctatccagcccggccagagtcccaggggccagggaccagtgcagggagaaggtcccccacctcagccctcaggacccccaaccacagcccacccgcccccaccctgctcggttctaggcccagccgaacctacatgtccccgtagtgtcgagcgttatcatccacagtcgcccctcaaactgtgacccccacctgggagacccggaatcatccaggaccctggtgtggggggcagtactccccatatctgccccccgaaaactgctatggagcagccgcgcctcggcgggcaggtgagggggccgagcccaccagcgccgcagccccgctgcctaccttcttcagcgccggctgccgctcccgggcagacatcgccggccctgactttggggctgacaccgccaaagggcagtcagtgctcgcccaggccacttcgggaggcccaggggcacggcgaggggtcggggaaaggcgatcgcccactacagcccgcgcgcctagactgagggaggagccgggctgcagaaccggcggcggatggagacgggagggaggctgcgaggtcgctcgaggagagactaaggctctagaaacggagaagcgggcgctctgcgggaggcggcggcgctgccgctggccgtcaagggcgggaagtgttctgggactctcattaggggccgcgagcctcgagcgtcaaattcccgcggcgtccgcctagcgcgctgctgtggcgggcgcggagggcgcgcgccggcagtgggggctgcggcggcggagggcacgggcccccgctcagcgtcctcaccttcttggtgcagctgcctcccgcgagccgagacactcctgtcagggaagaggagcgccccggctgtccccctagagtctcctgctggggggacatcgcttccatgaagaaaatcttcaaacaaatcccagcccaggaggaggctacacgatcatgtccgcgggctgccggccggaggggcgaggacgcgcgggcggaggcgcggctgccgtgctcaggcagggagccgagctccgggtgctcgccgcgcgcctcccgtcggggccatgtacctccgcctgcgctcgacaccgcgggctggaggcgagtgcagcggcgacagcccgtcagcgccgcggcccgccccgcctcgggcccgccccctccgctccgggcgccctgcgccggggcccgcccccgcagccctcctcagccctcctccagcctgggccctcctagcctcgtcccagcctgcggcgcgcctggcgggcgtctctctatatatgttagcacaccggccaccggctgaccttttcggtctgtgactccgcgtgggtgcagcccgcaggagctcatcggcctgtgtcacgcacgggggcctctagtgcacggacacgcgcctctcccgccacctgcccactcccaccagaccccatcccttcccgcgccgtgcccgcggcggaaggcgcccctgcagcgcgtgcatccgcggagcggtggcgacctcagcctgagcagaggagttgcagtgattcctgcctcgctttcagcggactgcggagggaatcccccaccccaccccactggggatagggtggcacgtcgcagagtgtcgcagctgtacaaatttggaagcccacagcatcgcctgacctcttgtgcaatcccgaacgctagcctgttcgggtaaccctgagtgggcttctgcagccggtcatgtcagcggcccctgcacatttgcacccgcggtttccgctgtctgcaggctgcagagacgggggcattccaaacgtgaaagagcaatgaaggaaaatgcagacagagcgaggacgccg

SEQ ID NO: 5194 - DNA, 476 bp, Homo sapiens
  source 1..476: mol_type = unassigned DNA
tcggcccgcgcgggaggagtgtgacccaggtgccgcttcctctcgccgccgagggtcaggagcccgggagcgcgaccctcccccggcccggcctggcccggcctggccagtccccgcggtctctgcccgggctgacgcccaggaatgtggtcgacgagaagccccaacagcacggcgtggcctctcagcctcggtgagtacccgccgtggggaagggtcctggggacccactggaggccgcggcccgcagcagccaggggccgagccacggccacggacgccctggtgtcccggtccgtgccgggcctccaggcggaggaggcgtccgctgggctcagatccccgactccagccccggttccccggcgcctgggctgcgcggagtccctgtcccgcgtcccggacccctacgcgcagcctccacgcgctccgagctggagaagccgccagcccgccctcccagggcgtgtcgcccg

SEQ ID NO: 5195 - DNA, 455 bp, Homo sapiens
  source 1..455: mol_type = unassigned DNA
acgcgggcggcgcccggggtctgcgggtaggcaggcggcctggccgcggaggcttccccgagtcctgcgccttcctagagagggaggggctcatatcggctggcacagccaccacgggtaccgaaacttggggacgtgcccgaccatgcctcctccggtggcccgggggccaccccgcattgcttagaagtctcgcttcccgttcctcctctctggttcagctcattactcttccggtgaccctgggtatgccacgcttattctccaggcctcagtttccccatctgtgctgtgaggagtggaaggaacgggatgactaggagccttttaagaccgagtattcgaggttctttccggccccgcggagccaggaggtgccagccgagatgcgcgtgccgcgcgcgccctccagtgcccggttcccgcttctgcacggtcctcgctgggcaagggcg

SEQ ID NO: 5196 - DNA, 749 bp, Homo sapiens
  source 1..749: mol_type = unassigned DNA
tcgggcggcgcgcccaggtgcaggctcgctctgcggaggagggcgggggccgggcaagcagagggcgcccagtccgggggcgccggtctgggctgggcgcccagagcttacctcggcgcgcgggccgcgggcgcgtggggcagtggctcctccagccgggaagctgttgctcacgctccggtggttgctgcggtcccgccagggctgcaccggggcttcgcgcagacgttctcccgcgatctgctgcagcccaggcggtggcggtggcggtagcagcggcggcggtggaggtggcgcgggcgacagctcggcccggcgcggcccctgaactgtccaactcttgcccgcgccgggcttaagcgcccggccgctgcccccgcgctgagcgcctgcgcaccgggcctcgcccaggtgaggggcgtgtgcccggagcccgctgggcgcgcccggcccggcccggccccgccgcacgcccgcccccctggcctggccgaggaccccggggtttggacgtgccaacgccactctcgcgcgccgaagctgtgacggtttactaagcagagacttgcgaggcacacagagagggaatgaggcggaaccgttcgggggctcgttgacactgcagagcctcccgcagcatcgctgccttaaatcccgcctttccaggcgtgcgcgcacagcgagccagaggaggctccgtcccgacctggggtcccccgcggtcctcagcccgggggctcgggtccccg

SEQ ID NO: 5197 - DNA, 1134 bp, Homo sapiens
  source 1..1134: mol_type = unassigned DNA
ccgaaaaacacgttctaggcgccgggattccagatacctgggaaatagagtgcacgcagctgttgagaggcctcgcgcttggcttctcctatcactgaggcgcagaggtgctgtggacagcccagacccacacggcgcccgaggtgaaacagaaccctcagtctccctatgaggccactggcactctcggctgtccccagagctctccgacttagagctgaatgcaaagtaagcgctcgaaatgcagaagtagccggggccgcccacggcacctgcctcgctcggggcgagagaagacgccaggctgaggtcccagcgacctcaggcaccagctccgaaggagggcggggagaccgcaaaggggaagtgcccggagggccaacggcccccgcgcaccctgcgcccctctgaagcgcgccgcctccccgcgccggggactgggacctgcctctggggaatccgcctagaagacggcggcggactggggtcgggcactctccagggctgtcaggccctccccagccctgcacctgccgcgccgccccacctcgccaggaagtctcagagaccccggggatggggtgggagcgccttcccatcgcgggctcaaaaagaaggaaggacgcccccaggggtcgtagaaggaggactagctccaagccacaactttcttcggacccaaggcaggccggctggggctccgcgcctacacggcccctggcgggggtccgcgcgccccgggagccccgcggctcggggaggaaagaggagacaagagacaggcgaggattacggggctgacccagccggggtagggaccatcgtggaaaaactttggcgaggtggggggacgcggaaagagagcggcccgcgccctgcaccttgcgccgggcatcccgcgccagtgcctcgctcccagtgccccgcgccccgcgccccgcgccttgccttcaccccgggccagctgcatcgcgcccgcgccgcaggaaccgtggagttggaaagtgggggcgccgcggctggggggctgcttcagctgcgcctcggccagcgatcggcgggccgggctcaaatccagccaggctgggcaggcggtggccgcgcgactggggaccgggcgccccgccctcctcg

SEQ ID NO: 5198 - DNA, 1645 bp, Homo sapiens
  source 1..1645: mol_type = unassigned DNA
tcgcgcaccgaacccgagccaggtctggctccagggcagatctaaccacctactccgaccgagcttccgaggccggcgctctagccttcatgcccacctcccggagacgccccgtggagaccctggcgcctaaaactgcgggagcccatctactgcgctcaggtggccagctcttgagccttccctatccgtggctccttgccggcatgcaggcatgcacaagcataccgccgagcaggaggatctaacgaatccagcttgtggacatgccctaatttccatttccgcctcctccaggtctgttcaggtgaggatgatgggagggaaaagcggtgtacagccgtaacattggcaccctgcaagagccgccggggcactgacacagagggacaccgcattggagatgcggtgtctacggagatttattgcgcgcggtgaaacactctaagcaccgcgcggaacaactgggttcagctccctcatcccggaccttccccaggaccacacgtcaccctttatccccgaacccaggggcccctccacgctgcgctcacctgccctgtttcgtaatgatcatctcagtttggtggcggtggaatttgagccacagaggccggttgcacaggtagacgtgggcacggaagccagaacctggaacccccaggccccccagtcctccgcaagatcccgccgctgcggctccagggtacggcccgtagagcggagccccctggctgtactgataggtgcccgggccgccgcccccgccgctgctaccgcccgcgccactgcccgcaccggctcctgggccgaactgcgccctcccgggtgggcacacagccgcggggaagccgccggggggcagcatggagccgtaggggtagcgcgccccgttaggagccgggtacacaggtccgtggggcgccccagccgccgcctggtacgggaagagtgagcagggcgcagccagctccgacccctgaggaccgggggactggaggtagtaccgctcggagctcaggctgtccatggagtagcgcgcagtggccgcagccgcggcggcggcggcggcggcggctgcagcggcggagggcagctcctcctccccgcagggggagcccttgcggccgtccgggggccccggcttggccactgccgcagcgctggcaaatgcgtccccggcgtcggtgtcactaagcatggccgcgggggcccctgcgctggcggctgcgggctccccgctcaccgcctcgcaggagagactgccggaaaacttcttggacgctttgtctaagtccaacttctgaggagagggggccgcgctggggaggtggccagcgctcccgccgctgccgcctcgcgcactctccagcgggtagaagtgcgcgccaggcaggttcactgagctcaccaagagctgctcccctaactgcatgctttgcaaagcgcagacggcagctggctgcttcctctcctccggtggccttattataaaggcaggatgggggagccagcgccctcttccgaggggaaggtaacttccccttcctcccgcgccggggctacccacctgccgactcgcgggccgctactgcgcgtactggcgcgccctgaatccagcgtcctttccggaaggaaagcgccg

SEQ ID NO: 5199 - DNA, 4698 bp, Homo sapiens
  source 1..4698: mol_type = unassigned DNA
gcgcctcgggaacgccctcccgctgcaccctacaggaggtcgtgggcggtggcttaacagccccagtgcagagcttgaaccccaccgtccagaaggaaaggtgagtgggggacccgggcgggaggtgaggcctgccggcagcggccctcaggcgtgctgggcagcacggctagcagaggcggcgcctggtcttggatgctgcagcggagacgccaaggagactgaatgcagggagcgaggcgtagcggccgcggagggtggggccgcccggaaatccaggcggcgccagccttgtagcatctgcaggccgggggcgcgcacacgaggggcacgtgggtgtggaggaaccggcgcggcggggcctccttcctgcagcgccgcggcggtcgagtgcccgtgctggaggaacggcgagtggggtgcctgccccgcgcaggcggtacccgccgccccagctccgcacacagcaggcacggccagggaccgggaccgtggcccagcgcctggaggcgctctccacgcgcatctttcccgatgccggggcgggaagccgagtggctttgtccggagatgccaggggatgtgggcaggggacgaagaggtttcccaactggccaaaccctggcttgaggaaagactgaggtggtcattgacccgtgggagcgccctggggcttcgagggaacggcagccgagcccgggagactggtgttgggtacccgcgggggccggcgggttccacgtgggtggaccccgagctgagggcagggtagggtcgcggatcgctgacctatgagctcccctactcccgcacaaggacacctgcacatggacccgggcttccacccgcttctggctgggttggcgccgggagcgcgcaggggagggacggcggcggagtgcggggtttggcgggtgaggtgggtgaggtgtggccgcgggggagggggcgaaggcactagaaggctgcggtcgcgctgtcgctgctgttcccaccgtcggcgcggggcgcggagggggcgaagaggtgcctgccagtcgcactgcggtctaggggtgaaaggaaaagggtccatgtaaaggagaaagggcaggcagagactcttgctggtgccagcaggcacggaaggatgtggccgcggggacttggagtttagagggcaacgctgggtgtcataatgccggagatgaccccgggtgcagaggcgattccagttgggtagagctacagagaacgtggcccgagaaggggagcttccttaaattagacatatcctgtgttgtcctaaacctagcatttaccctctcccaccccgctcccacaacctccagggtcctagcggagtcatttaagcgctcagtactaccagcttcattttaggtaaaaatcaagactaattctgcactttattaacctcctcgtacccaagtcaccacggggcagcttttcacagccctaaggcgtggtcacttcaagcccacagcgagttgctcgtgtcctcggcttctgctccgcaaatctcggacgatgccaccggaggacgctgaaggcaaaggctggtggggccaggcgccggcgagactgccgcgctagcacagcttccgcgggagccgagtgctgacgggcctcgcgaccccctcccgagggcaaacggctcggccctccagggacacttggtcagtgtcactctctccctaccgggtgtcgcgcattttctcaacagaacgtgaccccgtagacggatgaactcggaatcggcaaaacccgcctgcccttgtctagtctctctgccccaccacaccactgcccttcactgcggactgcgccgtgtgcgctccgggaccgcccctgcacctttgcccacagcttcccattaccaaggcagccggaggaagacctttccgagttacctgtctcacgtcagcagccacaccgaggcggtccccctcgcaccactccccaagtgcagagcccctgaaagtccgaggctcctgtgccacgcaccctcccccctgcggggcgaccccgcgtatgcgtgtgtgtgtcacgcgtttaatcgcacagagtaattcccagacgtgcaagacaaagcatttcaagcaaagatggtccagagttcaaattggaaagcacatctcgaggcgctgaatctgttctcgccgtctgcctcggtctctggggcgtcgcatccaggagaagggttttaactccctgccagatccgctcggaattagctcttctggcggtgcagcaacaagtggccccgccgcctcccttgtgcactcggagggactacatcctcctcctctcccagcccctagtccaaacgggagtaggtaatggcggggaaagggggaggtgacgagagcggggagaaggaagtacatattttttaattgtgaaattgtctgtctgcgtgctgtgctctgggattctcttgtctcaatcaacttcaattttaacgtggccgtaacgttaagattaagacctagaaatgaaaacgtacccacctttcttattacaaaggtcgtttgttgttgttgtttttttaaaacaccaagtaaccccccccccccccccccacggacttatactttgtttatgagatttctccaaccttggtggtttggagaaatgaggtgggggaggggaggaccaagggcagcaagacgtccactacgaaaataagatacttactaatttaatagggccgttcctttttacataagatgctcccccaccccccaccaatttacaataggtaaactttgagcttcctcaaagtttcgctatctagcgtttatgcccgaagctttacgaataaactccctttccaggtaaacctgcccaacccttgtcctatgcccagcgaagcccaggtacgatgggtcaaggacccctggcttccacattgtctgagtcacgttccagttggaaaggccatcttgggcgagggacgtgttgcccgactggtctaaataaggaaagaaagtggagtaccaaagaatcaagggcctctgttcctccccatcccgccaccaccaccaccggtccccgggctctgctgagcgctgcggcggtcttggctgaaaactgcgtccccgcccaaatcgagcgcaaaactcccttggacagaagtttgaaagaatccagtgtagaaacagacttctccgtccaatttggttttaatcagtaatcatataagtatacccacataaccacctaagtggagagcagacgcccagattcacggtccccacgtgttgctggagttggcgcagacgcgtgtgcgggcatagcggcggacgtgacaccgcattttctccgaattcctgccatctagggtggtgccgccccaagagggggccgtggggaggtggggtaataggctgcgcaatccacttgctctgggggagcttagggttcagagcagagcgcaactccggggggctgtcgcacagccccattctcccacaccagaagagcaatgctccttatggatgattaatagccgggcttctcctgaccatgcggcgcgtccctgccggcaccacttagttgttttaatttgacctttattagcaacgtgctcccagaggctgcgagttggattcgcaccacgataacggccctctccccttccacccggccggcttcctgggaaggatcggggactgcagctcccgcgacgcctcctcctcctgcgcagggagcaggcctgagttcctccacgtaatgacctgggagacctcaggcatcccggggcctggtcggagggtcttcgggccctggagctgggcggtgtctgcagtgcaccgccgtgagtttctctcgggtacaatgtgctggtgtgcagagaggaggaaaggaaaaaaaaaaaacccaacaccactcttaagtggcactggcatctatgaagtggcagtggtctacactgagcgtgcccttgcctggaggtgtagggggcggttactgcagccgaggggagggtactgcggccaagggcagggcgagaggacagtcaaggccggctggccgcgtgggagcctttcctctccgggttcagcggccggaatcaccagcactgcggctaaaggggctggtaggctctcctgcaccccgcgtgctcctccgccttctctgtgtcccccggcttttccaggaggaagatggggtgcccatcgcgaatggggcgcgccgggccgcctggccgggcggtcacgtgtcccccctcccccgccactgcggcgggagttccaatcagagcgcgccagggggctcctcccgggcaggaaccacccggctcggcggcggagggtgggccgccgtcacctgaccgcccgcccccgccccccgcgagtaaggggcggtggtagcgtctgctcggttacaaatggcccctcccgcccggctcgcccgctcgctcgggctcggcgcggacccgcctgggcgtgctcctcccgccggctccaggcgtcccaccgccctgcccggcgccagcccgcggtcccagccactcctgagggcgcgccgggcacccagcgcgtaggctcgcccacggaggtcgacacggaagtctggaccgccgaggcgtgtggctcgtctaccggcaggtgagcgtgcaccgcgggcgtgggatgctgtggggacagtgcgggggacgtgtggggtcttcggatgcgaacgcgagtccgtgcg

SEQ ID NO: 5200 - DNA, 462 bp, Homo sapiens
  source 1..462: mol_type = unassigned DNA
tcgctgggatcctgtgcgcggggcacgccagcgattacaaacgtgtctcaattctgttgagtcaaagccctggtgccaggcgctgcctccttcctgctcgctcgagtcccgcaccccctggcccccctctagttggtgctgtgctcagtccctcctgggtaattcactcaggaacccgctgcggccaccctccgtcctctccccaacctgggccgagcaacaagtggagccagaattaattccatgggcgagaggagcacggaggcgagtggagcgcgctgccgccagaggctgccaaggaggcggggtggccagcgcggggggtggaggatgggggcaggacgcgggagggaagggcagggggtggggggcgaggccccggggaccagcgcgcgagagtgcccagctgggaaatgcagctccgaattaacatcgtatgtttcataatcagtttacgagccg

SEQ ID NO: 5201 - DNA, 300 bp, Homo sapiens
  source 1..300: mol_type = unassigned DNA
tcgaactggcttgcccgtggcgggcttgtccaaagcacaggggcctccgccttcggtgcgcgttgttctcaggattagtgctgttgggagacaaagagccccagatacccgaggctgggagcgccggagagctcccaggtttcgggtaccctcccggagcacgcaagcacagtcccaggcctttagggacagatgggccagagccgtctgcatctgcccgcatcctttgggaggctgcgatgatcgcagccagggtggccgagcgcccggcccactgcacccggcggctgttttgcagcg

SEQ ID NO: 5202 - DNA, 554 bp, Homo sapiens
  source 1..554: mol_type = unassigned DNA
ccgagacaccccgggcgcgagcggcagtgctgcttgcttgctcctcctctcccccagcccttcccctccgtgacctacccactccttgcagccctcgcccgcaccttctccaacaccccggcatccctgcaccacctgctcgggcagccccggcgggctctgggacttgctgtgcgcgccgagaggaaggcaagctccaaacccctgcctggaagacgggctgtcgcggctgcaccaccagcaggaggaggaggagaagaaactatttcgcgataccccattctgcgggtgctttgccgctgccgcttctgctgccgccgatccgagtccgcgggttcgaacaccgcagcggtggggacggtgggtccggcgggcgccgggaggaggacaccagcggagccctgcactctcgtgccccgctcaccagcatctacttgccccctcgttccttccccagccctttagagaagggaccatgatttggaaacgcagcgccgttctccgcttctacagtgtctgcgggctcctgctacaaggtaatccccgccccggcg

SEQ ID NO: 5203 - DNA, 1153 bp, Homo sapiens
  source 1..1153: mol_type = unassigned DNA
ccgccccctccgtagagaccgctagctgaggctgcaacacctgccccggcaaagcgtctccgcagccttcccggcttgcccgactcggcttcctccgcctctgccccggctgcggcaccacttcttggagccacgtctcggcgagcgggggccgcggagcgagggggccgctgtgccgctactcacccgagccgctcgggctggccgcgagccgggatccgcgagggctggcgggctctggcccccgaggacgcagacatgtggcttgaacctccgctcccctagccgttgcctctgtgcatctttctgggcgcccccagcgaatgcgagcggcgaggcgagggcgagcgcgccgaggaagggcgggagaggcgcggagcttggccgcgccgcgctgcgccgagcgccgggctctccccgcgagctccccgggcccgcgcgcgcgccccccactgcccccgccccccgcgcggcgcgtgccccccaccccccgccgcgcgccctcgcacccgcccggctccacgcggcgcgcgcctgccctggcggcagcggcggcggcggcggcgcgtcctcccccgaacgccgtctccagggctgctggctgcgctctccattgttccgcggctgctgcccggggtgggcggcgaggcgggggggaggtgtcggcttggccgccggggagggcttaccgctcgggcggaccctcactgcgagagcgatgcgggcccaggcgcggcgcgcgggggctgcagggcgcctagcactgggggttgccggcgcgcgggggcctcctcctggctcccaggcactcgctgctgctgggcgcccctcgcatcctcggttactatggatatctcgctcctccgccgccccctccgcgcactccgggaggccgccggggcggtagcagcggcgcggctccgcgggtgcccaggtgaccggctcggcagcggcagagcagtggcagcagccgccactgccgctgttactgcggtcgccgccgctggagagaggaggacgaggagggcaaggggcagaagcaggtcctgctctgtctgccccagaggccacctcgggtttcttctcactaaccaagcgacttcgtgtttacctcgcaggagacgcctcggcagtcctcaacttgtgtgcgccg

SEQ ID NO: 5204 - DNA, 1603 bp, Homo sapiens
  source 1..1603: mol_type = unassigned DNA
gcgatacggtttccttgacgcgcccttaaccaaggcgttaagtttagcctgacagcatccctccctcctttcggttcctggcctgatgagccgcctccacctgcgagcggtgcaggcatttttgttgtcgactaaccccctctagcgccgaactggcggcatccgagccgcggctgccaggccgggagaaggctgggcttggccgggctctgcagcgctccgggctccgtccctgccctgggcgcccgcctccgccgcggggcgaggtggtggagaccgcggacgccgagggtcctcccagtcagcacgccgcgttgccccggccctggggcgggggccgcggagtcccaccaagtggcccgcgcctcggcttccgggagacccgagcgcggggagggagtgggtgccgcgagggggcggctcgcgcggggagagccgtcagcccacggcgcccctgcgctgctgtggatgtggccacgcgccactcggcccttggactgctaggagagcgcggcccgacgccaccacgccgtggacgctcggggacccctgaatcccagcgtcaaggctgcgacgatgctcgtgacctccaccgcgaagtcacctccgcaaggcgacgcaaggacctcggcgatcccgggcgccgtacacccgccactttccagcctcatgtaaccccccctctgctgcttcctcccggcgctttgcttttctacaactggaagccgcgaaggcggctactgcgctgagccgctcgctctgctggtcaagtttgggcgacccgcgcggaggagggtcgggctgactgccgccgctgagctgtccccggacgggagcgcctgtccacggcactcaccccctccagcggtggaaatgtggagaagtaagtgggaggcggtgtcgggaactgactcctcttaaaacggtcggcgccgctgctctgaaatgggcggctaagtgcttgtgggactaagggcggcctcagagatgcccggaaaatcgctgccacggccagagtgcggcgcagacgcggcagagttggaggtgtccgcggtgcaggctgctgcccacgccgctcaggccaggtgctgagggctcagcccgcgcctcggccgaaccactctcagccccgttgagccacctcgtccgcccggctttcatcgcaccggccagaggaaagttcccgcggcccccacgcctcttcacagctgcagcgcctcccctgcttttggctccgcaagtgcccacttgagtcgggagaggtcctcgggccgccccaactgcccgccccacctggcagtccgtccccgcccccgtcctcgcggtgaggcgctccccgccccctcgctcccctcccccaaaccacagcccgagctcgctcttgcgcgcgcgcgctctctccggcccaagtgaatagtcctcgcgcaagcgggacactgtggtggatgcaattcccctcgcctccagccgcgaggagctccccggcgccgcaggcagcgtcctcctccgaagcagctgcacctgcaactgggcagcctggaccctcgtgccctgttcccgggacctcgcgcagggggcgccccgggacaccccctgcgggccg

SEQ ID NO: 5205 - DNA, 1411 bp, Homo sapiens
  source 1..1411: mol_type = unassigned DNA
acgatcagcgctttcggtgcgaggatggaaagaaacttcagaaaaactctcgccagacaacccggcagcacttggccccggaacagagaggagagaaagacctgaccgccgcactcagggccacccgccgcactaagtttgagggttccctctgcctccaggcctctgtcgcccgagctcaggctctcctaggtgcttcagggccgggctgcactcgagccccgaggaggccctgctagcgctagcgcggcggtgataaccgagggaggtgggtgagaggtgcggctgtcgaggcaaacgcagagcacccgcccagtcctccaagggccgagagccgggagtcccgaacgccgcttaagcagctccttgcttcccgcagcccgtccacatccctgcgggatttctggacgccccgcccggggacctagggaggagggagagaggagggagggagtgggcagcctgggcgcacgccaccggtccccgtacgcccggcaccccccgtggcgcggcgagtcaatgggatttgcacactcgaggtgtaacagcattactgcattaattaccatttccatttcacgtccagattgtttacttatctgcgggaaacatatgtcgggagaagttcacattccggattctgctccgctgcccaaggtgcaattccggggaggcggcgaggggggaggggagggcttcagattttttattacaccctctagccttatctgccgctgtaaattatgaggatcctccattgagcggcatatggagattatatacttttttgaatatcgtttcccaaagcctgcagattttcactttgaaatgaaacaatcctccgctggttcccccggggacaggcgtctcctgcgttcccccgcgcggcctgggggacccttctcgcagagcaggcgcgcaccccaatgccgtggccggcgcccagtggagacttctttcacagggtctagaataatcttccgcggaacacccatccatatgcagtgtttgagaactaaggcagctcccttgctctgttttcctgcgcctagcccccggacttttgtgccgtttgcagctctttttcatttcgaatacccgcatagacgcgagcccacttctgccctcttcctacgctgggcggctccaaacccgccgcgagggctgaggtgttcacacctgcccacggcagcctgcctcgccctcaagcgcctcaaagcttcctaagcgcttacattggtcttgggacagccgactttggcttctttgtttgtttgagggaccgcggaagtggcggggaatgtgcccccgcttgagaccgcttattgtgagccctcaacggaaatcctgcacggaaggcaaccgcctccccgctcgcggtaagcaggatccacccgagtagcggggaccg

SEQ ID NO: 5206 - DNA, 2629 bp, Homo sapiens
  source 1..2629: mol_type = unassigned DNA
ccgccggggcccggaggtgcccgaagcgacgggactgatagcggaggaaacgcagcctccctccgcgcccgcccgcggtgtaaaccgagtacaggccgtggagccaggctgccccggctcccgctgggtcccaacccccgccccgcctagtgggccccgcggcaagcggcttctgaacagcttcaagagggttcgcggagcaaacacacgtattggtccgtccctttctcgggcagcgcggtcccgccatcagtcctgtccggcgcgtctagccatggactgcacggcagtcgggcggggaacgcggagagcgagcgcaccgacctgtgagagaaggccaagaggtctgcgctgccgacgcccggtcgcacctccgccccgggccctttccgcggtgaatttgggcaggagacgctggggctccggaaagagacgagcccagtagaaagcgcgcagagaggcagcttcaggccaggggagtgcaaggtcacagaggtcagggaggtgagcacaggaggacataaactgaggggacaaagaggagcgacaggagcttaggaaagcgaaaaagcacagagggaccctgggcgctggctccagaggcgggcccagagggtgtgaggtcaggctggcggcggcgtcgtcggctgcgaccggggccggcgtcgcgcgtccctgcatcctcgcatccgtctgcaccggcatgcggtgggctctcagagatcgaggcgcgaatgcagcgcgccggtcttgctgtcgtggtcccagtaagagcaatgcatcatggcgagctcgggctgccgggcacaagcgaactgcaggcccggcgcactggtgggcgcgggcgccgggggcgcggcggtggctgggctggcagggctgagctggcccggcggcggcgcggcggccccgtggtgcggtggggcaggcggcggtgcggcggccgcgtgcagatggtgtgcgtgcggatgcgggtgggggtgcggcggaggcgggggtgcggccggcgggcctcccaggccattgtacgagttcactacgccggggggcagcgccatgctctgcacgcgtgtgtacggcccgtacgaggcggccgggcccgccagccccttgaccacagcggccgcgccagggctaccggggcccgcggctgcagccgcagctgctgcagccgctgcggctgccgccatctggcaggaggcatagggcatgggtgagggaggctgcggtagcggccacgagttgttgaggaagccagactgcaggtacttggggggcgccaggtagccgtagccgtcggccccggcgcccgccacgccgcacccgcctgcggcgcctccggccccgaagagccccttgccgggctggaagtgcgcgggcggcggccggaagggcctcttcatgcggcggcggcgccggtagttgcccttctcgaacatgtcttcgcaggccgggtccagcgtccagtagttgcccttgcgctcgccgccgccctcgcgcggcaccttgatgaagcactcgttgaggctgaggttgtggcggatgctattttgccagcccttcttattcttctcgtagaacgggaacttcgcgatgatgtactggtagatgccggacagcgtgagcctcttctccgcgctctcgcggatcgccatggcgatgagcgccacgtacgagtacgggggcttctgcgccgggtccggcttctccggggctgtcccgccgccacccccaccgcccttgcctgggctcggcggcggcccttctggctccttgactgtgcgaccggtctctggggccagcagggcccccgccgcgtcctcgggctcggggtagctggccatcatgacaaagccggcgcgccgcggccgggccgcctctgctctccgctccaggcgctggcgcggcaaagagttggggcgcacgagtccgcttacggccaagtctcaaacttctggagactgcggatgccgcccgcgcttgcttgctggaggcctgtcgctgctctcccctctccttccccttcccctagggagcggccggcgggagtggagctcagcctctggccatggggagtccgcccaacagagaggggctccggcctcgccgcccctccccgctcaggccagtccccgccttggtgggttttcttttctgcgctcttcccctccccccgccccccggtttcccgaagcacgacccgcgtctctggcggagctgcctcctggagtccctagtgcgccaggagcctcgctctgttctgattcgtatgggctccaccgagttccgcttgcgtcaggcgccttcgcccctatagcggggcggccagccgcgcacgggcgagttcatctccaagtcactttttgtaaacgccccgcacagcctggaccggcctgcccccgcccagcgagcctcaggggcccagccgacagccaggctcacgcgcccttgaaatctgccggtactcgctctgcgggctgggctgggagatgacgaggaccccggtggggtctgcccgcacccggccaaagcccaggaagctcgggccccagcgaggaaaggcgctccaagcctcctcgcggctttcaggtgaaagaaaacgactcctttgctctgccgtttgctgccg

SEQ ID NO: 5207 - DNA, 1686 bp, Homo sapiens
  source 1..1686: mol_type = unassigned DNA
ccgcggctgcccctgcttctcggagatgacgcggagccctgccattgccatccaggtccaaggctatctactctgcccgacaacccctagcaccactaggcgctgctctagtgtgcgcctggcgccctccccagaccagtcgacgcagaacgcccagagacccagccaagggcaagacccttagcgacgcccgtcagtcctctccgcccagatatcagttcaaagggcatggcaggtcagggtccctcgcgccaccccagatgaccctcaggcctcgggtggccactttctgggggagccctccatcccttgcggcagcttttccgagagtcggagtggaggcgcggggctggagggctctccggagccgcccaccagggtcctctgggggcccggtcccgactgggcagggggacctggacagggccccggagcgtggagacggctgaggaaagttgggggtcggggccttggggcggggagcgcggaacccggcgccgatgcccgcgttcatgaatatgcacgagccacctccctccctccgtgacgtcacgggccgtcccggggtgagcgcctgagccgctccgggtccgcgccagtgagcgcggctgctgccggcgagctagcggcgcagcggcgggaacccgaggccgagcgccgcggcggcagcgctagaagcgcacccatcgggcacggcgaggcggcccacggtgcggcaggcaccgggaggcgagagccggcgcggacagtaggcggcggctgcagctcgttggcggctgctgcgaggatgctgcctgggcggctgtgctgggtgccgctcctgctggcgctgggcgtggggagcggcagcggcggtggcggggacagccggcagcgccgcctcctcgcggctaaaggtgggtgctggggaagtttgctcttctcccaggagggaggcagggcaggcttgagggtgaaagcggcaaggacctaggctcaagctggatttgcccaccctcccttgccgcagcttctttggcctctgtgcgccctggattcccgaagtcagttccctgcgcagcggaccagagaggtccacccgcggacgtcaactcaacccctgggcggggtccgggggctgagcagaaggcgaggtctggggagtacggacaactttgagggctgtctgtgccggggtgggagcgcagtgggtgagtttcgagctctggcccagggacggctagagcagggcgctggcgcgccgtggggacaagcaggtgtctgctcctgcctgggggaaggatcagcggcggtgctttcaaggagggagccgagctgtgacttgtctcccagctcggggatggagtggaaacttgtaggctccagggaaggccccgctgacactcctcaagctcccccagggcgtctctgactccccggggaacgtgtaccctccgggtaggcggcggggtccggaagaagcgcgggatgtgaggctccccgctgcctttcctactccgctctgactaccgaggaccgaggagcctaacctggcaccactcccctgcccaccctgttcctttgaagagcttgacctccccgcgcctcccgcccggaaggaagctagatccaagcgaacgcctggctctgtcaggcgagcctggaagccggcgaaccccggactttgacagctgcctgggagcgtcg

SEQ ID NO: 5208 - DNA, 1686 bp, Homo sapiens; identical to SEQ ID NO: 5207
  source 1..1686: mol_type = unassigned DNA

SEQ ID NO: 5209 - DNA, 2132 bp, Homo sapiens
  source 1..2132: mol_type = unassigned DNA
ccgagaaagtgggtgcggcaggcggcgcctggaggaactggcgcaggccctcttctacgtagtacacctggtcgtagatgctgaggaaggtgaagatgtggaagagctggtggctgtggccgataatgtcgaaaagacccggctggatgcgctcggggatcttgctcacgttgaagaaggcggccaccaccagccagaagtagcggcggtagaagtgcacgaagagtgtggggttctccccacgcaggtcgaagagccagctctcgagcataatggggcaggccatgctgagcggcatgacgaagacgaaggtgcgcagcgcgaacgggtaggtacaccagtcggtacggctcttgcagcaggccacagtgcaagccaccgccagcacgaaggccacaggcagcaccagggcgcggtaggcggcgataaggcgcgtgcagtccacgtgccagcccaggcgctgctgcaagtatggagtcatgactctggcatccagcaagctgaggcctggcaacaggtagtagtagtaggccaccgtgctgccgaagccgtagtagctgatggacgcgtagtccaggtagaagaaggcggcgcgcagacgcagcgacaggcagctgaacacgtgcgccgtgcagctcatggcgaaggtcagcagcactcccgacgcgtagcaccacaacggtagcagccacgggtggtggaagggcacgtcgccgccgctcaggaagaacagacggcagaacttgctcaggaacagcagcagcgggatgaagtgcgtccagaagttgagcgtctcgttggtaggcttcagcaccgaggctaggcactcctgggccgtgcacggcagacgccggtagcccgacaggatgaagcactccacgaagtcgtcgggcacctcgtcccagcgcagcagcggcttggcagacgctggggggtcccgggaggcggcagagtgggagttccgggcggcccccgaagctgccggggccggggccggagggccttttgtgcccgcgccccggggctgcaggcgccgcggcatggtgcccggggctcggctagggcgcgcgcaggcgacctctggcgccggctcccgggcgctgggcagcccccgccggccgccgtcggagcctttgtgcccacgccgggggcgtcgctgcaggtttaggagaagacccgtgcctccgagcagccgctcctaaaaattaaataaatcaataagagaatcaattaataggcagcgctgcgaccgccaggagcgcggagcgcgcgaggctcagcggcttcctcgccaagcccctgctaccggcgcgcggccgcccgcgctgcggcagcggcggcggcgcggctgactgcggcggcagcgcggcagcggtgactgggcatcgcgcggtgcgggtgcctccgccgccgccgcccccggagcgggaggtggggatgtgcgagccgaggcgcggagggagggacgggcgcaccgaggaagggcgggggcctcccaggctagggtttcgcggccgcttcgggggatagagttgtcccctgtctcgagttccgtaccatccccctcctcgggccgccgcagcccgggccgccccgttaatgattgatgcgggggccgcaggctggtcggcgacgcggcggcgcgcgcgccgagtactagagtcggccctggggttcgaaacccgacagccacgcgggcgttctggaggacactggggagccgcgttcgcggggggcggggagctgcggctgcggggggaggggagggcgccggagccgggcagggcggagagatgcgccagcggtaatctccggaggtcgccggggaggggggcactccggaagtcggggggctttaagcccgcgtccggatcggggccgtgtcattgtcagctacctggggatgcgcctctcgctccctcactgtctttgcgtgtgtgttagtgtgtgtgtgtgtgtgtgtgtgtgtgtgtcggcctgtctacgcactacacgaaggcttagttggtcttctttcgtctagtgggcgcactcaggtgcgtcaccattctgccgtttccctcgcccttgtcctgtccgaaagaaccgtccgcaagctgccctgtggtcgcgctcaccagctcttcgagccg

SEQ ID NO: 5210 - DNA, 2954 bp, Homo sapiens
  source 1..2954: mol_type = unassigned DNA
acgtcaatcacagtggacgcagcaccgcgagcggaaatgcggagagcatcggggctccgcatgtggggcacaatgaaacaagagcagccccggccagaggtccagtaaagcggaaagacggtcccgcccgcacacccctccggaaaactgaagcgtctcctctgacccccaaggtcagaaagatttattacttccttcgagagggcgcagccacagacccactagagagggcgggcagggtgtcggaagccagagaacggcgctccgcgtcctcccaccgctccagggcgcagaggtgtcctcagtgcccggagaggttggcagtgtcggccccgagggaagcgtggagcggacggccgacaggggatttctgcccaaacttcatcaccaactctttctgagagcaaaaacatggggccgagtccggcagctgcacgcagaatccaactctctggcagctctcggcaccgacgagctccagatcccgcgttcgcatcccggcgctttgcgcgcagagctaagccttcggacccgtggactgcagcccccgcgcgtcgcggtaaagcgggtcgcgtctccagcccccgaggcgcagcgacggtgggagccggctcggcgttgggggcgggggcggggccggcgaagggggagggctgcgcggcggaggggaggagccgcggcgacagacggcggcgcgcaccaaccgggcgccggctggcaggagccgcgcagaggctggtccgagcgcgttgcgggcgcccggcgtaaggggagtcgggtagcagcatcctcctgggcgccgctttcgcgcggcggcggcggctgcggcggggtctttctttgcttaaatacctcgttggccagaagcgctggtaccgggggcgggttgggtcgggtcgggcagtgctgcacacctgggtttccttgcctagagctgtgtgttcggggtcctttggtccagtcggaggctgcggagcggcgggggttgcctgcgctgtccgcccgggcatcctcccggtgatggaagcagccgccgccgccgctgcggggtcgcgctgtgccccatccaccgctgccagagaggtgggaaaattcgccgcacggaggccgaaagcgagaggggctgcgccgctatgccgggagctgagtcccatataagccgcccccagccatcgcccccagccggcttcgttcccctgagcgagacaggaagctgcggtcccgagaaagcggaggagacgtcgctggagccgggaggcgccgggttcggcggagcgcggagcggggctctgggccgcgtgaaagtttttcttcccgagccgcagggcgcccgctgcccggaaactgcccagggataagtcggccgactccccagacccctcgaaggtgcggggacccccagcggaagcgagagggagcgaaatcgaggaacgagtgacagccggacagtccgccgggcggtgatccggggccgctcccgggcgcgccctcggctccaggtgagcggaggaaccgggcagaaccgagggtgggcgttacttaggaggaggaggctgggagggagattggggcgcatccgctcactccgcttcccctcgcaggtcctacccggagccgctgccatgggagagccagccttgggcgctggggaccagccgccgcgcccgcctcggagtcgcggcccgagtcccggcgccagcagccagcccgctgcgtccccttcccgggctgcagggctgcctccgccgcgccgccggcccggattgtgcctgtgatgagccgcagcccgcagcgagctctgcccccgggcgcgctccctcggctgctccaggctgcgcctgcagccgcgccgcgtgccctgctcccgcagtggccccggcgcccaggacgccgctggcccgcgtcccctctcggaatgaaggtgttccgtaggaaggcgctggtgttgtgcgcgggctatgcactgctgctggtgctcactatgctcaacctcctggactacaagtggcacaaggagccgctgcagcagtgcaaccccgatgggccgctgggtgccgcagcgggggcagccggaggcagctgggggcgcccagggccgcctccggccgggccgccccgtgctcatgcccgtttggacctccgcactccttaccgccctcccgctgccgccgtcggggcggctcctgcagccgcggcagggatggcgggggttgcggcccctccaggcaatggcactcggggcaccgggggcgtcggggacaagcggcagctggtgtacgtgttcaccacgtggcgctctggctcgtcgttcttcggcgagctattcaaccagaatcccgaggtgttctttctctacgagccagtgtggcatgtatggcaaaaactgtatccgggggacgccgtttccctgcagggggcagcgcgggacatgctgagcgctctttaccgctgcgacctctctgtcttccagttgtatagccccgcgggcagcggggggcgcaacctcaccacgctgggcatcttcggcgcagccaccaacaaggtggtgtgctcgtcaccactctgccccgcctaccgcaaggaggtcgtggggttggtggacgaccgcgtgtgcaagaagtgcccgccacagcgcctggcgcgtttcgaggaggagtgccgcaagtaccgcacactagtcataaagggtgtgcgcgtcttcgacgtggcggtcttggcgccactgctgcgagacccggccctggacctcaaggtcatccacttggtgcgtgatccccgcgcggtggcgagttcacggatccgctcgcgccacggcctcatccgtgagagcctacaggtggtgcgcagccgagacccgcgagctcaccgcatgcccttcttggaggccgcgggccacaagcttggcgccaagaaggagggcgtgggcggccccgcagactaccacgctctgggcg

SEQ ID NO: 5211 - DNA, 2954 bp, Homo sapiens; identical to SEQ ID NO: 5210
  source 1..2954: mol_type = unassigned DNA

SEQ ID NO: 5212 - DNA, 885 bp, Homo sapiens
  source 1..885: mol_type = unassigned DNA
gcgcacgcctgcgtgcccattctccagagttcctggcctcgcgatcgtgcactgatttccttcagaaccccaggcccgctctggacgtggaaggcagccgtgccgtctgggaaagtggagccgagcccgggacgctgtcggcctaaatggaacgccggccccggggcccgctccccggcgggttcccgagctaaatcctccaactgttccatgacgtcatcgggccccctccccctgctccggcccgcgcggccccagcgtggcgctaaggagtgtggcggtccccgcgcgcaccgtgggccatccctaacccaggacctggctagcaggctgccctccgagccgaggctgcgctgggcggaaccagggatttatagcccggagtggggctgaaacagagctcctggcccgagcagagagcgtgcacacgcatgaaatcgtgctcctgggtgcgccggcggccaggtgcccgatgtcggtcttggaagcagcgccggagtccgtctgaacccaggcccgggaggccagaggctgccggccacgttcaactgtgtcccccttgggaagacaatccccccagttctggtttcttcctgagccacgggtggttggttggtttggtggaaggcaggtgcacaggtaacagagacaaggttaggaggcaaagcacatttatgtgcaaatgagacgcgctagggaacttgtaatcctctgcacccccgcccttgatgtctcgatccctacaatcacagaattctaggcagaggccgccgacttctccgccctcgccaagagggacccggagcaccgaagcttcccagccggtgccggcgtttccgcgccctccttctctcctgcgccgtgacctcaaaagggcggcgggcg

SEQ ID NO: 5213 - DNA, 2174 bp, Homo sapiens
  source 1..2174: mol_type = unassigned DNA
ccgcctcaccggcctcttgcggccgctgcagaagcgcactttgctgaacaccccgaggacgtgcctctcgcacagggagcgcccgtctttgctggggctggagcggcgcttggaggccgacactcggtcgctgttggactccctcgcctgccgcttctgccggatcaaggagctggctatcgccgcagccatagctgctcagcgagggcctcaggccccagcctctactgcgccctccggcttgcgctccgccggggcgagggcaggacctgggcggccagggaaagggcagtcgcggggaggcagtgctaaaatttgaggaggctgcagtatcgaaaacccggcgctcacaaggttagtcaaagtctgggcagtggcgacaaaatgtgtgaaaatccagatgtaaacttccccaacctctggcggccggggggcggggcggggcggtcccaggccctcttgcgaagtagacgtttgcaccccaaacttgcaccccaaggcgatcggcgtccaaggggcagtggggagtttagtcacactgcgttcggggtaccaagtggaaggggaagaacgatgcccaaaataacaagacgtgcctctgttggagaggcgcaagcgttgtaaggtgtccaaagtatacctacacatacatacatagaaaacccgtttacaaagcagagtctggacccaggcgggtagcgcgcccccggtagaaaatactaaaaagtgaataaaacgttcctttagaaaacaagccaccaaccgcacgagagaaggagaggaaggcagcaatttaactccctgcggcccgcggttctgaagattaggaggtccgtcccagcagggtgaggtctacagaatgcatcgcgccggctgcggctttccaggggccggccacccgagttctggaattccgagaggcgcgaagtgggagcggttacccggagtctgggtaggggcgcggggcgggggcagctgtttccagctgcggtgagagcaactcccggccagcagcactgcaaagagagcgggaggcgagggaggggggagggcgcgagggagggagggagatcctcgagggccaagcacccctcggggagaaaccagcgagaggcgatctgcggggtcccaagagtgggcgctctttctctttccgcttgctttccggcacgagacgggcacagttggtgattatttagggaatcctaaatctggaatgactcagtagtttaaataagccccctcaaaaggcagcgatgccgaaggtgtcctctccagctcggcgcccacacgcctttaactggagctccccgccatggtccacccggggccgccgcaccgagctggtctccgcacaggctcagagggagcgagggaagggagggaaggaaggggcgccctggcgggctcgggatcaggtcatcgccgcgctgctgcccgtgccccctaggctcgcgcgccccggcagtcagcagctcacaggcagcagatcagatggggattacccgccggacgcaaggccgatcactcagtcccgcgccgcccatcccggccgaggaaggaagtgacccgcgcgctgcgaatacccgcgcgtccgctcgggtggggcgggggctggctgcaggcgatgttggctcgcggcggctgaggctcctggccggagctgcccaccatggtctggcgccaggggcgcaggcggggcccctaggcctcctggggctacctcgcgaggcagccgagggcgcaacccgggcgcttggggccggaggcggaatcaggggccggggccaggaggcaggtgcaggcggctgccaactcgcccaacttgctgcgcgggtggccgctcagagccgcgggcttgcggggcgccccccgccgccgcgccgccgcctccccaggcccgggagggggcgctcagggtggagtcccattcatgggctgaggctctgggcgcgcggagccgccgccgcccctccggctggctcagctggagtgctagctccgcaggaaactcggggcccgggcgagagccaccgagatggcaggtgggacgcagagcccgcggcagccagagttcctcccgcacggcccgccgacccacggaagagcgaaagagcgcccaggtggggccgagctgggggccgggcccctggagcgctgggaagcacagcgcg

SEQ ID NO: 5214 - DNA, 873 bp, Homo sapiens
  source 1..873: mol_type = unassigned DNA
ccggagagctgccaccgaccccctcaacgtcccaagccccagctctgtcgcccgcgttccttcctcttcctgggccacaatcttggctttcccgggccggcttcacgcagttgcgcaggagcccgcgggggaagacctctcgtggggacctcgagcacgacgtgcgaccctaaatccccacatctcctctgccgcctcgcaggccacatgcaccgggagccgggcggggcaggcgcggcccgcaaggacccccgcgatggagacgcaacactgccgcgactgcacttggggcagccccgccgcgtcccagccgcctcccggcaggaagcgtaggtgtgtgagccgacccggagcgagccgcgccctcgggccagcgtgggcagggcgccgcagcctgcgcagccccgaggaccccgcgtcgctctcccgagccagggttctcaggagcgggccgcgcaggagacgttagagggggttgttagcggctgttgggagaacgggtcacggaaacagtcccttccaaagccggggccatcgtggggtgggcgagtccgccctcccaggccgggggcgcggaccagaggggacgtgtgcagacggccgcggtcagccccacctcgcccgggcggagacgcacagctggagctggagggccgtcgcccgttgggccctcaggggcctgaacgcccaggggtcgcggcgagtccacccggagcgagtcaggtgagcaggtcgccatggcgatgcggccccggagagcgcacgcctgccgcggtcggcatggaaacgctcccgctaggtccgggggcgccgctgattggccgattcaacagacgcgggtgggcagctcagccgcatcgctaagcccggccg

SEQ ID NO: 5215 - DNA, 2174 bp, Homo sapiens; identical to SEQ ID NO: 5213
  source 1..2174: mol_type = unassigned DNA

SEQ ID NO: 5216 - DNA, 510 bp, Homo sapiens
  source 1..510: mol_type = unassigned DNA
gcgggcacctcgcacgccacgcaggcgttttcccgatgagctcctcctcaccccacagcccagggaaggtgcggggctgcgggcgcagagctgcacaagtagggctgcaggctgggccaaagccgccttgcggggaccgacatgaacccgggtccctcaccggaagggaccaaggactgagggctgagcggcggcagcggagactccgttcgcagactccgtcccgccgccgccatttcccgccggttcggatgaggcctccccagccttgggacgccctgcccccacactcaccatttccccacttcaggggtgtagcggagtctcagctacgaatcatccaatacccgcaggtcacagagcgacggaggctgaggctgtgaccgaatcaccgacgcctccctgaggggtgaaagcacggccgtggagaccctaaccgagctcacgctggcgcaaaaggcaaaagccgcgccagatcccggatgccgccccctcctctccggctgcgcg

SEQ ID NO: 5217 - DNA, 511 bp, Homo sapiens
  source 1..511: mol_type = unassigned DNA
ccggagcctggggtcgggccctccttacctgcgtgctgctctcgggccccgccccgctccgccccggagggatcctcaggccgggcccagacctaggagccacctggggatcccggggtggctgcgcgccgagggggcgccagcggggacgtgagctggcgccgagacagcctcggccccccagcgccagggccactgccaggagacccccggccagcacccacgtggggcgcccccgggagcccgaggggtccatcgcctgtcgggacccgctacctcaaagcggcgggtgccgccgagtcgctggagcttccggaccccaggcccgccccgccgccgagcatgctcagtgcgagccgccgccgaaagttttctggaacaaacacccgcatctggggcttggcgggccaggaggtgccggacgggcgtgggagggggagagcgagttggcgcggcccaggcgcccggcggccaggcctgggtttgcttgcgcccaaaccgaatcagagcg

SEQ ID NO: 5218 - DNA, 417 bp, Homo sapiens
  source 1..417: mol_type = unassigned DNA
ccgcgtcgccgccctggcggggacggtgcagcaggcggcgggatgcggcggggcggcagcctgagcgccccggatggcccgcggcggggcggcctgcaagagcgacgcgcggctgctgctggggcgggacgcgctgcggccggcgcccgccctgctggcccccgccgtgctgctgggcgccgcgctcggcctcggcctcggcctttggcttggctgccgcgcgggccgccagcgcacgcgacaccaggtgggtcggccgagcagacagcggcggggcggggagcgcggggcgcgtggcttctgggtcctgcgggcccggagccccggctctgcgactccttgagcctggttgggaacttcgcacgcaaccgcttaggcgtcgggttccccttctgctccaggagggaggtggcggcg

SEQ ID NO: 5219 - DNA, 1748 bp, Homo sapiens
  source 1..1748: mol_type = unassigned DNA
acggaaatatccgaatcggtgaaatgtaaatcgtgtctactgcataagggaatcgtgcagggagagccgctctctataaggagttaaccagcgcctgccccggacacccccgcggggcctccagcggggctcaaactggcggcggctcagcagggggcgaggggtgctgggaaacgccggggctgcgaacttacggaagaaaatgtactcggtgtagctgctccagatcttgtcgtcgcggtactggttgacgaaggcggcggtgcccgaggagttacacgccaccatgtggaagccggcctcggacaggcgatcaaaggcctgctccaagtaggtgaacttgaggtagaagcgggacgtgtacttctccggctgccggtcggggtcgcggctctcgttgagcgtgtccccgaagacctccttggccagcgcgatgcgcccgcacaccatgatgcgcgccacacgccggaatttggcgtcggcctggttgtcgcgcacggtggtgtaggagccccggtagcccagcgtgaggaagcccgagcgcttgtcctgcgcgccgccgccgccgccaccaccgtgcgctcccgggcccgagggcacggcggccgccgccccgcgcagcagcagcgcgtcgctgctaccctgcgagacgttgtcctccaggtcgctctggcagccctcgtcgttgagagagttctgcttggtgaccttgggcgacagcagcttgaccaagtcggtgagctggaaatactcggcctcgcgcagcagccgctccttctcggggaagtgctccggcagcgcgagttgcttgtcccgcagataatccagcacgtacctgaaaaggaagccgtcccggtcgatgaagaagcgcgcccggctgtccctgggcagctcgccccggcgccgggcgccgccacggggactagagggcgagaacatgctggccaaagtactgtccgggacgctgagcagcgtcgagtgcttggtcacataaacctggccgcctacgttcagctccactacttcagggaagggcgagggtgcgcagggccccggggcggcggcggccgacgcgccgggcgagctggacgaggaaaccatctcgctaatgggcaggatggtgctgccgccgctgcccgtgtccttcagagccatagtccccccgccgccggcccagtgacccgagagagctgcactttctcgttcccggagcccgcgccccagccctccgcgtgctcctggcgctctgcgccctcggactgggcggcgcgttcctccgaccggggcggccccgctcagggttcggggcagcggcggcgtcggcggcgcccgagctccatcggaggagagacgcgcgagagaggagctccgccggtgcggcggcggcaatggagaggcaagaaggagctgctgctcctttggggcgagggcggggaagtgtgagagagacttgcgagaggctctagggctgctgctcggctctccgtggggagggcgggaggaggggccgaagcaaagaaaactcgccgccccggcagcttgcaagcgtgccgcgaggccggagcgccgacggtggcgctaactactcctggcagcacgggaggaggcactgacgtcaagccccggactgggacccgagcctcagctgtcatttaaagagataggctgcagccgcggctcccgggctccgacgctagggggcggggccgagagccgagcctgcaagaggtgcagctccccgacccgcg

SEQ ID NO: 5220 - DNA, 1748 bp, Homo sapiens; identical to SEQ ID NO: 5219
  source 1..1748: mol_type = unassigned DNA

SEQ ID NO: 5221 - DNA, 648 bp, Homo sapiens
  source 1..648: mol_type = unassigned DNA
acgaaacgctgccacaccgagcgaatgcaacgcgtacacacgtccacactcgaacagcacaagcaagagaccggctgggtgtggaatagaggcgcacatcgcgcaacgcattcacagcatgcacacgcgcgcaccccgaccccgtccctccccgcgcgccctcacaccccggcgcccaagacccccggcccacgaacctcaccagacagccgggtaactttccaggtgcgcagcttgtcacctcggcgcggccgcccctgcgtctcagcgtcctctcccacgccgccctccccagccgcctgcggcgccggagcccagcgcaggtcagctcagccagccccgccgtgcacacggtgcgcagcgtgggcccggggctgccggctcagtcgctccggctacgtgtgagccgggggcgcgggttagcgcgatgcgggcaggagctgcggcggcgtcggtgctgccgcctggctccgcggcgggggccggtgcagaggagacacgcagggagggagggaagagaggagggaaggaggagggagggggtcagccggggctactgcctggatagttgggcgccggcttccctaaaggtggggtcacccgcgcccgcacgcacactagcccgaacctttactcccgacacagccg

SEQ ID NO: 5222 - DNA, 863 bp, Homo sapiens
  source 1..863: mol_type = unassigned DNA
gcgcacaggaagggcggaggcggcacccgggggggactgtccccagaggaggccgctgtgagccggcgacgcgaggctgggggagtgggaggcaaacccgctaacctgtcgtcgaatggccactcccagttctccgctcacgagggtggaaaggcagaaggcttgaaggcaaggcgtgagggagcgcccaggacgctctcggaggggccgggccggggtctgcgctgcagcccgcacgcacctcacttccgcgtcgcggcgctcggtcgctcgccccctctcttgggccccttctggtcgtcgccgtcctcctcctcctagtcctcctccttctccttctcctcggctctccgcccccaccgctgatttgtcagcgcttctgcccgcccctctcccggcgctcgctgctttccctgcagcgtgctcctcgtccctatctcggatggggatggggcagggggcgcggggtgagccatcaactccagccgcctgcctggccgcgcaaggcgggaaagtgggggcgcttttgcgcctcacgttaagtttagggtcacgagcactcttgtggagatcgggagcggttgggctagggatgatgcctcttcctctttccccttcccctcccttcttgtccccgcctttcctctgggtcctcccggggaccaccccctacccctcgtcagagtcgccctgggagagccgagggcctgagggtcgaccaccaagggcagagcctatcccttggggagctgctggaggagacaggcagcgccgggaggtggctcacaccgcaccgccgagagcgctttgccctcgcatcgctgaaatttaatcacggtcacaggttacaacgttaggggtcg

SEQ ID NO: 5223 - DNA, 1288 bp, Homo sapiens
  source 1..1288: mol_type = unassigned DNA
gcggattcgagagcggcgatcctcgcctggaggtcgttggttttcacacccaggtacaggcaagacaccacggccaccactgacaggagggccgccaggacggcacacgggggcatggtccgggcacaatgctgttcggcaggggtcgggtcctcggatctgggctcccggccccctcctttccctgcgtgcttcttcagcagcatcgtggcggggtcggccgtctcggcttcgcttcccaccctctacacctcaaataatcctaaaaggaaagaaaaaggtcgattcctccaaagttcagtccctgtggctgcacaactagttggtggagtcaagcccacgagcggatacggacccctgccttgctcagcgtccagacccgcaggcgtgcaccatccccgctttcttctctcctcccagctggaagtgaaaagcaccctccgtccggggactgggtggcggtggggtaaaaagcaagacgaaacccacccagacagctcttccgactcccagaggaccgacacctctttcgagggccccaacagtggccgctcagggtccgagggcaacggccgaggcgccacgcggggccgcggctcgccctggccacggaggaccggacctgttgcgcctctgtgagtttgccttatttctacctactcggtgtctttcggcacgccgacctgtttcccacctgcattcagttcaaggcaaaaaggctgtgagagcacgctacagcgcagcgcgaaaggggcgactaaggtggagaagagagaggaaaacgaaataaacccaaggaaccaatgctactcgcgaagccgaagtcgcggctgcccgaaggatctccgcagccccgcgtgcgcgatccttaaatacccttcgcgatgctcgcgtgagtgtgtgtgtgagtgtgtgagtgcgcgcgcgctccgagcacgacgtccctcccccgaccccctcccggcgcccggcgtccggcctgccgctcccgctgctgcgcgccccccttccgaaggcaaagcaggagcccgccttattatcataatgtattcaccttggcccagcccgcgggccggcccggggaacccccaagggaggcgggaagcttgggtgggagcggggcaggaggtctgttattagcataatgtatgcaaatagctggagcggccaccgtgattggagaggagcctggcgacccctccccctgcgcggagtaacttcagcatctccgagggccacctctctggcctgggccggggccgaagcggggtcggctgcgcaagaggcg

SEQ ID NO: 5224 - DNA, 1275 bp, Homo sapiens
  source 1..1275: mol_type = unassigned DNA
acgcggagcaaaacttaatcggtccagggaacccagacacgtcttccgcgccgcacggacttcccagaaggagcctggaggcaggcgctggatccctctaggcacctccgtccccgccggctcccctcccccgcgcccgctgggccactcacccgcgtggggcatggtgatggtctcgttggtgttggagcccacgttgaagatgaccacggctgaggcgttctgcaggaacgcgttccggatcttatccctgtacgtgcagttgcccttggggatgagggctatccagttcttgccgcgggtcggggcggcgaacttggtgttggggtcgcaggccaggcggtcgtgggccgagctggccatgaccacctccccgcgggcgtcctgcttgggcgagtgctctccgtagcgcccgcactccgtcttctccgtgtgcagctccgcgccgccgccgcccgccgccccggccccggggtccggcgcgggctcggcgtaggtgatgttcacgaaggcggtgtaccattcctccttctcggccacggtaaagtccaggcagagcagatgcacgaaacaaaaggaaagcagccatgttgagagagccagactgcagcacgcttggatgagagacattgccatctttatccgccggggccccctccccgcccccgcgccctccctccgtcccgtccctcctccccagccccggccaaccccgggccgctgcctctcctcctgctgctgctcactcccgggccggaggggccgcggccgggacgcgcagccgccgcggggaccggattccgggcgagcggatggcgctggccccttcccctctcagctgtagcgcggtggttgcattttgcttcttgggcgcccggggggcgcgggaacagagggcccgcggggcttgcggaggagtcctgctgccgagcgtcctgctccttcgcccggcttcgccttctctcataagggtggccgggggcccacgaacttgcagggtggcggccctgcgccctccagccccggcggggacgggcacgattgctcgtagtctggggtgctgcggtgcggggtgctgcccagggtgtcccggccgccgccactgagcgctggggcgcgcgaatccagctgcagccgctgctgccctgcgccggttccctcaggctgcgggcgctgcgctcctgatctcgccggtggctgcgcctgggcacgcacttgccgcgggcggggcgggcttggggacagtgggagcgagcaggcagagcggagtaagcg

SEQ ID NO: 5225 - DNA, 1071 bp, Homo sapiens
  source 1..1071: mol_type = unassigned DNA
gcgagcggtggctcgaccccgggtgtggcaggaaggggtgccccgcgttccagagccagtgccagtccctatcctcccgggaagccgagactcagggggaacaggtttcccagagcccagcctgcagggacgcggagggcaggagccgccggcgaggagcagccaacttgccatctctggcggctgcacttctcggcggctacaggttgcccgacagcggactccagggtccccgcgacggcacccagagtgctcagaagggaggccggggccggggtgggccgggaaaaccgagggagggaaggagcctggagaagctccgtttaggcggggagggggcgacccggggcgcatctcccgaccatgacccccacagaccttggcgccgcaacctgcgcttcttgaggccgaagatgcgcactttggagaagatatccaccaggttgccgttgcagagcccgcggttcttgctggggctgctccgcctcctgctggcagacggccggtcccagtgctgctcccgcgcctgccgcttctggcggatcaagccgctagcgatggccgcggccatggtggccccgggaacgggtccggggagggagggcgcgggaggacggcgagccgggggcaccggaggggaaggcggcggcgcagaccgtggctcgccctcggggcagaggagggggtgccaggcgggactggggagaggggaaggggggctcagtcctgaccgggacccatcgccctctccgcggggcgcggggccaggcgcgcagatgcgcccagggcgcagccggacgatcccgggaagccggacgtcgtggccgccgccgcttggccacgtccgagtggagagcgggaccgcggctgcgggcgctgctggtcaccgctcgtcgcaggaaccccggcgggggtcgccaccgccactcgcgctgccttctcgccctgcccggctcccgggcgggaggtagagccggccggcggctccccgggcgccggctggagggcgggtcccggcagggtctctgcgcgtccgtcggtccgggtcgcgctgggcaggactcagcgccg

SEQ ID NO: 5226 - DNA, 694 bp, Homo sapiens
  source 1..694: mol_type = unassigned DNA
acgttcccgaaccccggaccttagctgtcatttcacctgcgtcgtcccggacgccatttggctgttgacgtggttccgagccagcaaataacgccagcagccctcccagatccacgccggcccgtctctccgccggccccctcctcgcagtggtttctcctgcagctcccctgggctccgcggccagtagtgcagcccgtggagccgcggctttgcccgtctcctctgggtggccccagtgcgcgggctgacactcattcagccggggaaggtgaggcgagtagaggctggtgcggaacttgccgcccccagcagcgccggcgggctaagcccagggccgggcagacaaaagaggccgcccgcgtaggaaggcacggccggcggcggcggagcgcagcgatggccgggcgagggggcagcgcgctgctggctctgtgcggggcactggctgcctgcgggtggctcctgggcgccgaagcccaggagcccggggcgcccgcggcgggcatgaggcggcgccggcggctgcagcaagaggacggcatctccttcgagtaccaccgctaccccgagctgcgcgaggcgctcgtgtccgtgtggctgcagtgcaccgccatcagcaggatttacacggtggggcgcagcttcgagggccgggagctcctggtcatcgagctgtccgacaaccctggcg

SEQ ID NO: 5227 - DNA, 694 bp, Homo sapiens; identical to SEQ ID NO: 5226
  source 1..694: mol_type = unassigned DNA

SEQ ID NO: 5228 - DNA, 1424 bp, Homo sapiens
  source 1..1424: mol_type = unassigned DNA
tcggcgggtacgttggggatgcactcgcgcagttcggcgaaggcgctgttgatgctctgagtcctgcgccgctccttgcggttggcggtgcctcggcgcttcaccgggcgcggcccccccaggcccgggggcccggcgcccggcggcacccccccgtaatgggagtggtccaggccggcggcgccgctggcatactcggggctgtaggacagggccatgctgtagtcggggggcgacatctcggggtggccgatgagccagccatggaagtaggggttctcctcatggctgcagcggctggcggcggcggcggcagctgcggcggcggcggcggcaaacgggtagccctcgtggtgcaccaccgggtggtggggaaaaccacctaccagactcatttcgccctccgcgcccctccacgcgccccagcgtgcgcgcagccccgccgcgccctcggcccgggcccctgcctcagcgctcggcgtcctcccccaccccccaccccccagcccccgggcgcccgggcccgcccggcagccgcagagggggctgctgcagcccgggccccgtccccccgcctggccagccgggcccgcctcagcagcgctgcggccgccggctccccatggggcgcggcgagctggtcctggcaccgtgcgcccctggccgccgccgccgccgcctccggttcccgccttgctccacggcccgcgcttcggctcctgcttcccgggctgctgcgcggaggcagaatcctctcgtgctcatacaaaggtgccggggctcccgcgaggctggtacgcggagtctcgggaatccaagcccgggccgcggtcctggcaccgaagctaacccggaatccaggggcgagtctgagccgcggctggaggagccggtccagctgtgccggggggcggcggggtcgactgctcactgcaaagctacctccgtgcgaccctccccttcccgcctcttcccctccccccaccagcccgatctgggttcttgggcgcttattgttttaatgaaatttttggttgttgttgttttggtccttaaatgtgattttagctgcgagtaacgtgtcctcgctcctctcgcgctctctcggagggttttcagagaggtctcagtgcatccattttctcagatcctctcctttcggggcaaggatctggggccctgaatgagccttggagctcgaagaccgcggctcgggctctcggagggctctgcgcggtggccgaggaagctccggggtgacggcggtggttctcctgggctggacgacgtgaggggagcaagcggattttcccagcaagatctccatgtacagctacatctttagggccgctcgggttaatatatgtcgtcagaggctcctcacgccaatcccggggcggcaggggcggcgcctcgagctctcg

SEQ ID NO: 5229 - DNA, 1215 bp, Homo sapiens
  source 1..1215: mol_type = unassigned DNA
ccgcgcaggttctcgggtccgccgcagaccctaacgcaaactctcgggttctccgcaaaccctaacgcagacctaccgtggcctcgcccgcgtcgggctccgcgtccgagaggtcgagtccggactcgaaggcggcggcggcggcgggcgcctcgcgaggacccgggagcagcgcagcggcgagcagagaacacgccacagagaagaagcccagcaagtgcatggtggaaggaccgggggtgggggaccggtccgctggcgggggcaggggtgggggcgcgggcgcccctgcgaggccgcgggcccctcctggtccctctcccccgggctcctcccggcgaccccccctgggcgagccggaggcggcgggagcgggtccggggctccgcgttcccaactttgcagggcgccctcccagccagtgccggggaaaggcggcgggtgtcaggtaaaagcctcacaggaaaccggacatccgagctccccgcattcggagcccgcgaggtgaagcgagggcgagggaggacgccgccgcggtccgcgtcggtgtagctttttggagaggcggggcgggggacaccagaacaccccgcgatgttcagcccctccaaacccgccagagccctcgtccccctcctccctccccttccccgaagtgagaggagccgggccgcgggcgctgcggcgggggcgctggcggcggtgccgggggcgggaggagggcggcggggcggctggcggcggcggggcccgggagcgccgcggcgcaggatcctccagagcgcgccgggctgagcggcggcggcggcggcggcgggcgcaggggcagggcatgactgacgcgccctctgcctgcgcttatgtgagagaaagcggccgagggagggagcgtgccgagcccgggctgccctcccctctcactctccctcggaagccgtctccctggagctccccgtttccctcgcctcctccccggcggccccacctcccccggcccccctctggatctctccctccccgcccctgtcccctgcggggagcgggcggccggaggggcaagttcagtcccggggctggcggttggcgggaccggctttagaggtgatgcgaccaccctggaccacgtgcagcggggagaaactgggcaccgtggggtggagggagcccccgctttatcctcggccactcccgagttcttgtcctccctcccgcacg

SEQ ID NO: 5230 - DNA, 1184 bp, Homo sapiens
  source 1..1184: mol_type = unassigned DNA
ccgtcttctctccccgggtcgcgacactgactcgtcaacgttaatgggggtccgcgactgctgcggggacgagggcgcagagcagcccccgccacgggccggtccacgcaggggccgagaaagtggcggagaggcggtggccgaggcccaggggcgagcgcgggctgagctggtccctgctgcgttcacgagcgacacccaccccttcgctgcggacgccccgcgggcgccaggctgggggccctgcgaccgacccctcccgcccccgaggtaccgccgggcccgcctggcaggcagcgcgtcccgcgagctggagggccgagtttcgcggggccgtggggcgtgtgggtgaaggcgacacctcggatgcgggacgcatgaatggtggcagagcaggggtcgggatccgttcatgggttgggagagagatgcttttgtgagcacgggaaagtagcgctgccggagaacagctctgaggcgggatcaaaagccgccggcgaagccccgccgaggaacacggccgctgcccggggcggctcgcgagcgtgcgtgtgtggaggggaggatgccgccccgcggggtcttcggagggtgccgggagcgggttctcagtgcagttcccccgtcttcgctgggggcacggctgctcacaggccccggcccgcgtgtgtggagcggggcgagggggtgaggcgagggggtgaggcggcggccgagccggggcgctgggcgcggggctggcgggaggcggcggtggcggcccggcgcgaaggggttaagcggcgcaccgccccctcggcggccgggtgtaaacagaggagcctcagcctatcatgtctggccgccgcgcgcagcccgagcccggagccaggcgctgtaacacgatacgctccagacccaggcaacttggcagcgctgggctcggttcctcacggccacagcgagggcgcgccgcggcaaggtgggtgagcggcggcggcggcggcggcctggggcgggctggcggagcgcggctcccggtgaggctccccgcgcggcagggtcgctcgctcgctccggggaccgcggcggtggcggtggcggtggtggcggcggcggcggcggcggctccgctcttctcccttgtggtgtcggaatgggaggaggctcggcgcgggtttgaatcggtgcggaggcaacattcg

SEQ ID NO: 5231 - DNA, 5820 bp, Homo sapiens
  source 1..5820: mol_type = unassigned DNA
gcgagtagaaggcggacgcctccgagccgtaggtcacgtagttgccatagccctgcgatccgccatagggacccccatagacgcccagcgccgcggccgagttgagctcgtggcgcgcggtggccagcagccggctctcgtagaccgggcagtagaccggcgcctgggccgaggcggcgggcccggagtccgccagcgtgcggcctccggactcgcagcacgtgctcagggagttggtggccatcaagaactgcagagagaggccgcgaggactggcgggaagccgggctggaggctggggccctgggccttgccaatcccgcgcgccgcccacgagggcgtgccccgagtacccccgggcctcccgccgtccacaccaggatgctcgcccctttccactagcttgtgcgcgtctggcctcctccgccacgtggggcccagccgagcacctacacccttccccggagggtttccaaggcctctgacgccatttgcgcgccaagcctccttccccaggggttccttggggtcctaggactcccctggggcacagcctgagccttgtggttcaaacatcagggaacccgggcccggcccgtcggattttcttagcgcctcggcctttccccgggggtttggggagcaggggttgggcgtgaggggcgcgcgacccaggccttgctagctcggaagccgcaggcagtcgtaggtcggacactccccaccccccgtccccgccccatccgccctaccggcacctgcggtggcctgggcggggcggggctccgcttacctggggagccgaggagtaggggtatccaaactgcgggtaggacatggcgggcgcggcccggggcggacgggcggggcctgcagggttctgcgcgctggggccggcgtggcgcggccactgctccggagctgcaggcttctaggcgctgggagggcgaagcaggagagccggttagtccatccccgcgctccgcaaacttttctaaccgggtaacaaagtgagcagcggtggccgccgcgattcctttaacttcgcattccggaggctcgagggggctctgggaccgagcggcctcgcagcggcgacagaaatacatattttacgaaaaagaaaaaaaaaaaaacgagtcgcgcgaacccgtcaagtcagatgtgcgcggcttgaagcggaggaggctctgacgtcagccccacctcgcgcagcccggcctggccgcagactcgccggtcactcgccggcggctcaggccgggaggggccaggacagtcccggccgcgcggtggacggaggggccattcctccgggcgttagcaaataaattccatccgagtcaatatcgcccagcgaacggtgtttctctttagtcacccgagaacgagaggcacttttaattagaaattaattaatgagcagctgctccttcccgccccactgtaatcattcgtctcaattacaaatgagacctatgaaaggacacgctgaagatgtaatcaacagttaaaattagcccggcgctgcgcaggcggccggcccggcctcgcgctggcgcgctctgctccgagtggcaggaaggggctcgcaggcgccccgcacgcgtctcgtcactattgtttaatcgagaatcagcaacgcctcccgccggtttccaccctacgccggaatggactttcagaacccactgcggccgcaagacagcccgcaagagctggtcaaaatgccctcaggtgcgtgggggcttcggggccttagttggagcccgacaccctgagactggcggcccgagggctgtagggccgccccgggcgtgcgcccaccggctttgcacctctgggcagccgagtgtcgcggagaacgccccatcttctccaccgcggtcttttaagttcccgctcagcccaccgcccccacctcgcctccccgactttcctccccgatcccctttccgccggccgtgctccgccggcttccccctgcccctcgcggctaagccggggactgccgggcggccctgcgcgctcggaagagcaggttcctcaacccaggccccggcccctcccgctaagctcgtccctcccggcgccccgcagggctggctgcgagggagggggcgttgggtgcctggcggaggcgccctcccctgtccattttgcccagctttctgtctggggcgcacggagcaatcggaagaggggaccgagcgcccaccccaggactccctcggccagtaccctccctgggaccttgcccaagttcaaagcggaggccagtgagcaggcggcaagggggcggcaagggggcgcccgggccatcccgaacccgttccccgccttctgcgccatcgccctccgggaccgggactcgccccggttgccctcgccccctgggccggcctcccgtggtaagttgggaaggaagccgtgcaaggcagcgttgtgcagacttgctcagaaagattcctgggttcagacctgtgaatcgccccagggtcaccctctaattaatgatgacgtcctcgccctctccccagctgcaagcctgcctcccagaaacgaaatctgcctgctcttttgacagctcggttgaaggtgattgatgactatctggagaccacagtacacatcatataatatctgctgcgtaattgctttaatttacagatgaaaatacgagttctccgatcgcgttggaccggagcgggccacgtccgagctgcttgcagagggaaaccatcggaaataatgaatagccgctccatgcaaattattcagacagtttagcgtcggtagccgcgagaaatatataaagaacacgagtcaaatgacattaataattgtttctgaattctgtattgatttcgcggcaggccgcgtttctttctttctcacctgaatcgctaatatcaccttcctgtaaataataagaaactagccaccggggtttctcgctagaaatgaatctctcaacccctttccctctcctcctgctcctcccctcccccaccctccttcctcccctctcccaccctccctcctccccactccttgcagttttctggtttttcccgagcatccttctacttcccattatttattgtttacaaactactcgctctctccaggtaatgaggcccggctgaaggaggggtgtgagcccagccgggccaagggctgggatggggagtagagacccccagaggggaggcattcagctgtggcttgtcctttcctcacctatactcggggacctggcctcggcgactgtgagcactccgccggctgagggggagagccagggcccaggggcccagccacctatgccctgcacctctgggctctagtgcaacagctcagcccacccagacctgaggctggtgcatttccttccttccagacccggcggggcttaactggagccgaagccccagaacaggcggccattcatcttctgagcagagtctgggagaagcagcctccacttcccagggcagccagtacgtgggggccctttcgggggcttcctttgaccaccaccgccaccttctcctgttctcttttgcctttccagcctgtgtgcataaatcgacgctccagtccccaccagcgggcgaccctttctccgtgacccagaaacctggcctctgaatcggctttcccaggccgccgcacacacacgctccacttcctgcccgccagcaggccccagcgcctggggtccgggcccagtcacagtcaccctgcctcgggaagctcgcaactgcccaggaggcctcctgacccgcccggcctcacccaggccccactactcattccaggacacagggtcaatccagcctgtggattggcgaccaccgggacatctcactgaaaccctgtagcctggcctaggcccgcctgcccaaaccggggattctcactgggccacccttctcccatagataatactggaatattttccaagtgccttcaccaaaaggccaagcctggagcggaggcacccagtgtccctttcaccaacgataggacgctcagcatctcaggtatcagctgaacgcgtctgcatagactcggagtgctgagccttcctccctctagggacccccggtactaaatacacccgtgagcaggtgggccagaagtcagccggctcccggagtacacagcaccggctcagcttcggggagatgaggtgctcccgctggcctggagcgctccgaagagcggaggaccagggccggagcaggccgcaggggaggcaggggatggtcagcccctaacgcgaagcgcaggcgggtcgcctattttgacggggttaccgttggccgtcggaaccatggaaggcctccggggagacaggccgggccctgacccttcttcggccagcctagccctggtgcttcaggagttaccctgggggccaccagttccccgcaccaagagctcgtccggagggagctccttccagcccagagaagttaactccagccaaaggcgaagccgggagcccggggcaccaggcaagggcctttctttctgagacctggggccagagaccttgggggcgcctgtgcccgcccaccgctcgggacacccggctggggtgtgggtttgagaggcctcacggtcgctgacgccgcactggcgaacctcgaggttggcaggtcatttcctcacagccccgaggccccctcggagccagtggtaggagaaggagccacagggacaagcggtgaatctctggattcccaaccgccctccatgggggcccgcggccctctccctcctctctcccgctgcgcccccgccgcttgctccctgggtacggcctgaggctggacggagcgccgtccgggcgtccaggactcaggcctggccactccgagccccccaccccccgccccgcgccggcccgcgcaccctgcttcccgcaacttgcagcaaacgcagcggcctctggagagcctagcgacgggtagcaaactttgtccccttaagcgcaagagcaatcctcgcaaagtttgtgcggcggagcccactccctacctgagctggggaagctcccgcccgcgccgtgtggctgccggggccgcggggagcagctcgcagcccgggacgcaccggggagtcgccgcagccgccgccgcccgctcccctcggcggccgcgcggagcctccgcctcctcggaaggggggaggggtctcggaaccccggggcgggggcgggagcgggggacctcacctacctgcggtggcgctgggccgctcccggcagcccgcgagggctccgcgcggaagctcggcgcgcgcgctccagcggggagccggcgacaactaatggagacatttccaggcggagcacctggcgagcggagcgcgccggcgtccccaggcgccgcggtcgtcagccgagcccgcaccggcgtgacgtgggcgagcgagcgcgctgctcccacccggccgcccattaacgctttctcccgcgggcgccgcgctcttgccaactttcccctccgtccggtctgcgcgcggcgcgccgggtgcaggagctggggtgagggcgccccgggtgccagcaggggcgctgggagctgtttgggcggggacgtagggctccgggaggtcacacagccctaacaggacagtgggaaggcgcgcgagccagatttggccaaacgctaagctcgctgcggcctcgggccctcggcccacggggcccctctccccgtttgggctgccccacccagggacgcttgggccgggcgcgaagagcccggaaatagccacccttgtcgtcggcccggtttccctccg

SEQ ID NO: 5232 - DNA, 1233 bp, Homo sapiens
  source 1..1233: mol_type = unassigned DNA
tcgcgctgggctgcgtttctgcaggagccaggcctcttcatgctctgcggcgacagccgctggggtggggctacggggaagtcgcgctgcccctcgtctgagcgtgggccagggcccaggtggtgaccaaggcccggcgcagtggccccggagcgtggaggggcagctgctgggcggcctcccgggggagggtgacggcttcacccgccaacgctgcctccctcctgggattaggccggaggaatcttggatcgcccgaggctggtgctcagcctccttcccccatcccacctccaccacccggcgacccccgtagacttgattggcaggccctgccccgacccctacccctccaggtccccgcctcggtgcctcggtgcccggctccgggccactcctgcaggccctgcctagggcagccggcggtgcctggaggcgggctcgccccggctgctccacgcccaggccggtccctggcatttcagccagtgggagggcgtccccgccgcccccgtgcctctccgcaggggctgcgccgcgtccccgggcctctccctccgccgtggcctggtctgcctgctccagggcgcagctgcgcccgcttcagcgcctcccgggtctgcgtggcctgctcggctcagaggcctccaccacggtccgctccctgccggacgccgcgctgctgtggccgcggtggttctgtggctgtgagggccgtttctgtccgtccacaccgccttccctctgcaggtgaggaatggggtctgcttcgtttggaatgtgcctttgccgggtcctgcctgacctccaccttccagccgggacgcgcgagcttttccgtttggctgagtcaaaaagggatcgcgcgcatcccgccgcccctcaccacgaagcgcagacacaggaggttgcagggtcagtgctgcggagaatcccagacggccccacagccgccgccacccgcggggcactcgcccgggctctgccgaggatgtgggggctttggtctccgcagagctgggactcccgaaggccttaccagaaactcaggagcagccccagccctgcagagcccgcgagggtggagacgggagacccgctgtggggcctgaggctgagatgccggcctgcggtgaagccggcgggacgttccaacccgctcagacccgcccactccgcagggcccgggcccaccccccggcctgtggcctgtgctgggctgcgcagccggcg

SEQ ID NO: 5233 - DNA, 2865 bp, Homo sapiens
  source 1..2865: mol_type = unassigned DNA
gcgagtctcagttcgctgctcgctcagagccgcccaggtgcgagggcgtcttcaccagaaatcggtgctcccgcgcgccccaccctccggggccctgcagatgccgggtcgggggccgccagcaggccctttggctcctgctggagacactggaagaccaggcgaccaggacagcgggtcgggccagtgcggtgtgacacgagggctcgagcggcttcgcagtttaaacgtgtcctcatcctacacctcccacggctgtttcggattcggtgccctcgtgcccctcagcttgcccagcggcacgtgggcctcaagcctggtccccagcggctgcgccagcctagctgtgttcaccttggggccgcgagggcctcccaccggctggcagctggtggacacgctgtcaagatcgggggaaaaaaaggaaggaaggaggctagggggacacagggctggtggcctccgcagtctttgacctgcgacgggcgcgagcgcacctccgcgcctttgcgcagagaccttcccccaagattggctcacgacgcctcctaccccgaagtcaagggctccctgtggcaaatcctcacacgccctcctcctccccgcccatccccggcgccaggactgacggggagagggcaaggccgggccagaggggctgtgggcctggactgcggctgtcgcccgcggccctgctcttttgggcagccagacgtggggtcagcgcccagtcgcagcctccgggggtgagtccgcagatccccgcacgtgacacaggccaggcatggggacggggagttcctcgtcgtccgttcccactcagatgctccctgaggttccggaacaccccgccccccatcccaggatctgaccaaccctcaagccacggccggccccggttccgcgagacgggggactctgaggattgtcctcccttccgggctgggactcccccacagcagccgaccgcccccagttcagagtggcccggcccgcagcgctccccgggcacaggtcccaggtggacggctccgctcccgcgcccggctcctctgcccgccaagcgccccggggattccccggcctccaagcggccgcggccgggtggagtcagccccgaagcccgggatcccccgaagggagaaaacccgctctgctcctctgaagcggcgggagaaaccggccccacccaggtccgggggcccgacgccctcggcggaggccggctccaggggtccgaggttcccgaagctggaggccggctccgccccggcgtccccccgccgccacctccgcccccatcccgcgggccggcggagggaggggcggggccgcttgccgcccgcgactcgggttcggcttctttagtgattgcttctgcttctcccgcgccagctgtccccagctctggggcaacgctgccaggtgcccagtccccgcgctcgagagagcgcctgcctggctctgaactctggccaggaaggggcgcgaggggaaggccccgggggaaggcgtgtccccgcgccccgccccgccccgcctcggaaagcccccgcggtcccgcccaccccaggggctcgctcagcctccggagacttttttctttgagcgcagccgcctggtgccggtttccgccgagctggagcgcgcgggccacggcttctctggggacgcagaagcgagaagcggggacctcggcgcgcgccccgcgtcccgctcttcctgcccgcgccccggcccccggcccgcgccccggccgccggcatggtgctgctggccgggaccgggccggagggcggcggggcgcgctgcatgaccccaccaccgccgtccccaccccggggcgcgcaggtcgaggaggaccccgctgactacgaagagtttgaggacttctcgagtctgccagacacccgcagcatcgcctcggacgactctttctaccctttcgaggacgaggaggagcacggcgtcgagagcgcggagagcgtcccggagggcgtcccggaaagcgtcccggagacggcgaccctcctgcgcgccgcctgcgccaacaacgtggggctgctgcggacgctggtgcggcgcggggtgagcgtcgaggaggcgcaggagactgaccgcaacggcagggtaagcgggcgtccccgcaggatttgagccccctcactgcccccactcccctcctccccaccacatccccgcgcctcccagctcctggctccggaccggtccctcggtcactcagccgccgcccagagcgccttttccccgctgtttgggagcgcggtgccctgggtggcttccccgtctcaggctgggggacgcggtgcggggagggagcagtcgaggtgtcagcgcggcagaaacgccagtccggcgtcctcaccgcatccccttctcgtttaccggtccccgtggacctcctgactgaattcgcgctggctgcccgtgctgcaatccaggatgggcttcttgcggcccggtcccctcctgactattacctttccccaggtccctggcaggggaccattcctcctcccctgcaggagacagcccctcctgcccagcgccccatttggcccctgggcccctcgcgccgcccttgtcctaacacgctggggcgcagatcggctcctccagccgcaatgatttggaagcaacagtttcttccctcgccgggacagcttggtcccctaccccacctccgctgagctttgtggcccgcgccgcgaccagccaacgtgatctctgactggtctgtccgcaggtcaccttcgcgagccaatgccagccggggctccccagagtcagggcatagggagagccccagagccgcgggcatccacccgggtagggcaggaggcg

SEQ ID NO: 5234 - DNA, 1154 bp, Homo sapiens
  source 1..1154: mol_type = unassigned DNA
ccgtctcctcccgtatattagggacgtcatgaatgcaccgagtatgttctcagggtggcggggagcagcattgtcggtgttgccctaaatacgcttcctcccggggagatgggtggcagggagggggagcacgcagggcagccacttggtaaccgctccaagaaaggcactaaccccggacccccttccaggcacagcggcttccgagggggacctggcgcgatcgcggtcctccccgaggcaggcagaaaccccgcagcagccgccgccgccgcctgccggccgggagcccaggaccacccccaccagcggcaagaggaggaggacggcgccgggaggaggctgcgcccggccccggccgcccagccccgcaactcacccaaaggcgcggcgcccggcggcttcctcgcaaacatgcaccctccgccggcgacagctcctcagtccgggaagaggcgtgcgcggcgccgcccggcttcagggcaaggtcctgaccttgcccaactgcagcatcttccgcttttgttgtctgagcgcggccgcgggacaagggatgctggcgggcggcaggggcgagcgccgcgggcgagaggcggctcccgacgcgagtgcgcagcgcccggcccggcggcccctccgagctcggcgagcgcagcgccccctgcccggctccgcgggctccacgggctcctgcgggctcctcggggctccgggcgccgccgccagccggccgggctgagagagcagccgccgcgcccgcagctccgctcagccggctgtcgccgcgggcgcgagcctggggccgccgcggcgcccggcgccgagcgctcccgagctgcgccccgcgcgcggcccgcgccacctgtgccgccgccgcctcagccgccgagggcgaggctcctcccgcggcgcgcggcagcctcagcctccacctaaacctcggcggccggcccgggcgcccggctagtgagggagcgtccgccccgccgccgaaaccggccccgggtgcggagcatgcccagtgccgccgcgagagcggcgcttcgccgcgcgcgttccacttctcctggttttcgcggcagcagcggcagccgcgggagagaggggaggaggccgcgggttgggagagggccgagcatccttgggaacgcacg

SEQ ID NO: 5235 - DNA, 1154 bp, Homo sapiens; identical to SEQ ID NO: 5234
  source 1..1154: mol_type = unassigned DNA

SEQ ID NO: 5236 - DNA, 396 bp, Homo sapiens
  source 1..396: mol_type = unassigned DNA
ccgctgggaagggaaaaacggcccacatcgaactggatgccggatggaaacctctctgcgctattagactgcgtccagtacagcagatggcacgagcacgtgcggcgctcagcttaggctctcggaggcagctgagttggaaatcccgacggaaagcacccacaagctcccactctgcgctggcccacccgcgtgcacgcccaccccccacgcgcgtccctggctcagaagcgcacagatgtttactgcttagagccggtaccgctggggagatcgagcgacttgcgcggcgcacagtgcggcgctggcagggctctgggctcccggtcgggggttcgagcggccaagggatgggggtgggggcggggagagtggggggagggcgaaagaccgccg

SEQ ID NO: 5237 - DNA, 438 bp, Homo sapiens
  source 1..438: mol_type = unassigned DNA
tcgcgtggagagaaatgagctggagagttacaccgagtcaacgcgggacacggctcccggcccgggccgggccaggggtgggaggcggttccctaccgcaggcggcgggactcccatgcgccgagggacccaagtctccactccacccacacgcccacccggcgtcggggcgctgcggcctcgcctcacgagcccagagcaggccgcagcctgggctggggatccggcacctgggcagggtgagcttggccggacatcctcctccaggactacccgcaccccacagtcgcgtcaaaagcgccccatccccctgtctctcgccgcgcaggtttcccaccgacgcccgctcggaaggcgagagcccccacgtggcccggcgcggcgcggcccccggggaccgcgagcaacaaaagcccggcccgcagcccctgctcctcg

SEQ ID NO: 5238 - DNA, 438 bp, Homo sapiens; identical to SEQ ID NO: 5237
  source 1..438: mol_type = unassigned DNA

SEQ ID NO: 5239 - DNA, 411 bp, Homo sapiens
  source 1..411: mol_type = unassigned DNA
gcggtggtgtcgatccacttgagcagctgccccgcgctcagctcgccgcgcgcagtggcgtgcgccggctggatggcttggctcatgaccacctcgccgggcgccggccgctccatggccagggcgagagcgctacgcctgcggcccccgacaccccaccatgcccgctccgcccgccccgccctccccgcccagctccagagggcactggcgccgcccgcccgggccgcgaacccctggccgccaggtggtgggagctgcgagtgagggggcccgcactgtcatcccaggactatcgcgagtgggggaaaaccagcgctctcgggtctcaggagaagtctgggaagtgcgcggggagggggctcccgggtagacaggtctggaaggcggctccccgagagccggagcgcg

SEQ ID NO: 5240 - DNA, 1137 bp, Homo sapiens
  source 1..1137: mol_type = unassigned DNA
ccgcggccaaaacgcccagcgccgggtctgggtttgcgaacggctcagcccaggccctgcgccagagcaccgcacccgggggcggacggccctgcagctccccagcctcttcccgcatcaactagctgacgcccgggcgcactggcttcccccgctcccgcccgcacgaaagccctgcccgacgtctgcagtcagcatcgcccgcactgcctagggagggtttgcgccgagacccagtggccgagtgagccacagagtcgctggtcctggggacgctgtcttctaccgctccccaccgtcctcctctttcctgtatctcaccccggtaccccgcacccttctccccgctcggccccgcgcactctgctcagactttacaagcactttctcggggcacccaggactcgacgcctcctccgcgccgccagcggcgctcgccacccttggcacgccggagggaccgcctccggccccctgcgcggcgtttctcaggggactcccagcccatccctcacccagctgtccgggtcccgacgccttacctttgccgaactgggggacaccgaggctgagcccgaccaagagccagacggctaccgagcgcttcatgatcccgtctcccggacgtgaccccggctggtcaggggtcgtcgcggagggcagtgtagccgaggtggcagcgcagggcagcagcagactccgcccctactaaagaattcaagaagacgttctctttcctcagcgctttgttaaacaaattcttggagagggcgagagtggtgactaaagagaggagcctttcctccccttttgcctgcgctccggcgcgcggaggtgggtgagctccggggagccgccggcgggctcagccctccgctgcgggtgggtcccggcagaggcgcggcgggcggggcgcgggctcccgcggccgccccgggtctgctgcgcgggcaggcagacccaccggcagacaggcggaccgggcgctcggctgtcgctgttctccgcgcggcggctgcggggcttctgacttggagaacaatgaagcgtgagctggaggggagcgagcgggccgccgggagcgcactgtgtacaaacagaggcggcgtgcgtgtgagtctgagcctggcaggcgcg

SEQ ID NO: 5241 - DNA, 2383 bp, Homo sapiens
  source 1..2383: mol_type = unassigned DNA
ccgacgtgtcaaggaaagcgcgtcgcaaggtggagcgctcgggttgacgatgagaaggtgagctgtgaaccctgcacacgtcctcaaacaaaaggctcacgagcggcggccccgacgtggggagcaagcaggcttctctggcccctgcagcaggcggacccaggcccgcctgccgccggacattcagaacctgttcccgcagcgcgagctctgcacacgctctgcgatcggcacccctggaccccctaaccacccgccgcccaacccccggagagagggctttccgcccgctgagctgcggggttgggaaggaaaagggggacgcgctcctgggggtctttggatattctggcaaagggggctgcagctctaggctccagctaaagggtctgggacggagtgggccagaaagccgccaaactgaggattcccccctcccccaagccggagccctaggtgcggagccgcttgcccacttaccctcggagcacgtcctgctgtcctcgccggcggacgcggctggccactgcggcaccctcctcgcgatactcgggcgctagaaacccgccttcagagcctgctgtagcggaccgaacctgttgcggcggcggctggggccggggcggcttgggcggaggaggctgaggctggccggccgtgccctgcgcccagagcaccacacagcccagccacaggaagtagagctggagacacagcctccgtcttctccccatcgccggcgccgaaagcgcgcggccgtagacccgcggagagggagtgatcaaagacaaaatctgcgcgcctcagaaaagagtcagggtctaataagcccttcgtcggctccggggactccctcgggctcgggctccctgctctagctggagacctcgacagagcgccggccccctgactgcccgcgaagcgagacgcggggcgccgggtctagcgcagtgagcggcgaggcgcggcggaggtgcagccggcagccccgagcggtacacgttgcataaccggcctaaagccccgagcgactccaggaccgtcagcgggcgggggaggaaattacaaaagccctggcgtaaaatttcaaaaaatgtgaacctcaaaagaaaaaagggcctgcacgcagagctcggcggattcccgtgcgctccgaagacggatattggaaagctgcaaaagtcaccagaaagaaacaggcaagcaaacaaaagtcgcccccagaagaagaggagggttccctccgggctcgctcggagtcccacagggcaacgaagcgcgggtagcggctgcggagccgggcggaggtgcgcggggccggggcgtgcggccagcaagagagagggcgggaggctgggcgctggagaagatgcggcggtggagggcgcggcgcgggggttttagaggcccggcggggcgcggggcgggccggcgggcggcggctgtcagtgggggcgcggccgtccacacgtggggctcaacccggactgagaggccggcgcagagtgggcggggacagagtaagggagagatcgggactgaggaacgaggggaaccagggttgggtgaggggaagaggaaggaagggggggagggcgaagggagggaagaggacggagattggggagaaggggggcgaacccgagaggaaggccgggctggaagagggacttggaaagagggattggcgagcccgggtgcgagaggaaatgagcgggggatgggggcgaagttagggcaaagagagaagtgggaaaggagagggagggccaaggtccgggcgccgagaggaggggcccggggggccggctggagggggcgaggcgctaggcggctttgcttcccgtccccgtcaattggccgctagctctgttttgactgcctgtacaaagcgagtagacggcgggggatggggcgattagggaccggatttgggaaaggaggcagcagccccttcccctccccctccgtcctcgcccggccgcggaccagggactagggtgcctaagcgcgccaggcttggccggacccgcagctgaactgacccgcagctgaacttccccgccggacagaggccgcaaggttgaggatgagaacgggtctttctgtagggtcccggcccctgacctgggatggggggattcgcagtcagccaggaatagaggctcacggggctgttggttgcagcctcaatccaagaaggaggagacctcccctttgccctcctacccccaccgccccaccgggagcggcgtcagtctgcgggaccaaattaggggctgggagtttccagattgaaatgcgccctccaccaccaagagggagctcacgcggccgcggggggccgaggcagccagccggcgccgcggtcctggggagtccg

SEQ ID NO: 5242 - DNA, 2367 bp, Homo sapiens
  source 1..2367: mol_type = unassigned DNA
gcgatcccggctttggggccctgcctttgccgcgggagaataggctccaatttacgaagctggtcaatttcagaaatccgagacccggttcttgagaagcgactgcgtgctccgggaccctgcgtcaacaaccaaacctgggagaagccgcgggaatgtctttattggacgttacgaagggaattggggtttctctcctgggaagaaaaagcccgacctgtgccggcgagagcaggctgccttgggctgggggcacctccgagcgctgcggcgggacgtcggggtccggggcgaagagagccagggcgcggaccgacgtctgctgcttttctgcggcattgctgcccgaacgaacgaacgaacgaacgaacgaagcggtttcgtttaggaaaaataccctcttgacgcgaagccacggctgaagtcccgggccacgcagaggggccagcaattccatgggtggtggggccctccatccctggacgcagcggggagcagcgggcggccctctctcctgcccacttctcctgggggtgggggagccctgtgtcacccgacgctgcgaggggctgccacgggcttctcaggttgtgcccttcgcggggccgtggcccgtgcccccgaggctgctaccctcttgaggtgcccggagccaaagcagagggttgatcccgccggttgggtgaggtagcacccggtgacggcggctatgactgtgccctgggcgcaggaacgagctcctcgcgctgcctcgaaggctcctgaccttccgcgccttgcgctgtcccgcgccgccgggtggacccacacacgccaggagcaaactgcgcaggactcggccgccacctccctgcgcccctccaccgcggagaccctgcgcccctagcccagcgtctcttaccccacctgggcagcgctgcgtctgcggctcgtgggctccgggctcgcccgccgcggactctggctcaggtttcggctccggctggggccccggatccagctctggctctggcactgcacggttcttcggcccctgctggttcgctacatcccagcgcgcgaggccggggcttcctcggctcggcccgctcctcccgccgccgccgcccgtcgcccgcggggaaggcggggacactggccgggaggcgggaagggtggggggaggggaagctaggtgttcgccgggacctgcggggagaggggcggcgcgcagtcccgccggctaggggtcctggcctccctcggggcgtaggctggggtccgcgcggctggcggccgggcctcgaggccggggagcgcgccctgggacctccgtggaggggccctgccgcatgcggacgaagccagagcgggtcccagcctggccctggggcactttctctccctgggcccagtttcccacctgactcgtgaggggctggccctacttccgtttagacgggggctggtggtcgagtttggggttttgagattggacctttcttctttctgctcagcctgcgggagggagctggtcttgcgtgttggcagggagagtccgctgcccagagcgtggcagccagggaggtttgaggacagaccccaggttttctgtgtttgggggtagggggtgttagggtggggcaaccgcccgacctgccctggttgggggaattgccttcttccctctcctcaggggctgggctggtgaggaaagggcacaccaacccctcaggacagacacttctggggccccttgtccaacccctatgcctgcacatcccccagcgaccatcctgctgcgggcctgcgaacggtgacgcctccacccctgtggccccgcaggccgttcctggctggctgccgctgggagacgggctggacgcaagggaactgggagcctgtcctttgcccaccctcaggccacagggctccccagcgttgcctcgtggccagataaccctgtgcgcgaagcctcatggtggaaaccagttggccgaacctactcctggtaccccgaagtgcccagcctgagcctgcttgctgttgggattatgggatgggaccacagggcaggtcgggctgtggcctgcctttctcagggactggagcggctaagcctgcccgccgacggccacgggctccagagcgaccgtttccggcgcaaggtgccgggagatggcagcgcggcagccgggcctgaatctttcatgagatgcagtcagcagcggcgcctccctgcctggttctcgccgacagctgctgcgggagaggccgcgacccgcgccacctcggcgtcctgctagtccgtgcctccagggccgcttggcctgggaacgcagagacccacgaccccctccccaacctccgaagcgggaagccggcccg

SEQ ID NO: 5243 - DNA, 1235 bp, Homo sapiens
  source 1..1235: mol_type = unassigned DNA
gcgctagcgcgtgtcctgctcagagagcccggcgctagctcattcttcgtgcagttattggctgggactctgtgtgccgctgtcggccaatgaagacgctggagatcgggcccctgcccgtcccctttctgcgccccgggatgaggcagagactgaacagccggcgagcaaatcaacggcatccagaaagccatgtcggactcggcgcccagcgcccaagcgctaacccgctgaaagtttctcagcgaaatctcagggacgatctggaccccgctgagaggaactgcttttgagtgagatggtcccagaggcctggaggagcggactggtaagcaccgggagggtagtgggagttttgcttctgcttggtgccttgaacaaggcttccacggtcattcactatgagatcccggaggaaagagagaagggtttcgctgtgggcaacgtggtcgcgaaccttggtttggatctcggtagcctctcagcccgcaggttccgggtggtgtctggagctagccgaagattctttgaggtgaaccgggagaccggagagatgtttgtgaacgaccgtctggatcgagaggagctgtgtgggacactgccctcttgcactgtaactctggagttggtagtggagaacccgctggagctgttcagcgtggaagtggtgatccaggacatcaacgacaacaatcctgctttccctacccaggaaatgaaattggagattagcgaggccgtggctccggggacgcgctttccgctcgagagcgcgcacgatcccgatgtgggaagcaactctttacaaacctatgagctgagccgaaatgaatactttgcgcttcgcgtgcagacgcgggaggacagcaccaagtacgcggagctggtgttggagcgcgccctggaccgagaacgggagcctagtctccagttagtgctgacggcgttggacggagggaccccagctctctccgccagcctgcctattcacatcaaggtgctggacgcgaatgacaatgcgcctgtcttcaaccagtccttgtaccgggcgcgcgtcctggaggatgcaccctccggcacgcgcgtggtacaagtccttgcaacggatctggatgaaggccccaacggtgaaattatttactccttcggcagccacaaccgcgccggcgtgcggcaactattcgccttagaccttgtaaccgggatgctgacaatcaagggtcggctggacttcg

SEQ ID NO: 5244 - DNA, 3043 bp, Homo sapiens
  source 1..3043: mol_type = unassigned DNA
gcgagggtctcggggtggtgggggtgccggccccagcatgtggaggcgacaggatccgtaagaccccacgcgccgccggggcaggaccgcacagggccgccattcactcacttggggcgtccctaatgggcactcgtgcattccagctcgtgcggtgagcgcacgcacgccgccgctgccgcgttcacacggccccccaaagtcgggggaggggtcgtggagcgaaggagctgtaggcagattttctttctctttccgagctgggaaaagggccagccccgtgccctgcacgcctggctctgctttgcagcttgccggtgagccaagagccggtagagcagaggaggcgcacggttcgggtcgtgtcaccatttcttggcttgctgacctggccaggagctggggatggcggcagcaccgcggaggtacgctttgcgctgccctcacgctcccttccgaaagcagtgcccccagggggaaagttcgcaatgccatttgtctcgccggcaaagttctgggatgtcgggcatcttttgaggagggggaagacgcggcacccttactgaggccggcaggccaggaagagaagttctccgggcgcagggcgcagcccagctccggggaccctctgggcctcccgcgtgccggccgggatgaagcgcgctttgcaccggacccgggattcgggggcgggggctggcgctggcagcgtcagacgctgcttcatttcccctcgaccctggggaggacagcaacaagtcctgccccagccatttcatcaccctgctagcacgtgcagattccgggccctcggagcccggcgcggacctcgccttgcctcgcgcttccctttgcacgtcccgtgccatcccaagagtttgcgtggccctgggtgggcgcctggctcccggcgaaacgcctggggcgcgccgcgtgggtgcacggtgtcctctcccagtagctcccggctgcgggggcacatgcacttacctgtattctgcagggacaggcggcctttctgctgggagctcctgtcttggggaccctcgggtgggttggtggcgtcggtcccccgcgccgggtcaaaggtggccaacaccaaagccagggtcatgaactggcccagccgctcggcacacatggttcttggtattaacctcccgtcgggagacctggatcctttgtgctcccctcttcctcctcctcctcttcctccttcgccgcttcccctcctcctcccactcttcctttttgctcgccttttccctcctcctcgcggccgcggctcggatagaggttacccagcgccctcccgtagctctccggagagcatgtgaccaggccgttagcagcgccgcgagtgcccggcaatggcagggatggtgcctcaaatatccctggaagctctggtgtcacttgaatgaaggagtcgagcaggtgttgtcccggcggctggaccaatccgagaccccggcccttttgacaacacggccgggaggcggggcctgcgctcaactactacaggaggaagccgagcgccgctgggagcgccggacaaagttgccgacctggcggcggccacgcgtttgcgtgcgtgtgtatgagtgtgtgtgagcgcggccggagatgcgtgcgcgtgtgcgggtgctccagggcaatggtcgaaaggactgtacaatataagagcgaatccaagctccagttgctgttaaagggggacggtgtgctctgggacagtgtccctggggcccctggctcgcgtcacacccacatcgggttgggaaagtttcctctttccgccgtttggaattcagtgagattcccagcccagaggacttgataaattgaagcagtttcctaggcacaatgatgctgtgggccaactgagcacacatgggaattcctggccttgtgacactttgcattaaaaagaaccccacgattgaagataggagcagaagcactagatacagtatttggtctgagcaactgccctatcttcccgctttggtgggccgtgcaacacctggagtgtcgtttctcgtctttcccctaatccagacgcattccaggctgggctgcagggatccaggtgacagtcaggacttgcatcatttccaggagggtggcagggaggcccaaggcagccctgagtcagcccgccgcggagcatcgcgtgcccggaggccagagcttgaaaggcaactttacgcgtctccaaacacactcctgcattttctcaaagcgctgctcgccaccccgctccgggttcccttttactctccagtcatccgatggaagtggtgagaacaaaaacaaagacaaaaaagctaaatccggggaagttatctccatctcctcccttttcttgttcggccccctccccaagaaccgccgggtcgggatagcccccggctactttctcacccggcccgtggagggaaggagaaagttgggcgccgcttggagcgcctcttcccctgctgtgtgtgtacgtgtgcacgctcacgtctcccccgcgccggggccggggacaggaactgctctcggtcccgtcaccccacggcgcagctcggggggctcgcagggctgggggagggcggggacacgagcgccgcgcccaagcgccccagggcacgcacccggcgttggcgcgcactcgcccctccccccgtccccaccctcctcctggagaacaggtgagccccggtaccagctctcgatcccccacccccgccccgcgccccgcccgcgccctctgcggtaatgcgcctgggaagtttcatcacccactgcccaggcgacgcggccctgggtctccgcggcggggcgcactgcccgcctggttggggccgccatgtgacacggctgggggagggggcgaggagacacgcgggcaggtcatcttttggccggcgcttgacttccaaagctttcctttcccgtgtcccggctgcacgcgggagtggggaaggcggaggcggggggccaggatggccacggctggccgcagctatccggcgtgtcgagctctcctgagtcg

SEQ ID NO: 5245 - DNA, 864 bp, Homo sapiens
  source 1..864: mol_type = unassigned DNA
ccgcaggcgcggagctgcggctgcagccaccagcctagacgtggcgcgcccgcagcaagtggctggacaccgcagaccaggcccgcgtccccagcagcgcggatcccggggccagccgcccaggcagcaaagtcaggcggtcggcttcgccagcagccgatgagtctcatcctgtggattgcccagcgccagggatcaggatccggagaggtgtccaggaggagcagaccctcagaccaggtaggctgtgcactcggtgaccctgacgccatccaagggaagctccgccatcccgcgccagtgcctgagctgcaactgcaaactgcgcgtcctggcacgagcagcggtgggggcgggtgggggaaggagcgagtgactctccaggcgtcttccgctacctgacaccagccaggcagcccccagggccagagcgtcagcgccgaagccaggctcatccgggaagccactccggtggccgcggggtgcccatgccagcaccagatctctcttcggaaggaggagcggggcgggctacacggccaggcgggccctccccttaaggcggggtgggccgcgcgcctgcgattttccgtccgtggtcctggggcagcccgggccagccaggagaacccgcgagcccagcggcgcctgcacctgcggcttccgggagccgggcggctttgcgaggctcactaggtctgagaggtcggaggccgccagtgtcgctgctgaagggtggaccaggcgggatcgcggattctgggctagatcgcagacttggtatcgcggattgggatttggatcggggattttgagttggatcacggattgggggttggatcgcggattgggggttggatcgcg

SEQ ID NO: 5246 - DNA, 2071 bp, Homo sapiens
  source 1..2071: mol_type = unassigned DNA
gcgagagcagcggagagaaaggagctagagaagtgcgtactcaccagcccatcgcagttgctgagcgccacagaggaggcttcggctaggccggccacgtctccgacgtagagacagctcccgagcaggggctccacgcgggtggtgcccttctcgccctgccactccatagtggccccgggcgccacgaggcgggcgttgggccgcagccgcaggtgcaggtctcggccaaagaccgtgacattgtagaagaggtgactgccaggctcctcctcgttgcctccggggaagctcggggtccggaccggggcggccctgcgggctcgtacccctgctctggacgtagctgccgacaccacgtgggacaccaagcggccctgggcgtcagtgcgcacgggcaccgccaggatgcgctccgctccgtgccccaggggcccgcctgcaacgggaaggggcgttagatcggcggagaccacggagccccagtgcctcagagacccgccggcaagccacgcccccccagaccccgccccactgcgaagggaaggggcattccgccaggcgaccccagaagccagcctgcacctccccggctttcctgcaaccgggaaggggcgttaacagggccaccactccggggctccgccactccccagccgttccctcctccggagaccttgcctgccaagagctctgccccctgccccgttcagggttggggctcggtgggaacctccccgtgcccgaagggacgaccccgtcagagagtcccccgacccttgcacctaccgtccttggcaggacgtggagctgctcggaagccattccgggttggcccccttacccgtgtgccacgacccctcggcgggcccctgccgcccgagtgccctcaccgccagcctccggagcggcggagtctcggcttccccgagcacgagcggcctgtcctgcctgtccagctcccgctcagcccgctgccggccccgtctccccgagcgcccgaggactgggaggggtggaacagggtccctccgatctccggggattccctgcggggcgccccaaccaatccttagggcccaaggctacgcgctcggcagccggctcctccggagcgtccccggacgcgagccccggcgccgcctcgccctggctcccccctcggacccgctggggctgactctgcgctcttggccgcggggcttttcccggccctccgtccccaccctccgcgactcaggagccgccagtgctccgaggctcccccggcccaaggcgctcgggggcggtgcggggcgccccctgcgcgaccaacccggccccgaagttggccaacttggccccgggcggggcgcgcggagtttgcccaagtcaggctggacgacgcctggggagggggcggcggggcacgcgggacagggccaggccggcgggggtcccggggagtaggggccgggccgcacctacctggggggtcggcggcggcggcgagcctggcgttcgcgggcggcggcggcggcggcaggagcggcggcggcagcagcagcagcagcagcagcagcgcggggcagagcaggcggcgagcggctcccgccggcggatccatggcagccggactgcagccggggccccgcactcgcagccggcgcgaaagttccccgcgagccgcccagcccacatctgggggcagctggagccgcccgcagctgcagcaccgcagggcgcggggcggaggaggcgaggcgcggaggggcgggcgggggagcgcggagggaaggcggggagagggaaggagcgagcgagcgagggaggcaggcgggagggagggaggcgagcgagggggagggcggggacggcgggcgcctcagcctgcggtgacccggcgcatcttggcgcggccgccgccgccgcccgcttccctcttcgcgccgccgtcgccgcggtgccgggctcgcagcgaagcagagacaccccgaggcggcggcagagaagcgccgcgggccgggccgggggagccccgccgccagccaccccaggggcacaacctccgaggagcggcgccggccgaacg

SEQ ID NO: 5247 - DNA, 1170 bp, Homo sapiens
  source 1..1170: mol_type = unassigned DNA
tcgggctggcgggcactgagctggggccatcacgcctttctagagcgcctgcggaggtggcgaaggcttggagagcatacgaggcggaatccggatcgagtgagttccttgagccgcttgcgtgggacgcagggagagggcgaataacgccctcaggcgctgaatgcaggggcaaggagccagcgagggtggctggagcaggccttgccagctgttaccaagtctctccacaggcttgggggcttggggcctcctggaaagatccctccgccgcgctgaccagtacggggctcgctcccgcactttgaaggctgccgcggtctttcgtcatttataatcaagcccaagatcaaggttgcaagctgaggtcggggtactgacaacgggaatgaagccataggggaagaggataactgggacgggctggacccatacttgatacccgggaaactcctagagcgtgtggtgctcctgccagcggcagttactggtggagctgaggccaccgctactgtcgtcgttggcgctttgcttctggaacctcccagcaagatggcactcactgtctgttcccttccgattagcacccccagccgcgctccctcctccccgggatacgtattagtcacatactgtggggagaagatgggctatgtaaatgtaagtcaacgcgctttcccagccacctttgcataatgcaacaggaacagcgacccgcgcgcacgaaccgggtagtgtgcgcgtgtgtgtgctcgcgtgtgtgagcgcgtgtgccagcgtgcgtctccgcgcgggcgtgcgtctgggtggatccttgcgtggcttgggaggcaaatcgggcgtttctccaagtcgtcttaacatgatttaggctctcaaatacgtgaaagcggtagacacaacagggatgcgaaggaaataaaaaacaattggggaagtggtgccaagtcactcaggctttgaactgaggacgagtagtgcggtcgcgcctggggcgcgtccggaaatcatcctcagcctgtggcggccactgccccacttaaactcttctgcggggagagttgagcggatccctggggggttggtcctgggctagttttaaactctccggttgcatctcgcgtggccccaccgacggcgcgtctcggcgtagctcttggcgcgggctcg

SEQ ID NO: 5248 - DNA, 2168 bp, Homo sapiens
  source 1..2168: mol_type = unassigned DNA
tcgcgctgcagtcaggcagagccccggggcagctcgctcaccgcggaggagccactttggagttttacgccctttccacaccccacccatggactggaaaggatgttcagttactcgcgagcttgtctgatactgggatggaaagtcacagtccgcaggctggagtgaggcgcgggaagatgcctggtccttgcctcgcggacttggcagccgcgtcctgcgggtctgtccactgaactgctgaggactcgcccgtgtgcggggacccgagtgccacttcccggagcgttaccttgcgctccagcctccaggctagataatacctggaaggcagggcagggctgttcccgctctcaccccttgcggaaggatggcaggatccggcgcagcgacgtagcagcgggagggcacagcgacctgcatctccagtttctcctcaggacacaaggctgacttcaccttccggacagctgcaaagcccctgccagaaccaaaccgaactcgcgcctcggagaggggcttctggggccgtttcgctgcagggcgtggggagtggagagagggaaggggaagcctggggctgggtgtgcgcgcgtgggagcgcgcctcggagcgccccgcactcccccactctatccccgggggcagtttgggaaggagggagtggtagtcgcgggaatgagggagcaagagaaaccctctcaaagtgacgccccaaacaggtccggatttagaattcgaagctaaaggctgttagaaattgggactcctcggcctcctctgcagcccctcctttcccgccccgaagcccgggcggtttgctggctgcctgcttccccgcccccggctcagaggtctctggctggcgggcgccccgtcggccgccggcttcctccttgaaacccgccggcgcacatgaggccgctgcccccgccgcaggcgctggcggccccctcgcggtgcccgtggtgatgccatgccccgccaccacgcgggaggagaggagggcggcgccgccgggctctgggtgaagagcggcgcagcggcggcggcggcgggcggggggcgcttgggcagcggcatgaaggatgtggagtccggccggggcagggtgctgctgaactcggcagccgccaggggcgacggcctgctactgctgggcacccgcgcggccacgctcggtggcggcggcggtggcctgagggagagccgccggggcaagcagggggcccggatgagcctgctggggaagccgctctcttacacgagtagccagagctgccggcgcaacgtcaagtaccggcgggtgcagaactacctgtacaacgtgctggagagaccccgcggctgggcgttcatctaccacgctttcgtgtgagtacccgcgccccctgctatgcccgctgcaggggaccactgtccctggccccctggggcgtgctccgcgctcgcgcccttgggcccccgcgcgcgtgcacacgtggtggcttttatttcttcgcacgtgttcgtggtcttccttctggagcctctcccctcccccagccccacttctctcatctctacagcttgaaccttttccccgaggacacccaatgaactgcccggtagcttcaggctcccggggcgagagccaggcagacgcgggacttaggctgcgcggataattgggagcaattaggtcccaagatacgtaaacttcaaccgaacggggcgcccgggagctagggaatgcaaagggaggacaggcgcccgtgtgaggcttgagagtatactggagaggttaggaggtgatggcggggtaggacggggagaagtgagggggcatcgagggctaggtcctcagtcctaggggcggagtaggggaagctgctacttggagagagctgctaggttttaagcgcgcccggaaacacgcctcgccaccacccagccaccaccaacggaaaatctgtcagtgcatgtagcccttcctgccacggagaaggtggccaaggtctagaggaggccagcaggccaggcgaagcaacgctcccgcgctgcagggggcggggaggcagcggggaacctggggcgcaggaacgcgggcggaggtgcgatagcagaagcgcaaatgggtcgcctctgacagagatcgggcagtgggttaagtccccgtttgtggcgcg

SEQ ID NO: 5249 - DNA, 2053 bp, Homo sapiens
  source 1..2053: mol_type = unassigned DNA
ccgacgcacgattcgctcacacggaataagaactccacgaaggacacttggggaccacactggtcgtacccgagggggcgggaggcggaaaaagtatttccaaacgcaactctgccaggtcttacccttcgcatcccctggtcctcgggacagaagctcccttggcacctctcgcccagctcaggggctggttgtccgctagaacgaaatatcccccactgactacggagagctctgcagggagccgaggcccccgcccgggccaagggaaggcgctggcgccgcgggagacaagaagaggcggaggcggaaaagaagtggagaaggaaggggtggcagagggagtagcgtgcgggaggcggcgccggcgccgggctgctggcgaggcggggtggggtggagtggggtgtgcctccggcgggcggtcagcaagtcagtccgtccgagcgccggcgtcccggtctccagcgcccgcccgcgacagcgaccgggactggcgccccgctgctccgaccgccggcgagcctcgccccttcccaggctcttcactgggtcctcccgcgagccccgcctggcccggcgtggggccgcccgtctccgccagcccgggcgcccgtcgcctcgtcccgctcgcgcagtccctgccgctccctccgctcgcgctgtctctggctccctctcgctccagtcccatttatgaagcgcggtcccatcacgtgttaatgagcctttgtcctgccctggcagcggcggcggcacagaccccgccgagggaactgcgcggggagggacctgagcgcagcgcccgtagccccaaactttgcttggggcgggggacccgccgcggcgccagccctggggccagaggggacaagcctcttcggcccgcgtcacctacttctcctcttcctcctcctcctccgccgccgcgctcccggaggcccccgctgccatgacctcgctgtgctcccggataccctcacaccctgaccaggccaagaaggggctggtgcatgcgccgcccacgacctcggggccattaatcacacgctcccgggcagcgcgcatcgccaacaccttccgcgggggtcacgtctggggcagcgggctgagccggaaggggaaggggagcgggagcccagaggccgaggcgcgccgggcccgggggtgcggtctcgcgccccctccctccgcgcaaggccgctcccgtggcaggcggcagcgagctgggcccggggccgggctgagctttgggaccgcgctgcgcagcccccgagccgttcgctacctggctgcggtcgcgcggccacctgtcctccgccctcggggcgccgcccagcttcgcgccaggcgccttctccagcgcccgccgccctttcccggcgagaccactcgggcgcgccccgcccgccggtccccgatgcaaacagttgggctccgtaggcggctggctccgcgcctcccggcccggcgcgccccctccccggccacccggggccccgctcctcgcaccttttcgctggaggaggacgccccactccagggccggactgggggctctgggactcgggggcggcagcggcgggcgcctggggagccgcggtgtgctcagcagccgcggcaggaattaggggacatgctcgttaattgtttccactatcagccgccgtctgcctcctgtgtgcacggatcaaaccttaattggtctttacatttatcatggtgaattgcgaacctccaaacaagcctgggccgccgcttctgccgaggaggcgctcccctcccctccgcccccggggccctgcagggtgtgcggcggcggtcgtggttatttagacatctttatctctcgtgagttggatcgggagaggatcgcacggtttccacctgacggagccacgtcacgtcggccacaagggccccgtgctgggcgctgggttcggttcccggccgtcctcttgtggccgccttggcgttcattttatgacaccttgccggtgttcccagacatcatcccgcaccgctccgttttaccgacctccaggtcttcccg

SEQ ID NO: 5250 - DNA, 1679 bp, Homo sapiens
  source 1..1679: mol_type = unassigned DNA
gcgtttccactgcgtgttcagcggcggtggaggcggcgccttcctgcaccacgaacacgcggctcgccaaggcgccgtcccagcggctgatggcctcggtctctccccaaaacccccggcgcccgatttcgccgcgccttcccaggcaggaactttgcgaccccaccccctgggcccgccaccagttcaggcctgcggtgcgcgggagggcatcaagcgcgaggcctcttccgcgccctcggccacctcgccgaccccaggcaagtgggggcagcccaagaagggcaaggagcagctggaccgtgccctggacatgagcggagccgcccgaggacaagggcacttcctcggcatcgtgggcggctcctcggcgggggtcggcagcctggctttctaccccggcgtgcgctcagctttcaagcccgccggcctagcgagggcggcggcggccgctcacggcgacccctaccgggaggagagcagcagcaagcaaggagccggcctcgctttgggcaggctgctgggcgggggccgggcgtgcgggcgccccgggagcggggagaactcggcggcgggcggcgcgggtcaccaccatcaccaccacgcgcaccaccaccaccatcccaagtgcctgctcgctggggacccgccgccgccgccgccgcctggcctgccctgctctggggccctgcgcggcttccctctgctctccgtccccccggaagaggcgtccgccttcaagcacgtggagcgcgccccgcccgcagccgccgcgctgccaggagcgcgttatgcgcagctgccccctgcgccggggttgcccctcgagcgctgcgcgctgccgcccctcgacccgggcggtctcaaagcctatccgggtggtgagtgcagccacctgcccgccgtcatgccggcctttacagtctacaacggggagctgctctacggctcaccggccaccaccgcttattacccgctcaaattgcacttcggcgggctgctgaagtatccggagtccatctcctacttcagcgggcctgcagcggccgccctaagccccgccgagctggggtcgctggccagcatcgaccgagagatcgccatgcacaatcagcagctgtccgagatggctgccgggaagggtcgcggacgcctggactcggggacgttgccaccggccgtcgcggcggcgggaggcaccgggggcggcggcagcggaggcagcggcgcaggtaagcccaagaccggccacctgtgcctctactgtggcaagctgtactcgcgcaagtatgggctcaagatccacatgcggacgcacacgggctacaagccactcaagtgcaaagtctgtctgcggcccttcggcgaccccagcaatctcaacaagcacatccggctgcacgccgagggcaatacgccctaccgctgcgagttctgcggcaaggtacttgtgcgccgccgggacctggagcgacatgtcaagtcccgccaccctggccagagtctgctcgccaaagcgggcgacggcccgggtgccgagcccggctatcccccggagcctggggatcccaagagcgacgacagtgacgtggacgtctgcttcacagacgaccagagcgaccccgaggttgggggcggcggggagcgcgacttgtaacgagtcttcccgggaaggggcg

SEQ ID NO: 5251 - DNA, 1474 bp, Homo sapiens
  source 1..1474: mol_type = unassigned DNA
ccgttcccaaaggctcggggaaggaggttgcgggtgggtggcgcggacctcgggtccccagccatcggcgctctcccggggccctctgacctcgctccttaaaggaggagggtccgtggcaacggtcctcctcggccaggcgctctcgggacgcgggggtgaggagtgagcgccgtggcccaccctactctccgagcggggacggagtgggcgacaccgcgcgcccggctgcacgcaggctctgcgcggctcgaggcggccctacagggggcgaggaggaaccccggagactcggcggagagagcagagacggagctcaccaaggggcttgccgccgcagagcgcgggagccggcactcggtggggccgagggcccggggacgctggggctgcctgacctgagcggcggccgctgaccgttgagggtctctgtggccgcagcgcccagacccggggagaagggcggcctccaagggccgggagcccctcgagggcgcggccagcgaggagggacagagggcggcgcccccggctgcccgggcgcgtagaacaagcagctgccgccagggccgacaaagttgctccccgaggggctgagatccaactttcgcttcccgatttagccaggggagcgcgaggccgcacacaacccggcgcggggggaaagccggctgcagctgcgcctcccatccttacccggctggtccctggcggggagcctgggcagcgccgaccaaagttcggagcggcagcttcggggcgcgggacgcggggcacacgggctcagctgctcgacgggagcccgacgcgcgctcctcggcgggtcggcgggtccggaagctccgctgcccgggccgggtccccaagcccgcagccgctttgactaaaataggcatcgcgacggcggcggcaggcggcggcagccagggctggggccgcaccgcgcacgcgcatgcgcccgccgccccgcgccccccggcgggcggagcccggcgccgcggccaggatttcccacctcgctcccgcgactccgctgcgggtctgcacacccgaggactcggtttgaaacgcccgcttatttattttcttgtcgcctcgctacaagattctatccttgtttgggcatgagtggggggcggcagtctcgtgggaccggcggcattcgtcgttcctccttacggggataattcgagaagtgcggtccgggtagggagagaaatcaggagagaaaatgagaaagagaatcctcgtttcccctcaaagttggacgacccactcgtatatctcctttttgggagattcgcccataactcagcacaaacagggaatagcccggaaagcgcgcgagttcccgtccgattgtggcgggggaggctgaacgtttggtccacacgggtgcaggacgcgggggtcaggcctcctgctgcggaggaagagggggaagaggccgcgcgggagggacttctgacacgcg

SEQ ID NO: 5252 - DNA, 675 bp, Homo sapiens
  source 1..675: mol_type = unassigned DNA
tcgcggtgcgaagcctcggatccgctgggaaccgcatagtctccggcacccttggccgcatgcttgtcagaggtgggccccgggaaacacactcgctgcccctccaacaagcgtccctcgctccccattggccccccggtccccgccccccaccgccccctcccgctccgcagcccccgagtggcgtcagcacgcccgccgggcatgggctttaaatgcccactagcgggagctcaggcgcttctgccctggagcgcggtcgggagtaaaatcgcaggagtgggagggtagcgagccagctggattccgagccgcggagcgcgctggctttgctccgcctgatgactccagagcgcgggtccaagcgccgcccatgcagcacccctgagctccggggaaggagagttaatgaaaaaacacttaaccgtctccgctgcggagagtcatgagctgtctggatgttatgtaccaagtctatggtcctccgcagccctacttcgcagccgcctacaccccctaccaccaggtacgtgtctcctctggggactttgggaaggagtgcgcgccccccgtttgcggcggcatggcctgtacgccaaggtctgctgtgcctccgcgcgtctcgggcgtccgaccacgaccggcgcagccgggatgcggggattgccggagccg

SEQ ID NO: 5253 - DNA, 1133 bp, Homo sapiens
  source 1..1133: mol_type = unassigned DNA
tcggctccgtagctctccgcgctccgacccttcagatcctcgggagcccaggggagccaggtgctgggcggtgcgtccggtgccgccgcgccccttctcgccacctctggcctctccgccactcgggctttccggccgctctggatgcctcggttgcacccctgttccatgaccccagcttccttccctaaccctcctcttggtcccttctcccccgagcgcgcgcgcacacacacactcggttcgctcccgcggagtggctctgggagcacgaccgacttcagctcagcaaaccgcggtcatgccgcccagactcctcgccccgaggccccggtccccgccgccgccgctttcgcgccgctcctttccgcctagacaccgccgcctgcggccgcctgggcggcagcccctgcggtcctcaaagttggccccctgggagggggcggcagggagcaggatgaaggatttgttgtaggaggaggattcacacatctgggcgaagggaggggcagcgccgctgctgggacgcggcgcggacccgcatcattgcgcgcagcagccgctgcagcagccgccggggaccgcggagccgggacgcccccgctcggcccgcgccccgctccccgccccacccccgcccgccgggcccagcaacgcagggtgcctaggagccgcgggctgcgcagggaggcgggcagcggccctcgcgcgcttctgccgcccccggagccggcgcgcggcgagcgcagggcgagcgcgcgtcgggcggcggccgcgctggggggcgtgaggcgagcggcgcggagagcggcaggggcgaaacttcgcgggccagatgcccgagggcgcggcggcgctgccaggctgccgctgctgcccctgcgggccccgagcgcgcctccgcaggcggcactgcccgcggcgcggcgtgtgcaccgagcgagtgaaggtatgtgtggcgggcgcggctggagctgccgccgccgccgccgccgcgccagcaggtcctaatgcctgtcacttcccaggacgctggcagcagcagcagcccggagcccccgagccctcggcaggtttgcgtgtccttccccgcgatctgattggataaagtgggggctcgacggtggccgacg

SEQ ID NO: 5254 - DNA, 1808 bp, Homo sapiens
  source 1..1808: mol_type = unassigned DNA
gcgcgccggcgctggggatggggtgggggcgctggggcacaagggcgcaggggcgcacggccaccgacagccgggtgcgcctagcttgaggccgcggagaggagccgaactgggatgggtggggggtcttcggcctcaacactgcctgccagccccagtgcgcccaagtctccccgccagagctgcccttctggaggggctcttcgcacgcactgctttccccattcttctggctggaattctccggccgtcactgcagtgtccagagatgctgcgctgtagacccgggaccccttaggcgcctcttcccgtccctctgccaaagcgcaacgcctgtacttttccagctccctctttccctcttgaaattgaaagttattgaggtcgctcagggttgttgctccagcagtttccttccccgcccccgagctcccccccgccccccacagccatcccccctcctctccccctccctgccctcctctccctcccccctccctgccctcctcctcctcctcccctatgtggtgctcccgggagcccagcccaacactggagcgtctcctgctcgcgcacgccagaagcagctcggggtctctccgccgccccttggccatggccgctgtgccgacggcgcccgctcccctgcgctccaggggcccccgccgctgcagccgcagccgccgcagcttctgagcccaaggggccgccgctgcagccgccgccgccgccgctcgcccgcccggatcccgcctgcggcagttgccgcacaacatgctacctgcggccgccccggcggctcctggaaccccggttcgcggcgatgccagccaccccagcgaagccgccgcagttcagtgcttggataatttgaaagtacaatagttggtttccctgtccacccgccccacttcgcttgccatcacagcacgcctatcggatgtgagaggagaagtcccgctgctcgggcactgtctatatacgcctaacacctacatatattttaaaaacattaaatataattaacaatcaaaagaaagaggagaaaggaagggaagcattactgggttactatgcacttgcgactgatttcttggctttttatcattttgaactttatggaatacatcggcagccaaaacgcctcccggggaaggcgccagcgaagaagtaagtgcagggttttttacgcgtttgctccctcccgccgcgttcacctgtcgggtcgctttgcctgtccggagccggctcccaactgcagcggtcctcccgccctgcgcctcgcagaggagatgcaggttcgggctttgggggtatggacggcgtctttcacccttgcctctcggcgcccctgccttccgcagcatcctagccggtgcgaggggcgggcggacgcggcgctaaggtggctcccgccccatggtaacttcaggttcgcgggaaagttcggtcctgggttagactcgcacccgggatttgtgctttccttttgaggatcggacaggggcacccagccgaaggcacttgggactcccagacgcaggatgcctctgaccgctgagtaaatgacaagggaggcgcggccgcggtacccgctcacctagcgcaaccgcctcgcgcggggagacctcggctgggcccttaggctggactccggtagccgaacgcccgctacccggccaggaagccagggagcgagcgcctgcgcggccgcatccccgacacgcaccagcggagccaaagggcgcgcgaggcgatggggttcgcgtgtctgcgcgtttgcagagctgccggacgtcccccgcccg

SEQ ID NO: 5255 - DNA, 1323 bp, Homo sapiens
  source 1..1323: mol_type = unassigned DNA
tcgaacatccgcactgctcatcgaagacccccgtgcttcagttccctctgtcttccatttcccccgcccatggttctcgcccccccaagccgttctccggaaccccttgccgggccggcgggaagcgtggaccgagcgggccttggccgcgtcttttccggccaggtttggtttagctcgcgcagcgcccgcgcagcccgccagggggaccccggcccgccgggcggcatctgaggagaaagcgtccgaggggcgtggagccagggtcctgcggtgcctgctccgggaatactgcgagtcggctggagctccccagccgctccggagaactgggggagccgggtccctggctcggtaaccggtggtcccgcggtagctagaggcgggccccacgggtgggtgtgtccgtttccgcacgccagccttccagcccgggaagagcgcctgcaagcgggtactttgttcccaaagatgggttttgtctgcgggtgatttgggctctcgaagtgcaactttgtggccgggacgcggatcggccggcctgggctcctgcagagcagatcctgtctgcgtcctccaggaggagtgggtggcaggactggggtttcccacaggttttggggcggcggcgagattggcacggtccggggtcgcaggcgcgcagccacgcccctggaagtccgccccggcccccgcccccaacccgcctcttcggggctttatggcgtgaggtttggggctgggatccatctggagccgagcagaaaacttttcccctcccgttcccggtcccttttgtctttcttggacgcggtggcggcgccgcctgagcggcgactccctctcccctgcccggcttgctgcgcccggtgccctccgagggcaggcgcgcctggactctgcgcccggatggcggcggccctctgtgagcaccggcagcggcgcatcccctgccccgaggcctccggtgcccccccggcgcgggcataggggcgcccccaccctccgtccgcttgcaccccttgccacccgccccctcgcctgactcatccgcccgcggtggccgcccgagccctgggatggggagggagaccgcggctgcccgcggcggccgagattcccgctgacgcccccgaccctgccgccttcttcgtccgcctccagaggcgcccgacgtcccgacagctcctggagtgagaccaggactgagaacagggagaggcgacccgacccccagggcccggtgctcaggacaggtgaggggaaggaaagggtgctgacgggagtggggaggtgggtgggcggccaccgcagccgaaaccg

SEQ ID NO: 5256 - DNA, 1501 bp, Homo sapiens
  source 1..1501: mol_type = unassigned DNA
tcgacagtggctctccggcccagggaggagagcgcggtcgcgggtccctcccctcagcctggaggctgcagccgctcgagtcggcccgggtgggggcggggtgggggcggcgcggagggcacggagattacggcggcgccacccgggacatccagggccccgaggccctgggcggtccccacgcgagatcgcaaaccatgacaataggcagtcacccgaggtcaaataaaaacggagtgggtcccccgcgcgccgccgccccccgcgtccctggcggcctcccccgaggcccccggcggcctcacgagcccgcagtagccggtggcgacgtcgcccccgccccacctccctgcgcaagtgcgaggctgccggcagcgcggcgcacgctccggccgttcccggcttccgcgcaaaacttccatcctgtccacgtgaagttgtcgctgccttagagagggggaaagagctgcgggaaaagccggggagtgacgactgcggcggctgggcgcgctctctcattttcttttcttctcctttcccccctgtcgcagtccggagttttggctcctctcctttcctcctccccctcggagccggcttctccctccgccccgcttctcccccgcttgtgtacgctatttgttgtggggtggccgaaggggatgtcctgttttcaccagaggcacagcgcgaaggggaaacttcgacactggaaggaacgagaataaatacttaattacggacgcactgaaccgcggctgggacagacacttcgggaacccgaggcggaccgggcgacgaggtgagtgaccccttcttccaacccccgccccagggctcccgggggagcctgagttgagagaacccccaaactttccgggaaagtgcgcgaggctccgccggggacgccgagcgctgggtactgaggacgcgcagctggacggtgcgtgggcgcctgcgtccccggggggcgcttggaggccgggtgccccacgcctgagggcccgggccgctcggaccgcagcggtgctctctgccctagaagacgtccccaagccccaagggtcccttccgagcctgcctgtcccttccggggtcggcgcggagcctgcgcgtaacggagttcatccagcagtccagcgcgcggcttctacctgcaccccgcctccacctggcagaggcgcgagcatcggggtctcccccacatctttcttatgacgtgtattactttctgatgaccccctagatggtccaggcgcgaggatgctgacccagagtccttcggagggtcacaggcgcctgggctttcccggtgccgggtgcgtgtgtactttaaaggctcgcgttctaatctccaggcactgatcgggcttttcaactgcggcgatcccactttaatagtttttatgtggcgtggactgaatgtctcctgcagtttgccagggtcggtgaaattagaggcgccttgtcagagcagtcgcgttcattggctcgagtagcg

SEQ ID NO: 5257 - DNA, 1744 bp, Homo sapiens
  source 1..1744: mol_type = unassigned DNA
ccggtgggtcgggggcgtggcgagaccctgtttcagtggagggagggcttatgcattgccgagacgccgattatcagaccttgaccctgtcgctttcagaaaaaccactggcagaagatccggaccatggtcaatctgccggtcataagccctttcaagaagcgctacgcctgggtgcagctggcagggcacactggtgagcagtggggcgggtgggcgggtgcccgcgacgggaaggggctgggcggcgctgacggatgccggtcctcagggagttttaaggcggcgggcaccagcgggctgatcctgaagcgctgctcggagccggagcgctactgcctggcgcggctgatggctgacgcgctgcgcggctgcgtgcctgccttccacggcgtggtggagcgcgacggcgaaagctacctgcagctgcaggacctgctcgatggcttcgacggaccttgtgtgctcgactgcaaaatgggcgtcaggtatgcgtgccctgccaggtcggttggggggatcaagtaggggtccggggccgggacagctgcttgagggggacccggggcgagtgctcgaaggggtctccgtgtgcgccccctcatgccctggccgctgcctgcgcccccacaggacttacctagaggaggagctgaccaaggcccgtgagcggcccaagctgcggaaggacatgtacaagaaaatgctggcggtggatcctgaagctcccacggaggaggagcacgcgcagcgcgccgtcaccaagccgcgctacatgcagtggcgggaaggcatcagctccagcaccaccctcggcttccgcatcgagggcatcaaggtgaggcaggcgcgcttcgctggcaccgccgcagccccactgcgcgctgtctttcccgatcccccgctcccgccccgcctgcccctccgccctctcccaccgcctcgccgtcccctgcaactgggaggtaccgctgctctacgctgtcctcttccccactggcgggcccggggcccctgacactcctgtcccacatccagaaagcggacggctcctgcagcaccgacttcaagactacgcgaagccgagagcaggtgcttcgcgtctttgaagagtttgtgcaaggagatgaggaagtgctggtgagagcgggatcccaaaccctgaggtgttggggagcctgaagccgaggactgcccctgtcatctggcccagtgccctcggctgtgtccccaccatggccctcaccgcgctggctcgcaactgctctacgctccttcccttctgggccacgctgggcggggccctgggtcctcctcctggcggcatttgccaagcacagcgtgggtcccggctcctcatcgttagcaggggctcatttggcgtttagttaatttgccctcctctcccaccccaccctctgcagaggcggtatctgaaccgcctgcagcagatccgggacaccctggaggtatccgagttcttcaggaggcacgaggtaagcggcggctgcccgggtgcccgggccgcgagggctagggcgggaacccggcaagggcgtctctgggcagggccgcggcctgacggtgcggggctcgcaggtgatcggcagctcgctcctctttgtgcacgatcactgccatcgcgccggcgtgtggctcatcgacttcggcaagaccacgcccctccccgatggccagatcctggaccaccggcggccctgggaggagggcaaccgcgaggacg

SEQ ID NO: 5258 - DNA, 1801 bp, Homo sapiens
  source 1..1801: mol_type = unassigned DNA
tcgtccccgggcgacaggggttctcccacgtgaaccgacgtcccgggctccgggcgaggcgcagggctcagggcgcagggcgggtcccgtacgcagggcgggcgcgcgggcatctttgtggccaggcgaccccggctcgctctcccggagcccagggactcccgaggctggcgcgggctgcccgcgacaaggtgccagcagcctcgggctcgcgaggagcagctcccacccgcggcttccgagtccagctctgtccctccgccatcccctagtcctccggcatttattcagggagacagggaggcagagagaagaggagaaagcggccgtgtctgcacccagcctctgccgcagcactcgatgagggacagcagggaggctggcggggaggcagagattaaactatgattccatcgatcacggaaagaccaccatcacctacagcaaaggaggctccgatgcgcccacccgggcagcgactcgcggttggtgggcgttcctcgtcctcgccccctcggtggctgtggaatccaccccgcgccgcacacgccaggactccctttcctttgactaaggggaggggaaggaacaaaagagaccccccaccccctatacatacatacacatacacacacacacacacacacacacacccctccggtattttactgctggtcaaaggattcattttcgcaacctcttcttcgaacaccttccccacctgagcagtgcattttcccaaaggtaaagagagataagggaggaaacacagcacccaaggtgatcagtcgattggacactgttgatggcacattctcctcgttcccaaccaaccgcacaaaacccgcaacacctcgcgtccccgcggggtctcccgcgcccctggcccggccctcccggccgcccccagcaggcgccccgctctccgcgggaactctgggacctggccgagcgttccccggcgggcaggacactcgcccggttccctgcagcagctgagggcggcgagcggaccgcgtccaggcagcgacgcgggattcaacttcccggacccgcggcgcggcccccgctcccgctcagggcgccgcggccacagctgagaccccagcgccgcgcagccgcccccgccggggcatgggcggtcgcgctctccgccccctccttccttcacctcccccctaccttgaaaaaaatccatccattggtgcaaagcagacattttgatgtcatttacttagcaccgcttgttttggaggcagcgtcttacccggtcgcctggaggtgtgggcagcgcgccgatgggtccgggggagcggggctgggcggctcggtcctctagcggagccggtttgctgccatccgcccaacttcagcacccagcgggcgaggagagagggagagcggcgaggatgcagaggagggggagggggaggagggagcggtgggcggggagggagcgagagccgctcggcagcgcgcatgcgcctcgcgggccggcgcagcccctcgcccggcgcggccggaggggcagcttcccagcccctgcgcgcggccgcgagagtcccggccccgccccctccccgggcggcccccggccccgcccgacctcgcgcgctcgcctgggcgcggcgcccaccgtgcggaggggctcggccgggactctcggcttcggtgacgcccgtccggagcttcgcgggaggcccggagtcccgagagcttccctgggtgacagcggctctccgcccgggcccctgcaactccactcgcccgtagcccgcgcgctgctgtcctgggctgcgcg

SEQ ID NO: 5259 - DNA, 1801 bp, Homo sapiens; identical to SEQ ID NO: 5258
  source 1..1801: mol_type = unassigned DNA

SEQ ID NO: 5260 - DNA, 1684 bp, Homo sapiens
  source 1..1684: mol_type = unassigned DNA
gcgctgggcggtgagttcagccaggttatctctgcgaggacaccggtcggcggcggacagcagcacgcggcgtccaggacccggccttcctagagcttaggtcactgtagcctccaggggcgctccgagtccatctggagggccgcgaggcttccaggctggaaggaggaatagggagaaggaggaatagggagacctggggcagtgttacaattacagaaaagggagaggcgaggtccgctgagtccttggcctgggcaacaaggcacactgaaaactgggttccttttcgacccgcatcgtgcgcgccctagaaatgacagccagacggagcagggtctaaggacgctgaaaacccctgacgtgggcgcgccgggtgcgggtagggacgtggaaggactgggctagccacaggaactacagcgctgcggaccgggtgaggggtcccggcccgagtccccacttggggcgcagaggtgtttctgtaaggggacaaagggcactcctcggcgcgatgggcgacttccccagccagaaaatgagagggttagacgaggggaggaacttcctcagccacttggcccggcacagcgaccgccccaagttcagaaccgctaagtcagtccggggcgctccggccccttcgtcccgcgccccgcccgcctccagcccgggccccgccgcccccgtcgcccctgtcgcccgggtcgcccccgccggccctggccccggccccgcacaccggcagggggcgcccgagcgcagctaaaaggctcggcgggaggtcggcggcctcagtggcggagcgcggctgccggtgtgcggccgggagcgatcgccgcggggcaggggcgcggcgggcaccgcgcagagcgcgcagaacagacggacggcggcggggacccgacggcggcgcctcggcactccccagactccggccagcgcccccctgccagccgcaagcacccagccccggcccaccccgggctctcgatggcccccgaggccggggcgaccctgcgcgcgccgcgccggctgtcctgggcggcgctgctgctcttggccgcgctgctccccgtcgcctcctcggcggcggcctcaggtacgcgccgcgcccgggcccccggcgctcctcagctccccgcgcaccctcctgcgctcgggccccgtcgtcccgctcagtgctggctacgggtcgtgtcactagcctgtgcgtcctcgtcactcgcgggtcggggcacttggcgccctgtgtgggtggcgggagcggggacgcctcggtgcccggggaccgcagcgcgctggcgtttaactttgccgtcgcccgccttggagtcgggaggctccagccgtctaagtgtcccgggagattcaggcacagcggggaaaaaaggaaaagaaaggcgactttcagcgtgcggactggggtaatgcctttctttgcccagaatttctcgggagcgtaggtggtcatcctactttctccgcgttcacctctcgcgaggcaggatgacgggcgcactcgggagaccggagggaggcagagcagggctgttctagaaggtcgtgggggaaaggctgcgagctgccgcagggcgtcgggtgcctctgcgctccagaggagaagcgctccagtgccagctcggctccaggcggcaggaggcccgcgcgcccggggggaacg

SEQ ID NO: 5261 - DNA, 6657 bp, Homo sapiens
  source 1..6657: mol_type = unassigned DNA
ccgggctcggcccgctctgtctccctgttccctggaggtctgggcgcccccgcgcagggactaagggctggacagccgcaggcaggggctccgtccttggcctccacccttcgtgtccagcaatcccgggagcaggcggcggcacttcctccatgccccggcctcaatcacggtctcagtccccccaaccccgtcctgcaggaacaagtgtggtagaggctcggggtcggagggcgggcggccgtcccgcgggctggacggagtttctgggctgcggagaggccgttggacccacgtccggacaggagccccgcgcgcccatccccggcccggccatcctcggggcgcgctgtctgcggcctcccgcgccacccccacccctgtcccgggacctcctccgggaaagacacccggggagcagccccctcccctccagtagtcccctcccctcccctctccctgccctcttgacggtgtggggctccccggccggaggggcgcggcgctggcagcggggtccagagtgtcgcgcccagcgcgcgctgggggtcccgggctccgcagctccgcacgcggccggtttgtgaagcggcgcgcgggggcttagccgggcgagggcgctcttgagcctggtttggaatttttagcccacacgaaagccgcaggctggggaaggggcgggtgggagcgggagacgccctgggaagccgtgagaccgctcggcgagggctcgggaccaccagggagcgacgggggacccctcggctcagagcccgagggcgcgatttcggatccgctgggattccggaggcacatgaagggagagggaaatccgctaaaccgaaccttccgggaatcggaaggcgccgggccgctcccacgcctccccctcctcccggccgaaaggcggggggcgacgcgcaacggggagggaagggagggaggggtcggcgaccttaggggagggcgagtctctggggacgcggggccgccaggggcccgacgaccctctcgctccacctccccgcccccaagtgccccgctctccccccgccccgcaaacgcgcgtcctgcgggctgtgctttggccctcgcggacgcgcgcgctcacagagggtctgacttggggtcaacttccacgaggttgccgggcgcctgtgagcacagccgtgtccccacccaggggcccacctcccagcgccaccagggtcccgacccccagaccttcggacgcttctcttccaaaccgaagcctgggagcctctgggtggcctggggcgggggcagggggcgagcggggcgggccaggaggagggggcgaggccgccactcggcttcccacgccgcccccgcggctggctccaacttcccctccggagcccccctccggccaccccccagcccaccgacgtgcgggcagcgaccccgccccccgcccctccggtcgcccccgccgcggcccccgccccctccccatccctccccgcgcgctctcccacatgaaaccttccatcacgctcagaaagaatgtgctacaacctcggcgctgccgcggccgccaccactgcgcccgcgcccgagcccgagtcggagccggagccgccgctcccccgcctgcccggccagccccgggctccgagcgcgcggtccccgccgccgccgccccgcgctcgccccgcgcttgacgcagtgagcgccgcagcctggctcccgccggctccgctgggctccgggtcgcaggccgagtccagccgggcgggctccgggaggggccggcagggcgggagggggaggagggctgtctggagccagcgagcccggaggaggaagaggaggaggaaggaggggaagccgccgccgccgccgccgcgctcggggaaccggggtgcgcgcgctctgctcgcccgcgacagtgcctccagcccggggcccgcaccccggcccaggtaagaaggggcctgaggggcagggggctgtccggggccgggggacccctctgtcgccgctgcgggatcggagggtccccgcccctaggggaggcagggaagaggatgctctctggggggggcggcggggggcagcgcagggtccccagcggctctcgcagcccgggccaccccatccctggtgccctgacctcggcgtccgcgccagggccgagtctccccgcccgcggggctctggatgcggcgctcggggcccgcggctcccgggcgtccccatccacccacccaggttcggaggcgggcgcacccgaagttagcggccgccgagcctgggccggacaaacttccctccccgacgccgcggctggaagggccaggactccggacccctagggctagggaggcgccgcggggaccccgaaactttccggagcgcgctgagagcaaaaagccggctgggcagaaagagggggagggggctgggcgcgccttcgagtgcgctggggtagccgcggcgccccaagttgaaccacagacgaacccctcttcatctgaaacctggtctcggagtcggaggtggggagggagtgggctgtgggtgcctcgacttcgcaaagccggcgtgggggggcgcagcgccccgccccgcgccgcttgaacctccggagggggtgttacgggacccccgcccccaccccagccggtggctgggctctgccgaccgctgcggagctcccgggaaggacccgctcgcggctattaataggcgtcggtgaccctagcctctcccggtccgggaagctggcgcggcggggctgggctgggctgggctgccgagtggggcgggaccccggggcccagagcggacccccagctctcctggtccctcttccgccgctcttccctccctgccgcctgctttcctcccattttccctcttcgatctcggggtgtcggcccccccccgaactttttctcttcccaaactgcacggtggccacccggtcacggccctgggccgtacccgcgcaatctcagcaccattcccgaccgagtcctccgccgcgggctgagcgcgagtccccggggccaggctgcccagggaggagcagggacttcctacaatccgcgcccttcctcccaacccacggcgagcgcaacacattcgcccgcccctgcggccccatctgagggcggggagaggtcgctgggggcagcttcgggggttgtggagggcaggggggacccgcgaagctcctggagcgtttagggatgcagctcgggcggcgtgtgcagggaggaagcagcgtcccggcgtccccccttcagcgtcgccttcgcgcgcctcgagggcccaggagggttcggtctcccccaccccacctggacactcaggtctgagcctgagtggatttgaggatctgggggacggggaatacggagtccttcttcctgcctcggtgtctgcagagcccagccctcaggcagcgtggggatctttgtccccagggccagcgccggccccgccccccgccccgttaactccgggactccgccgccctccaggttccaacctcccagcttcaccgccgcgtcctctccccggttctgggtctgggggaggggcagggggcgtggagcgcggcgttgggccccggacagatgtcctcgcggcggcggcgccggcgtccgggtaacagcaggccgccaatcggcgcggccacgggggaggggcgacccggccgggactccggggactcggtcgcagccggacggcgcagcctccgctcggggtggggggggggggcggccgcgaggactcgacccctgccgtgcagcccggcctccagtcctctgccgtcccctcccccagctccaggtttcgctctctgctggggtcctggctcctcaggttgcgggatctcgcctcccacggccccgcgcgcgtacccctacccgcccctcaagttgacctctgaggttctccgtggatctcagaccccgagtgaccgcagaactgacctctggggtcaggcagtaccggtcaagggcgctctgaagaggccctcggcctcagtttgcaccccgaggaaatggactcatcatgcctgctcctgggaagtagcaggacgtcctggcgcggctcctccgggcaggcgcccagcacagcgcagggcacacgggggacacctgcgaaggcaaaggaggctcattccagagcttcggctgcacttggccagcacaggcctgggggaacctgctggaaatggggatccagtacctctcttggggtttatgtttggcaggcggagtggataggctggggcccggagcccggtggtcatcttctgcacaaggctggccaggccagaagctggagggtagcttactgggaccttccaagcgtgaccaaggaagctctgggggccgaccagcttctccctagtggagctgcagctggggagacctcacagacaggcagggaggagagggtgccccgctcaccgccggcctcgttccacaggcccaggcctggcacatcccaggcttgcagtatctatctggtgggtaaacaaggacctgctcttggcctgcggcctggctctgaccgtggtccaggtcggggcagagggagaaaggccacagcttaggtgttccaaaccaccggtgcccttcctgccggcccctggggctgtgctgggtttccagggcccctgccccccagtatttgcatgaaatcgtgggggcgcactggctttcgtcctagcactccccttcaaggctctgcacccctatcacgggagccccacccagccagccgaaggaggccacaagctctaaattactaaattcgggccagtgctgggggcctgggagccaaggcagctcagagcccactctccgattctggctcctggagaaccctaggacccgggcgtgtcaggccctgcagccgggctaggccggtccatacaggactgaacggcgtcgtgggcgttcattcacattccctctccggtccccacacactataggatttatcttgatttgctgcctttgaattgagtcaactcttttgtatgctcgttgaattgcccagctgctggcggcgagcggagagcgtgccgggggtactgaggccgggaaccagaggcgggcgggggacaggaagcggggagggggcgccggcggggacgcgcgggctgcgcggggactggagagggtccccaggcgccggccgttctgcgaacgcgggcttgtccaggcaccgccggggcctgcccggcccgagcgtggagtcccgaggctcctgccgggggtccaggctgcccctggggctctgccttcgacgcgctgtgtagggccagattctgggcctctcttgactcagtttcccttcctgtaacatgcggacgggggcttccgcacaggcaggttgtcagggtgaaactgagccgaagagtgctccagaaccccctgaagtcctcacagaggttggggtgaatgaaggaaggaagcggggccagggctgggcagaggaggcccggcctgcgccctgcgttctccgcccctaggtccctgccctcccggataaggggcggaccgacgggaggacctgagaacgccttggctttgcttgaggtggtgggagtcgcgggtagcttgttcagccaacagctgtcgcccccactccccccacccacccacccaccccctccaccttttagatgtgggcggggagggccggggacggaccgcgaggacgccccctgcgctttctaggacctcccctccttccccagcccctgcgcgtcgccgggagagggaaggagcgggttgccgcggggagccgaggagagcagggggctcgggaggccagggagagaaggggagggccagaggctccgagccggactcgcggcggaggaagagggggtggaagggagcgcgcaggcgggcgagggagcgagggagggagagaaggagggagggagggagggaaggggggcgggagggggcagggcgagcttgaattcccccccggccgcgcggcgaggggcggggccgcgcgcgcagatcgatgggcgaagctggggaggaatttcaatcccgggagcgaagttagagcttgaaggacggcggcggctgcgggcgcagccccggaaccgaggccgggcgggcaggtaagcggcgagcgcggccgggcgctgaacctgggggacttgggacccggaccacccccggggagcggcgcggccaagccccccgccacctcgaaccccgggcgtccccgagtgcgcagcgtgcgcccccagcccctgctgcgcccccaggcctggcgcgcgatccgagcgcagcgggcaaagttggaggaacttggcggcggcggagcgggcgcaggctcagcccgacaaagcccgggggcccgggtcggggtcgctgccgcagcccgcacgctgccccgtgcctccgagaggtcccttccccagcgcctctctcccttccgtcccccttcgccgtccgcaccctgcccggcgccccccagacgcggccccctgcccttcccttcccggaaattagggggctgtcctcacctcctggccgagtcgctgacccctccccaggctcgcatcgccctccctgctgggccgccctccccccgacgctgcgagcctcctcgctccgcgcggggaccgtccagtcacgcacg

SEQ ID NO: 5262 - DNA, 546 bp, Homo sapiens
  source 1..546: mol_type = unassigned DNA
gcgggcgccccggttactccatcccagcgagaagacgaggctgcctgggtcctggttttctcgggcgggggtcaggggtccgccgatcccctctagcgctccgggcggcggggcccgagaaccaaggtggcctccgcggcccccgccgccgcgcgcccctccctccctccccgcggacctccgcggccgccgctcacctcgcgtatttcgtcttctggaaatccagcagccggggggcgaacatcgcggcgcttccatgggaatctggccccgggctcagagcgcgggtagctggcagagcctggggggcgcggcggcggcagcagcaggttggagggcgcgcggcgggggccaaggggacctggtcggcgcccggagccggagccggagcccgagccggagctggaggcgcccggagccgccgacgccaaatcccgagcagatggtggcgggggcggggcgggcgggggcacgggggggctcccgggctcgcgctgccaatcgcctaagcccggccccctccctcccgcgaccccgccgcctccg

SEQ ID NO: 5263 - DNA, 288 bp, Homo sapiens
  source 1..288: mol_type = unassigned DNA
tcgcgagaggaagagagctgagccgctgtaaccctgggcctgggattgcggggacgggacgggtgggaagcggccaaaggcgcagcggcttctggtcagagccgcagaggcctgagacgtgggccgcgccccggcccaggagaccccgcggccgcgccctaaccctcagtctcccgactgcgactgcgacccgggaaaacgcctacgtttttggaaaggaagtcccatcacagggagctgacccggtgtcagcgcgcagcacgttcccggcccgcagtgcgccgcgcg

SEQ ID NO: 5264 - DNA, 947 bp, Homo sapiens
  source 1..947: mol_type = unassigned DNA
ccgtatctgttccgcggtccgcctccctgcacacacgcccccgagccgggagagcctccgcagcacccagagaagagaccggaacacaaaggatgaacgaatggggagggggggtttggggggttgggagaacgaaaataccagctgcgcttccaacatccaaggaaggaagtggcagcggggacggggagaggatgggaaggggatgctgactgcgagttggggcgggacgcggtgatgggaggggaccgggccgggaatgcgggaggcgaggggagcgacgggacctgccgttccggcggccgggcagccaatcgattcgtctcccctaggaaggagcgaggggagggtggcccagagagaaagcgccgcgcggcctcggctgcccccggcccgggacacccaaacagaccaaagaggatccggagtggagcccggagcggatcccgcagcccgcgcccgccgcgcacttacccgcgcgcccgctgctgggtccccggcagccgcgccccctgcgctggcggagtcggaggagcctgcgctgggccggcggggggcgggcgcttggggagggcggagagagggcccgcccgccgggacctttgctcggtccgggcgccccagagccgcgggactggccgccggaggctgcgggaggggcccgggccagacctcccagaagccccagagagagccgcttcccctccttcgtgtgactctctgggagccgggttgctgacggcccagcgctcagccggagtccccgcgcgcttttcgggactcacccgggagatgtcggggcctctcgggaagagtgggctgcgcctgccttccgcggccgcctcgcctcttcgctgcgcgggaccgtggggtttgagagcggcgcctcctcgcggggccgaacccgccacccacagtggagtgtggactgacaccgcggcctcacg

SEQ ID NO: 5265 - DNA, 1313 bp, Homo sapiens
  source 1..1313: mol_type = unassigned DNA
ccgtgtcacacggcgctgggctctgcaagctgttgcttgcgcagtcgcccccgccgctgccgctcccgggcgggtgcaccagggtccgcgcgggcggggcggggtcggggcgggaccggggcggggcctgccccctcgacgcgccggccccgcccctcgctccgtccctccccagcggaccgcaatgatttagaagttcaggaatcccacgtgacgtcaccgggggggtgatgtaatgcactctaaatagaatgtattgtaatctttgctcagtccaacgtggtcccttcacccgggctccgctcttgccttctccacacttgtttggtaagttcctaaaaatacggctcggccacttctggggcttttgcatttagccacttttgttgcacttgccgcaggagccatctcgggagtgtacttgtttgcaggggttggttctcggcagcagccgcgaggttacttggtccagtgggcaggtcacagggcaaggagtagggaagatgcgatgcatttttttctggagggtgatctgtgtttgtaaacattttggcggaccagagggaagtccggccccgagtgctggtagactgtggaattcggctgtgtcctgaggccaccctagagaccccgcgccgcgtgagtgccggagcgctcggtggccgccgcgccgcgcgcctggagggatgctaacgtggagccggcgccgagtccgcccggcgtgcgtgcgtgtgtgggagcgcgcgagtcccctgacgcggggaccagttatgaatcgggggtgtgtgtttgcctccagagacctggcaaggtgcggagccctccagaagtgcggtcaagcggcagcggagacggcgagccaggaacctccccccgcgtccccagcttcccagcgtggcggcggaacccccggagaaagtttgcaaacttccagcgggcgcggcgaggacgccgggtcacctagggggcgggtgggcgcgcgcgcagggggctcgctctccccggtgcggagctgcagctgccacctctcccgccgggctgccggctgcagcgggtgggcgcgcgcccggggaggggaggtcgccctcggagggcgcttggctttcgctccaggcgctccgggctggagagcggcgaggctccgtccgctccagtccactcctccggccgcctcctgcctccgctgctttcttgctggcatcgttacctcttcccggccgctgccccaaatgacagctccggctcgagctttggcggcgcccaggcaattcccaagacctggcggcggagtctccccctgcggcagattctcg

SEQ ID NO: 5266 - DNA, 848 bp, Homo sapiens
  source 1..848: mol_type = unassigned DNA
ccgtctcctcgcccagctcgcgatgcccagccaggcgcggcgcgcgtttgcccggcactttctcggcgcgctcccccttctgcgcccccagactccgacttagagcggactccgatcgcggcaaaccatggccccaggtgcgctccggaggcagctgcgggaaccagccatggtcccgggctaatgcccagggataagcacagggatagggatagagatagggattgggattggactccagctccaagagaaagcacctcgggtctattcgtattctccccctacccccaaacaaagccacagaagcgatcagcgcgcagctaaagggtttggaggtgaaaaggagggctgggtggggaggagagaaagtgagaagggagagaaaagcggcggctgagcaaagcgggagccggcgcgggcggtggggcctgacccggacgccgcgcacccggctccgccccgcgcccagcgccccgctcactccctggccgcgcctgccttcgcgcccctctgttttctctcacttaccagcagctctgctgacaagcgagaaaactgacaagtgagaaaagtcgtctgtcagcgcccgggctggtgtctgggctgtcaccgcgggcgcggagggaggggcgcgcgggcaccgccgtctgccgggcacacgctgggctccgaccccggccgggcacactcacccccgcagggcagccgcggccaccaccgacctgcggagctgcgtgggcttccggaaccctcacctcaacaagagctcggctccgcgcgcaagtaggagggaagggaaatccttatcctcccggggccagggcacgcagaagccgcgaggcttcgcg

SEQ ID NO: 5267 - DNA, 2406 bp, Homo sapiens
  source 1..2406: mol_type = unassigned DNA
gcgcagcgctatagccgcgactgcggcggcggcggcggcgcagggggcgggggaggagagaagcgcccacttcgtcccgctgcctccgcagcagccctggccctagccccggcgcatcagagcggtccttgggaatctttgggcttgttgctccggcggccgccagctgggagcccaccaccgctcgatggtaccgaaccgacccgtgtagccccataaccccagcccaactccgaggagctagcgcagaccgctctccgccctcagctgcggcgaggcaagggctggcagcgctcggacgcctccgtcttgcccttcccatgcctaagcgcggggaattacacgttcccggtgtagaacagacgatcggggctattagggctgggcggtgggagtgggggttgggagcaccatttttggctggacgtgtgtccagactcatcgtctctggtccttaggaccccatcttcctctgcatctccaggtgtcggcccctctgtacccgcctcccacggggctcgtccggcgaagggcagccgcagcccacatctactccccgccctcaatccctgccccctctgcccgccgcagtcactcgcctggctgggagcaagcctcccctctcgctgagggtgcagagagcgcctagggcgccaagagtagaggggccaaagttcaagcgccatcagccagccgaaggccctgagcccccagggccgcggccgggacgcagggaggtcaggacgcgacgctcgcctcacctgtttctccagcggctccttggccgacagcgccggcttgggggagggcgcgcggtcgcagacgcagccctccagcaggtaaagccccgagggccgcgagctcgagtcgctctcgaagtagaagagcaggttctgcagcagcgcgaaccacttggtttgccattttgtgttgtccgaactccgcttgctcaggtagcctttgcgcgtgccgtccttgcgcgccagcagtcccagggacgcgacgtggccatcattcagccggatccccttctgcatggtgctcagaggccagcgagaccccacgcgcttacatcttctccgcgcagcagccccccgtccgtgcgcgctgcgcgctgcctctctctggcgctcgctcgctcgctccctctagctctcccctccccccaaatatctacactccaggatctggcgccgagccgcggcttcttgaatccagatataccattccccgctggaacctcttctccgctccgcagagccccagtacccggaagatgccgcccgaccctcctccggtgccgggcaaactgagggactggcgatctgcgcgctggcgaggggcaggcggagtcatgtgacgccgatccctcgaagagcccgtttcagcagcgcggacagggacacacgcacgcagccccgccgaggcgcagagccgcgcgcaggctgcaacttggtgcctcctccccctccccagacacacacacacgcacacgcacacgcacacactcaaaccctgccctccctcccctcatctccccttctctccctcggatgttaaaaagcaaatcagatcaattttcgtttaacccaatgaaaccccgaaggctcgccatcccgggagtttgcgtctttgcgccccaccgcggcgcactgtagacctggggttaagtgccagttgtcattttctcctccaaaggctcgccccccccccccactttatttctaatacgaggtggaaggaggaaggtgggtggcgaaatagagctgcaaaagcgtccagtcctagtctttgcatagtcagccgggtcacattgaattccagcatccggctgcactcccggcggcttccccagctacctgaggacagtacagggggtgagatggggtggtggttggtgaacgttggttactttattttatattattttattttgagagttgccataattaccggcgccaccccccgtgcaccctgaggtctggttggcgagccgctgctgggagttttctgcaaataccccccaaagcctgaaggcgggcttcaaacgcaggcgccggggaccatgggagccttcaaatagctgcgctggcgcaatgataccttaatgatagattttccgttcttatttttagctctcattcgcctacacagttacacggcatttatccgagaacgtcacagcgcccgcatgctgcaccgggagggcgcgcgggccgccgggcgagccgggagctggggcggggagcgcgcatcgctgtctgccgcagagggcagcgagctcgccccgacccggagcaagccgcgcctggcccgggcgctttgcagcggggatgggtgcccgcgcagccctgtgaaggaaagacaccatctttccgcacggaaactgcgtatacccctcccccg

SEQ ID NO: 5268 - DNA, 1218 bp, Homo sapiens
  source 1..1218: mol_type = unassigned DNA
ccgcgcctgcagttcgtgcacctcttcccggagctgcgccagggaattacggacgaactggaaggggtcgagaagggtcttggccaccacctttagctccaagccttttcgctttttcagatttgggatcctccccggggaggacctcctggcgccccctggcagtttcccgccgcctagggccgacttttccacctccagctcccgggcgggggaggccccgtacggccgcttagacgggctggggcgggaagattgcagcggctttgggtttactccttgtttcttcataatccctagtggagctgggtcaatttcaggcacagcccatccgagtcaggcgaggtccagaaaggcctgactcgcctggcagcctcaacggacttgtccccgcagccgttgactagccgttgacgagcggacctcccggtcgtcatggcgactgtgaaatgtagggtggagcgcatgcgttcgaagccattcgcgcgggcagtccctgcgtgtccccctgcgtgtccccccacgtgctccccagcgcgcgcagcaccccgcctctgcgcttccccgagcgtgcagcttccggtgagggcagccccacgcacagcccccaacaccctccccagcgcctgcagccttcggtgcgcgcagtccccaagcccacatgcgcagttctcaccttgcgcgcagccccacgtacagcccccaacacgctcccagccccactggcgcagaacccatcaccgcttgcccttcacgcgcttcattgggagtgcagctcccaccccgagcgcgcagctccacgcagcctctccacactctccccagcgcttgcagcaccccccagtgcgcacagctctgccagtagcttcccggcgcgccgcccctgcaccgcttcgggccataaccttgctggcgactaagtctgaagaacttcctgtggtttcattcttttcttcaggtttagtcttagctctgacattttaaccaaaaggttacacgttaattaacgaggtattaaaggggaagatctcagctgaaagaaatgactgtaggaagtgtgtcagggaagccaacggaaccgctggcccgccggtggtgcgcccggcattaggaaagtctctacgatcgctgaggtatcgggcagtcagtgcccgttgccaacgcggagggaacgggcggagactgcgggcaacacgtggcagagccggcgtgagtccg

SEQ ID NO: 5269 - DNA, 1848 bp, Homo sapiens
  source 1..1848: mol_type = unassigned DNA
acgacgaaggcgcgcctctctccatccgctcacaccacacccccgccctccgaagcatagcccgggctggagaagccccagcggcggcggcccccgcggcggaggtccccgcgcgcacccaccatgcctcccgcctccttccgcccatcccgagcgccgtgcgcgcccgaagcccgagccgtagagcgccaccgcgcaaaggaaggagccaggcgcgtgcggggctcgcggagttcttctgaaccctttggatgggggcggaggcgaggggcgccgccaccactgcggcaaacttcgtcccccctccgggaggtgaaattctccaatccgtctccggccggtccgcgggtcggactcttcggaaaggaccttccaggaggagggagcgaatgcaagccttgctcggacgcctcaccggcggctctctaaatctgggcgccttttgacagccattttcactccatcccgtccccacgctggggaccacctctggccccggaggcgcgggcgcggccgcaggagcgggctgcggggtccgcgaaacaaagaacttcgagcgggacgtacctgcggcggcagcggctgtcaagtccccgaacttcccatagacccgcggacggggcgcaggctggcggctccccgctccgcgcggccgcgggcggctacggctaccgcgagcggccgggctgggcgcggggtgcgcccgccgcgggcatggtgcggcgcgggcggccgcggggcgcgcggggaaggcgggagagcggcgcgggtgagtgggagcggcgggtgtgcgcgagtgcgagtgtgcgagcgcgccggtggcgctgcccctgcccgctccctcccgctcgtgcagctccggcatcagtttcggggatcgtgtaatccgatcccttctgactcacaagccctgagtgacagttctgatttggttcaaccgcgggagggaggggaaagagaaagaaagaaacccccagccgtacgcctctcctggcatccaatcgactttctggaaaaaggtcccatcccggcctggtgccccgtgctgggtggagaagccccccgccccgacctggcaccgcctgcactactcacggggtggaaaagttgtccctcggctccgcgctcccctcccgcgcgctccctccttcccttctctcctcctcttcctcctcctccccgcgctcctcctcccccaagttttaacagatgttgccggactctcctcgctccctcgcactctctcttcctccgccccggcccccgcccagtcccttttctttcagccactctcgggctcggaggggacgcgctgagcagcaggacgcctgccgccgcagggggcgaagttgggaaaacttggagtgctgctcgccttacttttgctttctcgctccttccaggccgcgccgggagcccccgcttctcccgcccgccgggtccccaagcccggagtgggtcccagctgcgaggcgggcggcggcggctgggaggcggcgcgtcgcgggccggggtcgggggctgggggggagcccgggcgccgcgagccacgcgcgcgctccctccccgccctccgccgccgccgccgccgccgccgccgcctcctcctcctcctcctccttctcctcctcctcctcctcctccgcccctccccggtcttcacacagacacattcatgcctgctcctcctcttccccctacttgaccccgcgccctcccggcgcgccgaagccccacccacccggcgaggggaagggggcccgggcgtgatgtcacccgcgccctctctcttctctctccacaccgccaggacaccccccaaatgcgcgccctggcactcgtgctgcg

SEQ ID NO: 5270 - DNA, 2119 bp, Homo sapiens
  source 1..2119: mol_type = unassigned DNA
ccgccgcctccccagcacagctcccgcagcccgcacccgcccacagggtctccgcgaccctagagcttagggaagaattgccgaggggcggggggtccctcatgcgcatggaagggacgtacgccccaggcctccaccttcctcctgaccccggggattcttggacgtcgattctccgtctcgtaggggcgagggccctgggttcgcagtcagacgcgggcccctctcaaatctagtggcctggttttattgagtgggggaaggcacatattttccaagattaactgccccgcaacagggaatttcgcaggatttcagtattttcgactccccaggtgacgccaagagggtgggttccactgtgcacggtggggaaactgaggctcggaggggacaaggaaggtactcgaggtcacgcggctcctccggcgggcgggaacgcaggacgcggagttggggcgcgggctgtgcgcgcccaggttcgcggctcccggggctcggctgtcgcagcgcggtcgccgccgaggaccacggtcggggcgcgggcgggctccagtgcgcaggcgcggcgggcgggaggggacgcgctccgggcgcgcgcgcggggcagccggcgccccaactccgcccgccccgcgccccgcgccccggcgcctcgccgcccgccgcccgcccgccccggcgccgccgcccgcgccccggcgccccgggccggcgaggggcgcgcccgcggccgcggccgctgcatggcgctgagatggcgggggcgccgcgcggcggaggcggcggcggaggcggcgcgggcgagcccgggggcgccgagcgggcggccgggacaagccgccggcgcgggctccgggcgtgcgacgaggagttcgcttgcccagagctggaggcgctgttccgcggctacacgctgcggctggagcaggcggccacgctgaaggcgctggccgttctcagcctgctggcgggcgcgctggcgctggccgagctgctgggcgcgccggggcccgcgcccggcctggccaagggctcacacccggtgcactgcgtcctcttcctggcgctgctcgtggtaaccaacgtccggtccctgcaggtgccccagctgcagcaggtcggccagctggcgctgctcttcagcctcaccttcgcgctgctctgctgtcctttcgcgctgggcggccccgcccggggttccgccggggccgctggggggccagcgaccgccgaacaaggggtttggcagctccttttggtcaccttcgtgtcctatgccttgctgcccgtgcgcagcctgctggccataggctttgggctcgtggtggctgcgtcgcacttgctggtcacagccaccttggtccccgccaagcgcccacgtctctggaggacggtaagtgcagccgcgcacccctcatctggtctcggacacacttgctgggacgatgctgggaatgcccggagtcgggcgcgctttttcctatgcggcgggtggggacactgaggctccgagtgggggtgtgttcaaggtcactcctacgagttggggacgcagtcggggctggcaccctccggccagggctctcttcagagttacaatccacgaagcgcccctggcgtgaagtgtggagaggggagacaggtgtggagagagaaaggtttggccaaggtcagggagctgatgagcggccagacggcggccagaggggtccgccggtcttttgccgcacccatccccacagagggactgaaagtgggcgaggagagcagacccccagggcaagctccaaggccggctctgcgcgcagcgctgggctcttcccctgcgcacctagagcgcgtgctgggctcgcctcccaaccctgcggacccgagggtggtatatgggtggtgggaaaggacttcggctcttccagccttgctggccacccttctgtggacatgcctccggcccagaaagagtggggtttgccaaggtcaaacacagtctagtccctgccgctgccactcggcggttgccctgaccctgccttttctgcgcccgaactttgtcactgtcttcccagtcgggcgggcgagatggttgcaaggacggggacgctgtctgcctcccgcg

SEQ ID NO: 5271 - DNA, 562 bp, Homo sapiens
  source 1..562: mol_type = unassigned DNA
ccgtagggcgaaggggtgcgctgtcagatgtggcattcccgttttacggagacacacggtgtcttacacgccagggagaggtctgagacgcaaagagccgtcgagcgggctgcgggattgcttcgctgtcacctccgcctgcagccacccttccgcacgcacttgtgtgtgcacccaggccaacatggaaggcgccatcctaacttctgccgtgagcaggtgggagggaagagagacgagaggtattccattggttgtctgggaaaatgaattgcaccttcccctcccttgcggaggatcaacttttcccaccccctcgggtgggcactcgcatcctggggccggagcctgaacccgggagccaaggggccccagttccagggacgtgaagctgagcgtacagcgggcgctcccagacactggggaaagtgctttacgatgtcccgagtccctccagtctcgccagcggggcgagcgtgagggtgccccgaccgaccagcggccccgggtgcagggtggcgggcccggcggcgcgcgtccccctccccctcctggcggcccg

SEQ ID NO: 5272 - DNA, 1404 bp, Homo sapiens
  source 1..1404: mol_type = unassigned DNA
ccgcttcgctcgaggcgaaatcgctgaaagttcggctatttaactcctgtccccataactcggaatcccggacaccagcggccccagctgctggcgcgcggctctcttccagtcccctggatcccaaagctccctgccacagcgcggcgtctcctcctcctgtcaacttccctccttgcactgtgacggaggcaaagcaactcagcccaggaggttgaactcgagtcatcagagaaggagaaacagtgccgaaaacggcccgtgcgctaccagggtagcccattaacgcattaactccaggctcgttgggcagaagccgggaggaaacaccctggggaccgcactcctggttaaatgcccagcacgagtcaaatccggcctttccaaagcgagccaagcccactactacaaagagatcccccgagtgttttgccttaaccacatttcagacagccagctttgtggctgctgtttgactccaactttccctctaaatctaaaaggatgcacacttccatcagacggaacgtcgcgattccccggcgaagaaaaaggcgtcgcccattcctcttccaaaacgctacaacaaaaaccaccacgcttcccttccttcttccttgcccctttcccttctcccagaccaacaaggaaaggagcgagcgagggcgcagatgccctttggtcaagtactccccggatgttcccgactaaagcgtctccaaatgaacctgcagcctgcggaagccggggacacattcatagacgctctctgctgcccagaccaggaggggtggtgggggaaccaggaagccagggagagagcaaagttcctggacgcgtctcaggaggaaaactttgtgcagtgctgccaggcggaggctcgtcagaaggctccgcagctgctgaggcggggtgggactgcgccccaggggccgcgctgaagctggcgccgcgattactgcgcaccgatttcgcccactctctgtccgctcccgggagccttctctgtctcaggacggttccttatctcccaaaccatgctcgtcctccacttcggacccacagccacccccaaatcccggctatccccgcttagcaccgcggtctccagcacaccctcccactggagtagcaggtgacccaaaccagacttacctgctgtgaactcttctctccctctctcttttcctggtgccttttcagggagaggggaacgggatgcaggctgaggtccagcggcgcggcaacccggggcaccggcgcgcgttcctctgagccgcagccctggctgagcaagcggagccgccggcagccctggcagagccgggaagctgcggccgcaggggccaggccgggaggcagggggcgctgctgcctcccccgagagccgcgctaggacaggcg

SEQ ID NO: 5273 - DNA, 819 bp, Homo sapiens
  source 1..819: mol_type = unassigned DNA
gcgagacgtgggaaactggcgaagctgctaccagccgccggcgcaaggagcgcgagagtcctgggtgcgcgcagggcacttactttctatcctccagcaagcatcgtcgcaagcctcccaggtgtagaaattgttggcgttgccctcgcagcccccgtacaggaactggcggcagctctgcgtgtacctgtcgtagtagtaacggagaagtagggcccggcagggtccgtagtctaggggcaggagacagatctccgcgttatttcctgaagaaggggcagaaggagagcaaaagagagggaaagtggtcaggcgtagctcctaggaggaaagaacatcccggggagttctgtccccttccgagcggaggggcctctgcagagaaagtgcaaacttgggagcgagtcccccctgccagcggagcgcgcggcagggacctggagaaagcgaggcttggagggcgcctacacggggccccatggcccgctgcgccctctccgccggttggggagagaagctcctggagcggccagatacctgttggctcctgagcagcatcgcccagtgcagcctccgtcaggaaaagcagcagaatcgacagccccagggggcgagcggggtccatggtgcagggggtcgggcggcccgctgggcaaggcgtccgagaaagcgcctggcgggaggaggtgcgcggctttctgctccaggcggcccgggtgcccgctttatgcggggcgagcgtccggccgacccccgccggggcggagcctgaggggtggctgattcatgcacggggactgtcaccccgccgcccccgcg

SEQ ID NO: 5274 - DNA, 1128 bp, Homo sapiens
  source 1..1128: mol_type = unassigned DNA
gcgctggcgggcgcacccggcggcggcgagcgcggaggtgctgcggtacctaccatggtattcttgtcccggaacgtagtaggtggggttgcccgcaatatgcagggaaatgagcacctcgccctgctccccatccccttccagctccccgtggtgggtgcacaggaaaaagaagggcgaaaagcgggggtaatagccagccgccgcgcgcgccctcagcgtcgcccccagcaacagcgctaggaggaaagtctgccgggcccagccactgcgctccatgccgccgccgccgccgccgccgccgcgcgccctacgcgccgctcgctcattcagttttggagacgccgggacggaggagccacgcggagagaaggcgagaagaaggcggacgggagcggaacgggctcgggagcgggcctgggagcgggcccccgccgagaagttccgcgggagacggcggctcccaaagttactttgggccgcgggagcgcgggaccggggctgcgggcgccgagagcgcgtcgtctgccgcctccgtgcgccgccgccgcctctgcgcgacgcccctcggccaggcctgggaaagcgcccgccccgctccacaccttcttaaagccccgggcgccgcgtcccccccgccgccgccacacgtgtcccggccgctcccccgcccccgcgcgccgccccgcccgccccccgccctctcgggctggctcggcggcacctcgcgcggcgaggggcgcacgcgtccccggagtccccggccagcgcccggttcgcacccgggaggacagggaggggcgcccgccggggagcgggacggggacgctgtcgaggaccgctgagcccgcgactcttctgcgagggacgtcaaagccccgcagagggcacctcccgtccagctgtctgaaggggaaggccagcccctttggccgtcagtgtgccctgtttttcctgggaggatgcgtgagggaaggagaggggcggcagggacggccgctggcgccggtttctttgtctgagccggctgcgtcccgcgcccctcggggctcgcagtctgccagtccgggcggcccgcactcgttctgggaatccgcccgaggccgcgaaccgctaggggccctcgcg

SEQ ID NO: 5275 - DNA, 1128 bp, Homo sapiens; identical to SEQ ID NO: 5274
  source 1..1128: mol_type = unassigned DNA

SEQ ID NO: 5276 - DNA, 1128 bp, Homo sapiens; identical to SEQ ID NO: 5274
  source 1..1128: mol_type = unassigned DNA

SEQ ID NO: 5277 - DNA, 1921 bp, Homo sapiens
  source 1..1921: mol_type = unassigned DNA
ccgcggacctgggcctggcgcccaccccatcgccaggactggacagaaaggccctggccgaggccaccaacggagaggccagagcggagcctctggcccagaatggaggcagcagcgagcccccggcggcccccaggagcatcaaggtggaggcggtggaggagccggaggcggcccccatcctgggccccggagagcctgggccccaggccccgtcgcggacgccgtcgccgcgcagccccgccccggccagggtcaaggccgagctgtccagccccacgccgggctccagcccggtgcccggcgagctgggcctggccggggccctgttccttccgcagtacgtgttcgggcccgacgcggcgccccccgcctcggagatcctggccaagatgtccgagctggtgcacagccggctgcagcagggcgcgggcgcgggcgccggcggcgcgcagaccgggctcttccccggggcccccaagggcgctacgtgcttcgagtgcgagatcaccttcagcaacgtcaacaactactacgtgcacaagcgcctctactgttcaggccgccgtgcgcccgaggacgcgcctgccgcgcgcaggcccaaggcgccccccggcccggcccgcgcgccccccggccagcccgccgaacccgacgcgccgcgctcgtccccgggccccggagcgcgcgaggagggggctgggggcgcggccacgcccgaggacggcgcgggcggccggggcagcgagggcagccagagcccgggtagctccgtggacgacgcggaggacgaccccagccgcacgctgtgcgaggcctgcaacatccgcttcagccgccacgagacctacaccgtgcacaagcggtactactgcgcctcgcgccacgacccgccgccgcgccgaccggccgcgcccccgggaccccctgggccggccgcgcccccggccccctctcccgccgcgcctgtgcgcacgcgcagacgccgcaagctctacgagctgcacgcggccggcgccccgccccccccgccgcccggccacgcccccgcgcccgagtcgccgcggcccggaagcggaagcggaagcggccccggcctcgcccctgcgcgctcgcccggccccgcggccgacggccccatcgacctgagcaagaagccgcggcgcccgctccccggagccccggcaccggcgctggccgactaccacgagtgcacggcctgccgcgtgagcttccacagcctcgaggcctacctggcgcacaagaagtactcgtgccccgctgcgccaccgcccggcgcgctcggcctgcccgccgccgcctgcccctactgccccccgaacggcccggtgcgcggggacctgctggagcatttccgcctggcgcacggcctgctgctcggcgcgcccctggccggcccgggggtcgaggcccggacgccggccgaccgcggcccctcgcccgctcccgcccccgccgcctccccgcagcccgggtcccgtggcccccgggacggcctcggcccggagccccaggagccgccgcccggcccgcccccgtccccggccgccgcgcccgaggccgtgccgcccccgccggcgcccccctcctactcggacaagggcgtccagactcccagcaagggcacgccggcgccgctgcccaacggcaaccaccggtactgccgtctttgcaacatcaagttcagcagcctgtccaccttcatcgcccacaagaagtattactgctcctcgcacgccgccgagcacgtgaagtgagcgcccacactacagccgcagacgctttgcacgccccgctgcgatgcggggagggggccgcccccaggccgcacggactgccgctcctgggaaccccgccacgcacaggcctcggcggagggggccgcagggggcagcgcccg

SEQ ID NO: 5278 - DNA, 2872 bp, Homo sapiens
  source 1..2872: mol_type = unassigned DNA
gcgcctctcggaacgccacgctttgcgactgacttgcgagcaaagcagcgggctcagtctgcggcgcgcggaaaaggcggccggcgaagagtcgcccggcccgcgggcaggggagggaccggagggagacggcggggagggagcgctggcccccctctgggctggggctccggaggaagcccctcgccaagattccggtcgtgcgtcccctccggggcccgctctctcctccctcggcctttcccctgtcaccgccctgggtcccaagcaggccgcccagccgggtcacacccggtggatagaagccgggacccagggctggcggctgggcccgtgcatcccccacgcgggcgcctcggctttgaagtgcgcgcggagcaggctctgaccgtttcttctttcctttctttccggttacttttgctcccctcagtcactgataggacccttcccgaaaacctcagactctctaagtcccagcttggcggccccttccttccaagccgcgccccggtgacctgggctgcgcgaccacgaggaagcccgagaactccttggcccaagtgagacaggaaccagggcaacaatgaagagaaagacactcggcctctctccaccccaggccgcagaggcgcacaccgtgaaaagaaaggccaatcagcgctttaacgcacgctcgggtctccctttccgactaccatgtacttttaactccctgccaccgagggctttggatcccttcgaggctttctgcacttcaagtggaatcccctgtttcatttgccagcagctccgtctgctgagaggacgtactttggggactgccaagaagcagcagacacaactcggctttgccaatacagcatacggttttgttctcgcctccctccccacccccttccctgactcgccgtctggggcgagctggagaaggcggagcaggaggtggggagaagggtgggggtgggggaaggtctggcgtagcacaaacaagttctccagcgggttgtttacatagcaggtggacctgacgtcagccaggaggctccgctgcaaatccgaacaatattcttccccgcgtttccccctccttaaagaagttagggaacggggggagataggtggacgggggagaaaggcatcctaaccagctggttccaaacctatcaacaacaacaacgacaataacaacgcaaagtaaaacaaaacaaacaagtggtccggcggtacttcagaatcctctgcggcgtcctgtcccccaccccgcccctccgaggagaggcagccccgcgagcagtgtgtgtacagttcgcattgccaacaacacgcgcgcgcggccgggtgcgcgcgcctgccagcgcacattcacacacacagacacacagacacacacacacacacacacacacacacagatccgggtggggggagcggctgcgcgagacagcgcgagcctccgagaaagcgcgagacacgccggcgcgtgcagctccgcggccgccgcttcgccctagctctagccccgcgccacccgcagcccgcccgcgaacgcccgccccggttatttatgcggcggccgcgtccgctggctgcggcttcctcggccccccccctccccgggcgcgccccccactcgcggcagcagctgcccggactcgcgcgtgggtgtgttgtttgggggcttctgcctcgccgccgcgggtgccacctcccgggacgctgcccacggcgtccccggtcgcggtaagtttcttggccctcactctggcgcgctacacctccgcaccccaccctgtcccagccacctccacgctgggccgagctgcgactttactctgctccgcgctcctcccgcggtggcgacaaagtttcgccccaaaggcagcgccctgcttgccggggcgagtgtgacatgtgtcaaatttgggctcggcgttggggtcgcattccggacccagcatcaccacttgttgttctctttcattttgctttgtgatgggggaaaaaggggtggagaggggagatttgctgttggctcacggatgatttttagtttggataatgcaaaatgttgcttcgtccggagagacctcggctggaggagaatgtgtgtcgaaacaccagatgtgtgtttgtttactctcttctttttaattgtttgttgtcttttccccttcctccccgcacccccacccccaacctcgggaggagaaacaacagtaaaaacatctggcggttagaagcacacactttattgatccaactgctgacctttatttactcagttgggcaagtgcacgcttctcgcgtctaagttgggcacttcagcgttcatctcagaagtacttctccaggaaggagagagatggaaaggggacactcctgtttctggagtcaagaaactcctgggccctactgacgcttcgggataaccgtgcacagggatgactgctgccttgatcgcgttcctttccctgtccacgcgttagcacgaccggcttcccccggtgtctggcctggttttacttttattccgctttagagaggtcgcctggctgtttgtgggtgggtttggggtgaaatcgcacctcgcggcacttggtgaggggacgtgggaggagcgcagacacctttcggtgatagggagggcttctcacttggctgttacctggaagtccacagtggccccggcgggcaggcgggcgggcagagcgcgggtccgaacgcccttcgcgctcgcggcggcgcacgtgcggcggcggcggcggcgccggcggcgcgggcgggacccactgggtggccgcgcgcgccacccgcgcgttttctgcgcgcctctgcccacccgcgaggccgcaacgcgccctgacacccg

SEQ ID NO: 5279 - DNA, 2906 bp, Homo sapiens
  source 1..2906: mol_type = unassigned DNA
ccgcgggggtgcggttttgcgcaactgggtgactcgcgtgtccctccgcatttcatttgcaccaagggagcgcgtgtcagacgaagggaatttttttttcttttttggtgattctgttattttttcaccaactgtacgaagctcaagggatatccgagctttctggctgggcggatgggcttcgcgcttggcatggctgagcggtccatctctacctctccgtttctatctctaccataacagcgaccactcagcccgccaggagcccctgtttcccagcgcaggttcctttttcttctcagttccttgggctgttgaagccgggttctgggtagatagagactggggccgtggggagagcgccaggctgcttttgcctttcccgcgccccggggcattccggcgcgctggggatgcagcctccgcccccgccgcacctggccgcccgagcgcccgcgcccacgccccgcgcggggccgcccgaaactggggccgcgccagccgcgggagctaccgaggagctgttggggtgcgtttgcctttgctttttaaacaagatccccgagaccttttctccatccccccaacccccagcaggacacggaactccggcgtttctcgaaagccacaaaagaggggcacggaaatcccaagctcgccgtgctaactcggagaacgcaaactcgaggcagagcgtgcgccgtgcggggatgtgggtgtcgaggaccccgaagcgcccggcttcccccgcgacccccatcctccctagatcctggttagacatccatccagcccacgctcagagggcgggggttaccccgactcatcccggaagccgctaacttcagaaatccctcctgttaggttcgcgaaacgaaggtacctcgtcatctcggcggggcaagtccggattccaccagggcaggtccgggaggtcacccagggcagacgatccgaggcagagcgctttaaaatcctgccgccgcacgcccagtcagagcgccgagcgcgcctgcccccttcccgtcacccttcagtctcccattcgccgactaaacttttgggggatcacatctccaagccttgggagttccgggtaaagtctccctcttttctgaacctctttactgtaatgtaatcatgggcagacaagaggggtggctgccttgttctttgcaacgtaaaatcaacagacacccaatcaagctccaatgcccggccagcccctcgccccctggtgcccactctccttctccccccattcccgtcacctccgcccgctatttctctcacagactacggacatgcagggccatctacttgtgctcaggaaaaacaaatcactagagtgatatgagaaggaatggtgcacctggctgtccgctgaaaggttttagagaagaaaacggaaaggggaataaaacggggggattctccttttccaacaagcagggcgttttggggaagtttgggggccaggggctttttgtcccgtggttcggcacttgctttcctcggagccgctttctgctgccgggcggcgagtcttaccctgctccccgcagagggcgcggtgaggaagcccgccgggggcccgcagctccatgtcagcgccgccgccgccgccgccgccgccgcgtgaggcgagcacagcggccgcacttgtggctgatctctgggctgagggggctgagctggcctagcaggcgccaagtctcttccatgtgaataacaaatactcccaccggcggccgcgattggtctgcgcccggcgcctcccgatcctccgcccgcggccattcacccggcgcggcgcggggagccgcggccaggatcgcgcccgggatcgccaatcgcttcgcgccaaccagtcacctcgggaagcgggaggaggaacccccgaggggcgggagcctctggatttcggtgtcacccagcggccctggcgcgggcagggagggggaccctcggcccgcggatccccctccgctcttcagcctgaagcgacgaggagaccagaaatgtcaatagttctgatttttaaaaatcatccccccttccccgcccccaagaaaaaggggaggacccaactacagagtgagagggtgggaagaagcgggagcggtagaagaaggaatatggttgtggaggagcccagcggctccggctgcctggcgagcccgggaccggcgcggggaggcgcgacgcccgcccgagcacagcgggcagcacccgcgagcccgggtccccggtgaacacagctccagaaagcgtcaccgagaataacacatggtagatgacaagtgtcccgccacatgctttcttttcgggaatgcttaaagtagagccggcaagccgcgcggttcccttgcaaagtttgcctggcgccgcgcggcggttccgccatttgtcccgccccgcggctctggcgattgtctccccactccccgcccccgagggtctgagggacgcgtgcaacagagtccccagggctcgaggtaccacacagcgcggtccgctgcgggcactgcgcaggaaggggcatgggtggctaccgggacggtcattttattgagatgattcaaggagccgcagacgcggggcaggaaactccgggggagccgtgctcgggttctgcagggaaacctcgggattcccttcgcatgccgcatgcggaaacctgccgggctcgacgtgcacagtccagcgctcctccccactagttactgcccaggccccccgatcctgcacccgccggaatgagagaaagtagcccctcgccgcccagctcccgggtagctgctccggccgggccttgcgttggtgagaaagttccatctagaggcggccgcgcgcaactgcaggcggcgccctaggcccgggcgagccagggagagcggggcgcg

SEQ ID NO: 5280 - DNA, 2906 bp, Homo sapiens; identical to SEQ ID NO: 5279
  source 1..2906: mol_type = unassigned DNA

SEQ ID NO: 5281 - DNA, 1696 bp, Homo sapiens
  source 1..1696: mol_type = unassigned DNA
ccggagccggagccggcgaagccgcggagttgaggcgcgcctgggagagccaaggcccggcgggctatgcaggtgcatgcccccccctccgcccaaggagcggcgccaccagcgcttcccggctttgtccttggaccctggcaccggctcgctccagccgcgggggaaggcgcttcatcgccaaagtgcgctccggcggccccggcccgctctgcgggccgccgccggagggagtgcgggggcgccccgaagccgcccaggccgcactcgctggatgctgcgctccctctcccggcgtcggccgctccgggccggcggcagctgattgcggtcgtgagctcgcggagcggcgagagttaagaggaggtgttcgcggcgccttcgccctccccagacacacaccccctttctcctcgcctcttctcggagggtggaagagacaaaaacggggggtcagttctccagtccgccggctgccggcacgcggggcggcgctccgtccggcccccgaggaccagcggcgtggcggctgcgctcggacccggtccgccggccggaggagcgcgcggcgcccgcggtcgcgcccgcaccgcaggccccttcagagagtccgggggcgggcgcgggtccggcggcggcggcggccgcagcccccggcggcgcgcaaccgcccgtcgccgcccgccgctgcccggcccccggcgcgccgccggctccggctttgtgcggagggagcgagttcgcggcttcggctcccggcgccctcagtggccgcgccgccagcggactgctgcagcggcgtgagcagcgggggtcgcggctgcgggaaacgctccggagcccaggaacatagtccccgctggctagcggcggcagcagcagcagcggggcccctgcgcgcggcgcccaccgtctcctcctcgcgccgggctcgcggtgttgcaggcggcagccacgcagactgctctctcatccttttgtccttcagtcagaacgtgaatgtactgctgacgcatactgttctgggagaagattagcgtgatgcagtgctcttatgtattagcgccgctccccctccgtcgcctgcctcgcggggttaacgccggcgccttccagcgccgcgccggccggcgccgcgcagccccgcgcctccggccgcccgtcttcctctttcctccttccttcctcctctcttcctctctccccctcccccctcccccctccccgggccgcttcctccccgccccctctagacgagcggagcggggccagggcgagcgggcgagcgagccggagtgagcgtcaagtgaggggccgcgcgcaagtcgcaggcgttcgcagctattttgggccggtcggagggagcagttgggtggccgctgataggctggagcggcgcggggctgcggcgggagagcccgcgccggcccccgccctccggcccgcacccggggccccctggctctgaagagcggggctcaggggcccggcggcccgcggcggggctgctgcatttggcctgcctctcgcccggcccgcgtcatcctcacccccgctgactgctgacggggcgcggactcgcgttcggagttcggaactgcgtggtggggactcgggggacggcggccggggccacgaggctcccaggaccgagagcccgggcttcgctgctgcactgccgccagcccctccttcg

SEQ ID NO: 5282 - DNA, 2054 bp, Homo sapiens
  source 1..2054: mol_type = unassigned DNA
acgcggcgatgctttaagccgctttctgcctgaaatctcggcgcattcccggggaagcagtgccacgcttcagaaaggcgtttgtgctgcctcttactggggaaacgcagtgtctgtttcatatgcgccgccctacagaactgcagccccaaccgcctatctggcctcctccccgggcgctgggccaccactctctccaaatatgcgtccgaatatctgtgggtctgtctcccgttgaaatcccagggtgtccaaaggccacggggccgcgatgacactgggtaggtctccggaaacctctcaggacttctcccattttaaagcccagctagggacgaaaggggctgggagctgaaaaattgctccctcaacctccccgggtgggaggcagagccgggaatacacagaatcccaccccgaaagtcccgggaaagagaagtctgagtccaggagcgtgagaggagaacacacccgggaaatccctgctccggccgctgcacctccgcgggcgtccaggtgggacgtgggcaggtgcgcgagcgccgtgtgtgccggtgtggatctgtgtgtgtgcctgcgtgtgtgcgtgtgcgtgtgccgcgggctggctccgggacactgaggactcccgggtcggcccaggtctgtccgaccttgctgccctcgccgcccgcccggccccactccccggcgggccggctccttacctggacgcgccgcgtttccctccttcagcgggagcgccgcattgacactgcagatggagcctatgccgctgcctctcgccctcctctgaacgtgtgcgtgtgcgcgcgtgtggctgcctcctccagccccagccccgaacgcaaatactccaccgaggcacagggaagccgggagcagccgaggaacgcggagggcgccgaatcagagcctgcggggcttgacagcttctcttgcggcgtccaaggtgggcgtaatgtccaacaaaaaggtcggaaaatggggatcgattccgaacacccctttcctccacccagccccggagcccgagcagcggcggcggctctcgggggctgcggtggcgacgccgggctgccccccttcgtccccacccccgcgggctgaatgtccttgatgccaagcgggcacagcggcgtcactccgcgccgcccatgctcgcccggtcgggccgctgcccgggcgcggcgagtgcgcgggggacccgccggggagcgctctcggcgcctctgcgcgcctctctgggtagcggcggccgccccccggcagcccgcggccggccgcgccgcggcagcccccacccttgccgagacactcgccgggcagtgccctggggccggggctggggggccgcgggagccgccggctgctccccggggaggcgcggggctgcggcggtggtggctgcggcggctggcgctgcggcggcggagagctcggccgcgggccgagccgggcctcccgggcgcgcccccggccccccgggcgggctgctcgcaaagtttgcagggggcagggagcggggccgccgctggctcggccgccgccggagctcccgggctgcctgctgccgccgcggctcgctgctgctgtgcattgaagcccggccaagcgctgcaaaaactccagctgcctggcgctctctgggtcctcctctcctccctcccgccctccctgcttcccttcctccctccctcgcctcgcctcctctcctccctgccgcccgccgcccgccgccgctccctctctggctcgctctcgctggctcggagctcgcggctgacatctagagcgagggagagcggccggcagagggggcagggggcgcctccctacatgctcccacccgccgccgcccggcttgccggctctcctccgcaccaacgtttgccgacacccccctgggtcccctcggcccgcacggagctaccctggcggtggcgatgtggggcggagagaggggcatacatgggtgaccggagcgcacggcgcgcgctcagagggaggcgctcagccgcctcggaatttgcagctctgggcgctggccgtcg

SEQ ID NO: 5283 - DNA, 1258 bp, Homo sapiens
  source 1..1258: mol_type = unassigned DNA
ccgcggaagcgccccttgctgggtagaagagtgggtctcccgccgcggcgcacctgtctcggctgccggctccccgcacctacctgtacgagacctgcttccggaaagttaagttcctcagcttctcctccagcgcttcgtccttctccttctggccggcggccgcgggctcgtccagggcagcggcccccgccgccgcggctgaccctgcgccccgcgggtccgcgccgccctcggcgcccaggcagcagctcccggcgccgcttccgctgctgctgctgccgcccgtcgcccctttctcctctcccgccgaggagctggggttcatggcgcccgctccggcggccgcggagggagcgcaggcggcgccgctgcaggggccgggcgggctggcggcggcggcggcggcggctgcaggagcgcgggcaggtccgcgcgccgctggcaggggcagcaaatggcagccccttcccgcagcatccatccgcggctgcaccgcaccggggcattgtgggaaactccgctcactcccccgccccggccaatcagaggccgccgctccccgcctcccgcgccctcccgcgccggcccgcaccctccagccccgccggcctcttcctaaatcccgagcgaaagcccaagctgaacatgaactctgcccggaggcgacgggctgcggcggagggggagagagaggaggacaggctgcgaccccgggctggggacgccagggcagggacagcgagcatcaggaaggagagcgtccggggaactcgagtggccgcgccctgggtcctgcaccgtgaggctggggggaccaggaccggcgggcgcccaccttggtcctgagcccagctgccgacgctgggccagcaccctctccaccgccgccctccagtgagcagagctgggctcaggcagcagcccctgggcgcgggaaggtagcgggagctgcatttaggggaggggggaggtagcaggagctccgccagtgggaaccttggagtgaattcgtcggcgggtgccaagtcgaagcgccgacctcctgtctctggactggggcccggacccctgcgtccccaaactgcgtccccgccttgctcgtcgcccggtgccttccttaggcgcagcagaccctcggtaaacagcggttaattcgatggaatcggatcacagggccctcggtgaagcagaaaggcggaggaaatccaggaggcagaagtgaggaccctggcgcctggcgccgctgcgttgttcg

SEQ ID NO: 5284 - DNA, 628 bp, Homo sapiens
  source 1..628: mol_type = unassigned DNA
gcgtggaggctgcggctcggcggggcaggcgctgagcgcaccgcggcggcacccggcgcagaggctccagcgcggggagccgggctcagccccggcctgccagcgccgcggtcctagcccacccgaggccggcctggggggcccgcagggcgcgcggagcgccgagtgcgcgtcgggctgggccccgcaccccggtgcaggagcgcgggcgcggcgcggcggagcgccccgcatggagccggcccgggagcccccctcgcgggcccggccgccgccgcccctcgccgcgcgccccgcgcccgcccccgccgcccccaggccgcgttcgcccgcagaggctgaggcccgcggccccgaggggctgctgcggcgatccgggtcgggctacgagggcagcaccagctggaaggcggccttggagggtaagcgcggagcggcctccctctcctggcccagggacccctgcccaggcccgacccgcgacccggaggcggtcagagtcaccttggccgctgtcccggaggggagcgctgggagcgcggcgccgggacgcggcggagtcattcatttcagggcggccagacgccggttcgtggggtggggtgggagggaaccgggggccaccgcg

SEQ ID NO: 5285 - DNA, 1075 bp, Homo sapiens
  source 1..1075: mol_type = unassigned DNA
gcggtccccagggcgagcactcccgctcccagcgcctcctggccaccaaagaaaaaccagacgcctgcgacgggctctcctcccgcccgggcttcctcgctcctcgcccctcgccggccatcgggcgccaccaccgcgggtagcagggcggggcgctctgggagccgctgggtgtctgggctggcgtctgcaggggccccgcgggatcaggccggctgcaggggcgcggcggcgcagcccaccttgttgctgaagagccgcgagaggctgcgcatgggcggagggggccgcggggcacctcggagcccgcgcacgtcccagaggcgcagggcgccgtcgtgcgaggcggtgtagagcacctggccgtgcacctgcgggcgcaggggcgggcgtcaccggtgacgcggtaggcgggggggacaccgctgcccgcgtggatggatcggggcggggcaccttccctcccacgggcggcggccccgagaagggcagagggacctacctggatgcagttgatgatgaatgtgtggccccggaacaccctccgcagctctccagactgcgcgtcgaaggcccgggcgcaagcgtccccgctgcccgtgaacactgcggacacacagcgcgcgctgggcctccctccctgctcggccccccgcaagcagggatggggcggcgagagcgtgacctggggcgtctccgagactccgccccacgggggtatcctgaggctcatatgggaagtggacagtgcccctccagagaaacgggtccccacggttattctgctccaccctgcagatgcctgcgcgccagctggccctgcccctgccctgctgaacaccgcccgggcccagtccccactccgcggtttggtgaagttggtttccgtgcctgcttgggaagcccctgcctggggataatcgtcaggtcctcgagtcgcttcccccctaccttccgctgcgtcggcaaccttatcctcccgtcctcattaacggatcggcactcaaatcaaagcccagccctctggggttcatgatcacgcacccccgggacccctagcgggggcgagcctccg

SEQ ID NO: 5286 - DNA, 5566 bp, Homo sapiens
  source 1..5566: mol_type = unassigned DNA
gcgcttctccagcgatcggggcagaaccaggacgtgcaatgcgactgcccccccctccccgctccccggcagagcttctgtccgcgccaacccacccaccaggctctgcccgcgccacgcgcgcccctggcaggcctggggcggggaaaggcgaagcgctgggcacgcgagggcctgtgcaccccagttcctacgacgctcctggcccttttcaggcccgccgctgccgcatttaaccccctccttccgggggttattctgaagaagtctcagaccctagacccagcctcccagaccccgtccccgagctcgcccggtgggcctgtaggccggtcctccttcgcccagaggagagcgcagacacgcaatgtccgcccgttggccccgcccgccccacccctgctccccgcgccccttcgtttcggcctttgtctacaggccgggtcggaacgtcagccccaggagccgacggtggctctctgctcgccccggggaaggtgttgctctcctatcggccccaattccccgcccggcgcctggggcttggctgcggggctcggctcccagccgagggcgcagggctggccaggcctgctttggctgaggtggagatctcgctctcagggattgttgggcgtctctgccccgcgagtaacgagaccgccgcgagcgaacggctttcattgagtccatttttccaagtgtcaccacgtcaagctagagaagcgaggcgagtggaggggacgcagaggggccggaaaagtcacccttctctggcctcgttttcagataaaaacgggagcctggctcggcatccgggcgcccggtgtctccggggcgcttcactgaggttttgtttgcaaaactagcgtccgtgtcctgaagcgcacggcgtctggaagctgctttcctgctcgccctctccgaggcccctctttgtgcagcgagcctgagaaatatggaggaccgtcctccgcaagcgggtggtcgcgggcgctctccgattcctgggtgaagctagagggaaaacggggttcccgggtcagtgccccactttccatcccgggagaaactaatgtccggagagggctcgtctgatccgcacagaaaggccgaccttgagggcggcggtcgttcgggggagaaagcggaggctctgggctcgcgggagcgcggcagccggggctggcatcgcagaggagagacacgccactgccccgcatccccagaaagcgcgaggcgccgtcccagctggggcaggcggccgaggccggtcctcatgcgcgcttctcgaagcttcctgaaacaccttgcggagttccgtgtgtatagaactcagcaccgcccagcccctgggcagctcaactttctgcagccccatcccagcttccccggccctttgaacggtgacccctcttaccgctttcccagagttgtttcgtgtttgggtccactctggggggcccggtaccctctagttatctctctcttcatttatttctctttctcctattcctccctccacctctcaccttcctcctttccaggagagcgacccacgaattcctcttcctccagccaaccccagggcccagcccgcagaccctgcgagggcaggtctctgcccaccggcccgccaggcgccctggaggtgacgctctgcttcccagagtctctgttgcagccacgaattggggtctgggtcgcaggaaagcacagggctgaagcccagcgtcttggggccatttatactgaggcagtcagaggcaaagagtcccaagaattcagaaaatacttctcaggaagccgcctaattggctttcatgggacaggtggagccattaacctgggatggttttgcaggaaccaaagagctcagggcccctcctccccccaatatcatgttcaggagacccagagtcgttggaccctccctttcctgactggtgatcatcagagtttccagagttgcagaaaattctccccccaaaaaaccaagtaagcgtcaataagacttcccacaaactctcaccagccctattttcccggggggcaggtagactgtggggtttgattttttgagactcggggaggacccctggcagatgtgtgcctagccagaacatttggtaaggactcctccaatgaagaaaaagtggaggaatccagccccagcgagaagaggcttccccaccctgccctagacacaccggacagagggcacactctgaccagagccacgtccagtggccaggaggccagcccagcacctcctcccccaccattcccgtcctgggtgggggggtaattttcctgggagcagctgtgggaactgtcgtttctcatcccagcccagccagcactctgaagcctgcaggggaaggacagcacgtgggatggacactggggaaggagcttcgcaaggccagggtgcaaccttcaggccccaggtggcctggcaggccacgctgcctcggagatgcttgccagactccccaagttcactcagggcctggcagcaacctgctggctgcctctgcgggggtctgggttgctgagcacggtgcagctgcccagggccaatcagccctagggtgtccgtgccaggctgcggcctccccgcctcccccgcactgagggtactcatggcgtgcaaatgctcccgcacccccagagctgccctatcggatgtttccaggaattcacacatttccataaaaatgcattttaaatgatggacaggcgagcctggggtaacaacgggtgtttggtgggtagacaagagcaaatgggaaggagcccgagggaggagggggaagagaagaggaaacagaacttccagttggacattctgacaacagctggaaggaaagtctagaaaagatgaagagagaggaggggagaaaccaactggggctcccacccttgccgttggattcctaattctcgtttcaaatgggccctgctctccggcaaaattagtttaaaggattttaaaacaaagaaaacgagatgaccggtctgggagctcctcaatcagagtagagaagttagaggggggcgggcgacttggttttgaagtcttagctgaacagtcacccctcctctccttggcaaaaaggattcctttagaacctccgaggctcctggatttctcccttcgcaaatggagccgcatactgcattcccccgctctttcggatcgctaagcatgtttcatgagggtcgctgtccccgggtggaatgcggccgtatgcacgcgcctccctgcacacgcacacacacgcacacttacaataagtgtctgcaggaggagtgtcctgcgcgccagctctgcgtttaagacaggaagctgccgggttaccgagtcaaatgggagtgacactattcctctccatcagcaaggaaagcggaccacaaaagtccctttgtatctcggcagctcatttaatattatttatgcattttgtgcaaggaattgtgggatttcgccccacggtaaacaatatggaaatcttaaaaatagcgatcttcctgtgcgtgtccacctacgcgccccggggtgacctggcggggctgtcgccgggtgactcacacccctgaaccgcgaagcgacagggaaagcgcgggcgagcgcaggagacgcggtcgggggtctctccgggttcctgggctcccgcacccggagcgggggacgcggccgctttaaggggaggaggggcggcgggctgctcctgtcacccagcggcggccggagcgtcacgtgggcgcgcggcgccgcggccattggcccgaggcacgtgtccaggagaccggcctgcgacgtcactcgagggggctctgttaaaaataagaacaaaaatccagagtgaaagtgtctcaggttgcgccgagtggcctggaaatttccgagcccgcgcggaggccgaggcggcgagggcggcggacggccggggagcgcgggcggcccagcccggcccggccgggccctggcctcgcgtctctcacccatgcgactcgggccgcggagctctgcggggctcggcgggggcgcggccgcacgccggtggggcgccccggcccgcagcggggcggcggccgcgaggagggggcctccatgtgcgtgcgggcggtggcgggcgcgctgaccgcgggcgcccggcaccctcgagggccggctagggcgtgcgggcggggacggccgggcggcggcggcggccggagccggcccgggcgggcgtgagcgccggggaacgcgctgcctgcatgcgcgcagctctcgccccgggcggcccaggcggcggcgccggagcccgaggcggccggacgcggagaggagcggggagcccgggaggcggcccgcgtccccgccggaccactgcgactgtctagaccccggctgcgcggcgaagtcgaggacttggctctgttgaatctctcatcgtctgggcgagcggggcggctcgtggtgtttctaacccagttcgtggattcaaaggtggctccgcgccgagcgcggccggcgacttgtaggacctcagccctggccgcggccgccgcgcacgccctcggaagactcggcggggtgggggcgcgggggtctccgtgtgcgccgcgggagggccgaaggctgatttggaagggcgtccccggagaaccagtgtgggatttactgtgaacagcatggaggagaatgaccccaagcctggcgaagcagcggcggcggtggagggacagcggcagccggaatccagccccggcggcggctcgggcggcggcggcggtagcagcccgggcgaagcggacaccgggcgccggcgggctctgatgctgcccgcggtcctgcaggcgcccggcaaccaccagcacccgcaccgcatcaccaacttcttcatcgacaacatcctgcggcccgagttcggccggcgaaaggacgcggggacctgctgtgcgggcgcgggaggaggaaggggcggcggagccggcggcgaaggcggcgcgagcggtgcggagggaggcggcggcgcgggcggctcggagcagctcttgggctcgggctcccgagagccccggcagaacccgccatgtgcgcccggcgcgggcgggccgctcccagccgccggcagcgactctccgggtgacggggaaggcggctccaagacgctctcgctgcacggtggcgccaagaaaggcggcgaccccggcggccccctggacgggtcgctcaaggcccgcggcttgggcggcggcgacctgtcggtgagctcggactcggacagctcgcaagccggcgccaacctgggcgcgcagcccatgctctggccggcgtgggtctactgtacgcgctactcggaccggccttcttcaggtgagcccgcggggaccacgcgtcccggctcgccgcggggaggcccgcggagctggggggcggtgctggcgcgggaacttaccgggaggaaaacatctcgaacctcccccgcgcacacgcacaaagactcacgcgacattgtgtgaagctgacgccggcccgggcagcggccaggagtccagcggcaggactgattcg

SEQ ID NO: 5287 - DNA, 5566 bp, Homo sapiens; identical to SEQ ID NO: 5286
  source 1..5566: mol_type = unassigned DNA

SEQ ID NO: 5288 - DNA, 1164 bp, Homo sapiens
  source 1..1164: mol_type = unassigned DNA
gcgacttgctcagcgccaaaccgcggctccagccctctccagcctccggctcagccggctcatcagtcggtccgcgccttgcagctcctccagagggacgcgccccgagatggagagcaaagccctgctcgtgctgactctggccgtgtggctccagagtctgaccgcctcccgcggaggggtggccgccgccgaccgtaagttttgcgcgcaaactcccctccacctgcagacccggcgggtggccactgccacccgaactgaggatgagaagaaggaagttggaaggggcggtggatgcgcccagggactctcccagcctgggctctagccccgaaacggtccccggagtgggatccaggaggggccgggagggaatctcctcccgatcgtgaagcggcggcgcccagttcccgctttttctctctgccgggttcccgcgctatcccttccactctggctgggaccgcgttcccgggctcgcaggctccgccggggaggttccggggtgtgggggccgggacggcggaggcggggagtaagggcccggctggcggtgacctgcagtcacctctctgccggaggggccctggaatgaaaggcgcgcgggccaaggtgacctcgccttggttggcactgcggctcagcccccgcccggggactcgcgggccgactgtggccccttctggggaagccggggcgcggggaggcgttccgggcatctcagccgcacggggtacgctcgccctcggcggggcccctcgctccgctgtgggagtggcagtgggtgtcggggtggagaaagtacgcgtggcgcggagtcctggggacgcggcgtcccacccgctctggggagccccggactctctccagcttccaggctcgcatgcccctcttttcttagtgccctgagaacccagcgaggggctgaccctcccgaaaccgtggcgcagccaccagcaatctgtggtcgccgactcggggggttgccaggtctgcgtttggccaccctttctgtcctgggggctgaggtcagctccgggcgcccggccccgccgcgcggctgcgagcacgtggggttgacgggcgccgcgtggaggcagcgagcacaacggtggtcaccgccgccagggaaccgcccgctcgctggggtccaggcgttcg

SEQ ID NO: 5289 - DNA, 1495 bp, Homo sapiens
  source 1..1495: mol_type = unassigned DNA
tcgcaaacttttctctgcgccgtccttttccgcgtggaatgggacggagcagccctcccaggcgctgcctggctgcggaggggagcgggcagcgagagcctcgggtctccgcctgggttcccgggtctccggggcgctggcctcggtctccgcgcagcgtccagcgacccctgtcgggggttcccggcagccgcgccgccaccccccgcccggccagcgcgggaggaaaaggggctgcgcccgggagcgccgagcccaggctcctcccggtggcgtgtccgcgcctcggggtgggggtgtggtggggaagagggagggggcgaggccaggggagggtgcgaaggaggcgcctgcctccaacctgcgggcgggaggtgggtggctgcggggcaattgaaaaagagccggcgaggagttccccgaaacttgttggaactccgggctcgcgcggaggccaggagctgagcggcggcggctgccggacgatgggagcgtgagcaggacggtgataacctctccccgatcgggttgcgagggcgccgggcagaggccaggacgcgagccgccagcggtgggacccatcgacgacttcccggggcgacaggagcagccccgagagccagggcgagcgcccgttccaggtggccggaccgcccgccgcgtccgcgccgcgctccctgcaggcaacgggagacgcccccgcgcagcgcgagcgcctcagcgcggccgctcgctctccccctcgagggacaaacttttcccaaacccgatccgagcccttggaccaaactcgcctgcgccgagagccgtccgcgtagagcgctccgtctccggcgagatgtccgagcgcaaagaaggcagaggcaaagggaagggcaagaagaaggagcgaggctccggcaagaagccggagtccgcggcgggcagccagagcccaggtgggtgcgcagcgcggcccgggccccacgatcctcctcctgctcctcctactcctcctcctcctcggatgccgtggcctctccctccccctctccctcgcccgtcctcttcgccctgcgctctgagcgcccgttgagtcgcgcggtgcttcccctcctgggggccgccgctcacctgggcgccgagtcctaccgggcgcctacgcccagagctcagggcaagggacagcagtcccggccgcaccctcccagagtcccgggagcgcttcgctccctggcacggcccctccccagcgccttagcggctgagcccagcccgggagtgggacctgggctataggagtcgaggctgcgtgcgcgcgtgccccgcgccataagcgctttgcacgggggccgtgtgccctctagcgggaaacgctggaatgggccgcctggagggagagccggtcccctcggtgtgcctggcagcgcagaagtgggtggtcgagcaagaggccgcgtgggaagttagcttcggcgttttggggcacagggcaagcgatgtagagtgcgcgccg

SEQ ID NO: 5290 - DNA, 352 bp, Homo sapiens
  source 1..352: mol_type = unassigned DNA
gcgcctctggcagcagccgcccacgcccccggccctgcgcaccgggcttgctccgggaggggcgcgtgacgccaccgcggggcagccgagaggggaccgcgggctccgggcagggcaggcgctcccgcagctccagctataacacaagggagagaaagcaacgctttggttccagaaacttccatcgtcaaggccagttctggccagacgcacagccaaagagcccccctagtctagcggatgaaccgttcgcgagtggcaccccctaaaaccttggccccatctcccaagatgcctctttactgcgcaatccagaaagcacccggaccgccgccacccaccagcggcggcg

SEQ ID NO: 5291 - DNA, 1141 bp, Homo sapiens
  source 1..1141: mol_type = unassigned DNA
ccgcccagcccccagcgctgcgctgtccccgcgctcaccggatgatcacgaacatgaccagcgagttgcccaccaagcccacgacgaacactacggagtagaccgccgtgatgatgaccgggatggccggggagatgtgcgcgggctccagctgcgcgtcctccgagccggcgctgccgttgctgtcgggctcggcccagccgggaaaccaggcgctgctgttggggggcaggcaggcgctcggggcgcaggtagggcccggctccccgcggaagatctggatcggggagtccatggtggggcgattgcagcaggaaggcgaggacaggcggcacctgcggcgctgcgggagcgaaagaaccggctggacgcggagaggcaaactttgcccgcgccctggccagcggcgctggggacccggagcctgcggactcccacccgggccgcaagtcgccgggggcaggacagggagaacggacttctcgctgcctttccggccagcaggcgcgccgctgggtgccagagaggggcgaagagcgctcgctccttctcccccagcccctgaggtgcctccctcaccaattctaggcaccggcccctggtggaactgtccccagactgcctgagtccccagggtcaagcccccttcccacctcccagcacggagctctacctagaactgcacctcgaaagcccaaagcttacctatggttcccagagacaggcgaaggcgaggttttttacgggacgccctggtaggtgctgaaccgcgcgctcacgagtcccgctcagctcttggcatcacctgctctcggaccccggccccgctctccgcccgagggctgctgttccgccgagcgcagcccccgcctctcagcgcacgtctcccactactggcggcggctctgcggggcggggcggggcgggaccggcgggacgcagccgggacgcggctgggcgctgggggcctgcgggcggagagctcgtctggtgcgcccgccccaggccggcaggtccctgccccgccccgcccgcccggagtcagcccccagctccccagcctcccagccccgcgtcccctccagccccgcaggctcgcccggcccactaactgcccgagcggcacaccgcctggtccccg

SEQ ID NO: 5292 - DNA, 3297 bp, Homo sapiens
  source 1..3297: mol_type = unassigned DNA
tcgcccgccgccccgaagctgttcggcctcctttctagcccgctttccagcctcgcaaggttcttctctcaccttctccggcgaccccctcccgaggctccccggaggcgcctggacttctcccccctgcttcccgccctgccggccgcccggctctcgagggggcacgaggagctgccgggccgcctctcgctcctgctcggggcggcgctggcactgcccggccgaccctcggggggtcgtccgctgaggcccccccatccggtagccaagcccagggaagaagacgccaccgctgggcagagctcgcctatgccggtgagtaccgtggtctccactacgccccacacccagcctccccaggacaccagcctctcccgattcttcctaaccccaactgacccgctccgctggggctagcagtagggagggtggcaaggtcgggaaggccgggacgtggctgggcaagtcctaggacgggacattggcggctcccgggacaccgcccctccccgcgggaagacactccaagctactttttcctgggccatttcctttccatggtccaagaaaacgggagggagccctcgctcttccccgaggctgcctttcaaactctcagcgtgtcgctctcctccgcctactccgagcctcccccaaacgcgcctccgcctgctcccagcgctcgctctcccactcccctgccctctcggcaggcaagggaggaaatgacgtgatgttatttttgtgtcaggtcagtttccagcttcagcttagccctccgggctccagggaactaaccccgcggccccaccgggtcccactcccgaagggacgctgcgggctacggggacacgcggtgctgcgagtccggagagctgggcggctgggttccccctcccgctgccccctggtctactcctttccccggactccggagtccctggagaaggggacgcggagggcgactgccgagggtctcagcgggatctggagtcaggggttagttcccccccttatcccccgctcggttgctgggtggggcctccgcgctctggctagctgggagggggcgagggccgctttccagggcgggaagaccggaggcctaggctgcgccggggtggggcggggacagagctcagagaggcgccccgggccggggagaaggtagggggctgccctccagagacgcgcagtccacagacgcgaagctctggggaccaagcgccccctccatgcctgccgcccacccccgctccttcctcccgctcccttcattcacgaggtccgagcacgcagtccagcacactctagtctcgctcggccccgcgcgccgaggggaggcgatgacacagagggcttcgcggacgccctctacgcgcgcctggcttcgcatccacactcttgggacttgctaatgcggggctggagcagtggggctgcggccggggtggaggtcgcgccccgcgtggggcctcgggggtacccctagcacccgcggcggtggagtgcgccgccgctggagggaggcgagacgtgggattgcccggccgggtaaaaggagtgagggggcggggaggaggcagagcaaggggaggaagaggccgggagaagagggctagagcaaagaccgagagccggagaaaggcgaaaggcgcggtgagcaatcgccgacgtagagagggcagccctccgcgctgcaatattgagaaggcacccgcgggacgcatgcgcacggcggacggaggcgagccggccggggcttcctccccggccggcagggtggacggtgggctcgtgagtatcccagttcctcgaactctctttcttcgtctcgggctcgccctgaggcttcgtgctggaaagtggccgaggctgggaggggcgcgccgctcgtccggacctcagggtgtcgccgttgctgcggggcgggagccggtgcgagtcgggggttccttcccgcagtgcgagtttgggggagtggggctgcgagtgcgtccgcgtgcgaagaggggcatcgcgccaccaggatcaatatgtcccgggcctgccagggcgtccgcgattccacctctgcggcttcgcgtcggtgtcttggtggggaacgcgggagtctagtctttagaccctagaaatcgcattgaccacccgaagcgtatttcggaaagaccaggcgggtggaagcgtcggctttctcacgggatagggagaggacaaggaaggggttgggcgcccggggctggtggtttgagcgccgctgggaagggtaaggagacagagcctcctggaatcgtagcgcctccttttaggagaagtgcaaccagggcaggggcaccgaggggcagggtgaggaagtggacgccccacgcgtggaccctagaagaccgactaggtatgggcgttcactcggagcctctgttcacgctcttgaaaaccgaatgaacagagaagtgccctccacccttcgcctgcgccagggcagttaacgtgcaggcgccgccgggattttcctggaacaaacccgggcacttgatcttccgcaccctcggagctgccctgggaagtcgaaacaagtctgggcgcccggactgcggagactggaaagcagggggcggagggcgggagactgggggcgggaagtggaggtgcaggctgcagctggggaccgcggtgggcgttggaggggagggtctgtgtgcgcggctgtcctccagcgctgggggagcggacgggccaggggcctctagggaagcggcgctccgggaccggggtggctttcccgtctctgtgtgcgcggcgatccccacacccagctcgggcggaggagccctgagagaagcggctagctgagagtggggtgggcgttttggggaaaggtttgcgtgcgctgcggccctaccgctgctagagaagtggaagagagagagtgggcgccgggagggggtctataggcgccgcgacctaccccatctccctccacgcttgtgggggagtgagtggggaaggggctttgggagaggcggcgcgcgggcactgaggtgcatcgtgagcttcccggacttgacagcatcaaaggaaaatcctggcgagcagccagggccagcgagcgaccccagcagcagggacgcggccgtgcgagagctcgcggacaggcgagggggatcccaggggagcagctgctgcccacgggccacgggcgatgcacggagtggagaagtgaacgtggtctacaggatttctgtccggaaggtggagagcgctacaggggaatctcctcgattcctgtccgtctcg

SEQ ID NO: 5293 - DNA, 2213 bp, Homo sapiens
  source 1..2213: mol_type = unassigned DNA
ccggctttaaacgcctctccagccacctgtgaaccgcgaaggagccggctttcgcggcggggaccttgccaccagtaccctcgcgggccgaggtcgttctcccggtcggcttcccgcctcacccgaaaaggaattagagcatctacccaagacggtgactggcagggcagatcaaggtgtcctggtctcggccccagccccgcggtgcgccccgcccgcttaccttgaccgggtgcaggtagccatcgccgcgcagggcgcccaacccggcgtccgccggcgcctcggcgtcgtcctgcaggctgcgggtgagatgcgcgatgtaggtggtggccagcagcagcacgtccagcttggacagcttggtgtcgggcggcacggacggcagcgtgcgctgcagctccaggaaagcgtgccgcagggtctgcacccggctgcgctcccgcgccgcattcgccgccgccggccgcccgctcccggaacgcgagccgcccccagggcccgccggccccggcccggtccgcccgggacgcgagtcgcggatggcggcggccaggggcgcgggctcggcgctggcgctgagggggctgcccgctgggcggccgcggtccatggcagcttcccgcgccgcgcgcgctgcaaaggaccgaaggtgcggtgaggccggggggcggtcgggcttaacccgagaggcgcagccccctggttctccccgtgcgcccaccagcagcccaacggggctaagggcgctctcaagcgagctcgttttgcctgggacgcgatttgcttccggacgtctggggagagttgcggaactccggagttcttgggcttcctagaaggataagaagaggcgcagtgccggctttgcttttcaggggcaaattaagcaaaaggtctactctacccgggaagaaagatctcggaagcacagctcaggatcagcactcgttcgcgcttgggtgactttatccaacccggcacgcacgagaggtggcgcggctccttctcgccgacgccgcggaaaaccacggctcaccagccgccctcggcctttcacgccaggggggatttctgcccgaggagcgggggacccttagcctcacctcggggtacggcacccgccaccgttccgagcccgagagctgcgcagtacgcgtctgacgggcccctcacctttcctggagcggctgagtggagctccgctccgtcgtgagggcgggcgaggggcgtggagcagggcctgtgtggccagggccgcgctggtcactccatcctcgtccggccgatgcccaagtcgacggctgtttccaacctccgctggctgtgacttttatgcgggcgccccgcggccaggcgtgtgtgctccgaccggctaaggcaggtcgggcggaggacctggcccaccggagaggctacgccgggggctgaggcggcttagagggtcattaatcaaaccctccggcggggcgggctcgggggcggggcgtcctcctggccccgcccctcggctcactgcctcacgctgctttccccgaggcgcctcgctgagggcggcgtgtggagagtttggggtgtctgccgccggctgcggtggggccgggctggaggccgcgggtgaggcctgtggttaacctcgcgctgccgaggtcttacctcctcgagtccagtctgattccaggccgcttccaggccggtgcccagctgaggcgggaacgctgcagtttggttgagcgtgacttttaggctctgtgaggaaaagtcgagcgcgccacatcgaggcgctagccgtttattctaccacaaggtaaaagattcatgctgtcctagttaccctaaagctgggagatacactgcacttcctaccagaccccgaatgctctcagtgtctgtaattctttaagaagttcctagagcagacagcccttggatcgtgggcacttctccccggggacggggaccctgctgaccgcctccgctgcccccgcgggggccaccgctctttaattatttgggcgaaacattcttttctggttttgcacttgtggactcacgggaagcgtgacttgcagcgaggcaggacccgatcccaggcttctttagaaagcggacgctgcgccccaaggcctgttcagagccgccccaggaagccgtgggtccccgaccgccccaaaccgcagcggtttctgcaggtcctggacccgtcgccttcg

SEQ ID NO: 5294 - DNA, 363 bp, Homo sapiens
  source 1..363: mol_type = unassigned DNA
gcgctcagcacggcgggcagcgccgcgctgcgcaccgccgccgaccatgagcgaggacagccgcggagacagccgcgccgagagcgccaaggacctggagaagcagcttcgcctgcgcgtgtgcgtgctcagcgagctccagaagaccgagcgggactatgtgggcacgctggagttcctggtgtcggtgagtgtccccggcagacgcagggggacgtccgggcggcgcggggcgcgggtcccggagtggctgcgggaaggacgcgcggcattgtctgtgcggggacccgggacgggtcggggcatcacaggcgcgggaatccacgtgtggactctgcgttcgcgggcgcggtgacccccgcg

SEQ ID NO: 5295 - DNA, 960 bp, Homo sapiens
  source 1..960: mol_type = unassigned DNA
ccgtcccccgacgtcccaatcagttaccacctccccgaaggaaaacaaaccggcccttgacacatccctccacgtgcagcgcccgacgccacgggccttgggcggctgcacctctcccctgccggccacggctcaaggccccattattgcgcgcacccagctcccttccaggtgactttcgcgtacctggcggcggcgccctaggcctcggaggctgcccgggcgggctggggctcgggcggcgctcgctgagagtcgcggcgcccctcagccgcttcccgggcgccgatcgccgccctcctgccccggggtggggcccaggggcatcagcagccgcgggctctcggccgccgcctgggaactcagggtcagatttagtttcacaacaacgtctcctcgtcacggcaacccaactggaggcagaagccggcggggcggccgagcggggcggggcgggagcgcggccgccgcgagccacggtggggagcgggcgcgggggaccctggcgggccccgggcagcgcggctgcacttacttgtgtcacaactgcggcgacggggggctgaggaaccggttcttccaaaagcaaaccgaaaatgggtaacagagaggccggggcagcgctaagaggggttctgcctcggtgtttagggcaaaaaacccggctccggcttccagaaattcgagccagcggtggctttttctttctttcctctctaaacgctcctgtgcctccgggtcgaggggcgcccttcgcgcggctccgagtgcacagcgacaccagggctggcgctggagaggggagccctcttcccagcacccctcgggtctcccccgtacccccacccacagcccctttcctgggcccgacgcccctccgctctgcagccggagcctgggcctggtgcccactgccccgcggggtgtctcggacgcctggcccctgcagcgttttctacg

SEQ ID NO: 5296 - DNA, 1404 bp, Homo sapiens
  source 1..1404: mol_type = unassigned DNA
acgcggggtccccgggaaccgccgcctttcttcctcgctcccgcgctcgcgcttcccctcccggggccccggcccacccacccctggtgcggccccgccggactcaggagccccggccgcccgggctgcggggagggggcgccccgggccggccctagaagttactttgcaaagaggcagggggcgcggggccgcgcggggcgagctcgggatccgcggggaagaagccctccgggaccgcgcctcggccgcccgagccccccgcgcccgccgccccccacctcggtcgggggcttacctgggagcccgctgcccccggccagccgcccgcgtgtgcccagggccagcagcacgcacaagtgccagcgcacggccgccgcgcccatgctcaatgcgggccccgctgggcgtgcgggcgtgcggggcgcggggacccgaccgaccggccgctcccgcaggcgctgctcgctgctcgccgctccgccaccgctcgggctcccgagccgcccagccagcccggctgatgagctgacagcgcgcgctcattggcccgtggcgtcggaggggcggggcgtcgcccagggccggccaatgggcgccggcctccggccctccgaggaagaggggggctcgggcgtcgtcggggggacccttcccctggggcgggcggcaggtggggggtgtgggcctggccggccggctcgctaggcgcggggtctaggccaggctggggctgcttggaggctgcgccctcccctgcccgcggcgccccggcccccgccgtcgagagtggacgcccctctggggtaacccctcccggcccagaggcagcctcgggggcggggatcctgcgaaccggggatcccgtgaggtcgcccgccatccgtgggcagtgaaacgcgccagcgcgcagagcagactcgcctgcgctgccgtttgctggacgtttcttgagcacctactggggaccgagtgcgggcgaggcagcagcgaaggaaccgggaggggaaacctcgtgaagatcacttgaaaattgacgttcaaaacaaacgaactttttagcactcgtcaaaggacagtggcccgtcagtgtgcttgtcacggggcggccgcaggacctgcgtctggaaccgggcgggcgcccgggacggacaatgccgcttggcggtcggtcccgcgggaggcccccgcacggggctaacctcggccggcgaagttcgctgcccggaatgcgaggccgaggcctccccctgtgacagaccgggcggggccaggaggaggggcagggcgggcatcccggtccgaagacccaggaactgctctggcctggcctggggtctacacctgacgcctggcgagggttggcttcgggtctggtcccaccgggcctgggagggacgggcg

SEQ ID NO: 5297 - DNA, 1247 bp, Homo sapiens
  source 1..1247: mol_type = unassigned DNA
tcgtggggcaccacgcgcggacccctgcctggcggctcctgcgcccggggctgctgagcccggggttcgtcctgaggccgcggctgtggttcctggccctcccggcccgcgtcactgtcgcgcggcgcccgctgcatcttgccttccttgcggcttcgcatgcccttggtggaacccagctcggcggacgacgaggaggatgagatggaagcctgctggaaaccgggcaaatcccacagaaaactgatgaggaagacggccgagagcaggaccctgggagtatccatggcgggcaagtggctgcgtctccccaggaggcggtggcggcggcgcaggacgcgcggggcacggagcggctggacagcggccggggcccggctcctcgggcggactcggagtgcgaggagccgggtcccagccacacaaaccccggccccgccacgccccctcccgcccctcgccgggaggggaggaatggggagggagggcagaggaggggtggggagggtgggaggagagccgggtggtgcgggccggaggtgtgggggagaggggccgcggtgcgccggtgtggcaggaagacgcagcgcccccgcgggacgcgcgcggggttgccgggcggtgcgcgcggcgcgggccgcaagcgctgaccgggggaaggcgggcgctgccggcccgtggccggggagcaaaggctggcccgccgcgccagggtccccctcgaactcccggaggtgtggtccctccgcagcgcggccccggctctcggtcctcgccagccgcctccactttcctgggagcgagcggccccggaggagggaagcggcggcggcgcccccaagagacagcttggagcaggcgcctctgctgcaggctgcgtgctgcctcggggcggtggtaccctccctcctcggccccaaccgccaggcctgccgtttgcgcccctcaggggccagcccggagccagagaagcctcgccctgggccaggcgcagggcccagctcggaacagccccattttctcggttgggtatcgctctccacaaagacaggcgtctattcccgaccctcgaggtcaggcaaaggccacgagtctttagagtttggatcgatgctaaaagctgctgcgctcccctgcaggccccagcctctcctctcgcagtccccaacctcttctgacgcagactttagctgctccacttcttcgtctgctcccgggatcctctccctctcgcggcctgccccccg

SEQ ID NO: 5298 - DNA, 1861 bp, Homo sapiens
  source 1..1861: mol_type = unassigned DNA
ccggtgagcagagccggcgcagccacagcgcggagccgcggcgcccactggtcctcggagctgccaatcggcgtgtaatcctgtaggaatttctcccgggtttatctgggagtcacactgccgcctcctctccccagtcgcccaggggagcccggagaagcaggctcaggagggagggagccagaggaaaagaagaggaggagaaggaggaggacccggggagggaggcgcggcgcgggaggaggaggggcgcagccgcggagccagtggccccgcttggacgcgctgctctccagatacccccggagctccagccgcgcggatcgcgcgctcccgccgctctgcccctaaacttctgccgtagctccctttcaagccagcgaatttattccttaaaaccagaaactgaacctcggcacgggaaaggagtccgcggaggagcaaaaccacagcagagcaagaagagcttcagagagcagccttcccggagcaccaactccgtgtcgggagtgcagaaaccaacaagtgagagggcgccgcgttcccggggcgcagctgcgggcggcgggagcaggcgcaggaggaggaagcgagcgcccccgagccccgagcccgagtccccgagcctgagccgcaatcgctgcggtactctgctccggattcgtgtgcgcgggctgcgccgagcgctgggcaggaggcttcgttttgccctggttgcaagcagcggctgggagcagccggtccctggggaatatgcggcgcgcgtggatcctgctcaccttgggcttggtggcctgcgtgtcggcggagtcggtgagtgggccaggcggaggatgcgcgcgccgtttagggtgtttgaagctacgagaggagcccgcagggaataggggagcgccacctggggaacccccagtccccaagtatacaccggagatccgctgggacaaatgcgctcgtccggtcaccctttccccctcttcccttcctcagaaaagcgctgctcgctggcgttaccccgcggtccgcgggaatgggggcaccgagaattgcggtttggtctagccgcagaggcccctgaagtcactcccaacttcttcgccctcggcgggtcttgctgcgtggtctgggaaggacggaggggaaagggtggcaggaggggggagcctgggtcgggcccgcgagggaacggctccactccgcgcgctcctcgagaccagggatgacctggaaacttcggggtcccttcctccgcacaccatcccccccgcgccagctttcctgtttgactgcatgcaagttctggggagatgggggccagatttaagagacccgcgagtgtccagagagaaaagtttgcaaaagttcttttgtttgatgctccctgcggctagggcgaggtaaccgacactacgtggaatcgcagtaggcgatccctcaaggggatactgggggaggcacggaacgcgtccgaaaatgctgggacgccggccactggattcccagtcctgcggcgaccccctcctcgttgaggggtggaggttgcaccgcggggcgtcagggacgggaggacattttcataggagttacacgggagtgccgcaagcagggcgaggcggggtacgtgtgacacggcgctcggcttcgggtcgcctggccgctgggggacagaggcttccctcccgccacgctcgccctctctggccctggcggggcgcttctggggccgggaggagtctcgtctccggcggagcgcctgccggcacccagcttccctcccccgccctggcggtgggaacttgatttctccttttggtcgcgcttcgggggctggagcttgtttccccacgtcgcccaatgagcg

SEQ ID NO: 5299 - DNA, 3044 bp, Homo sapiens
  source 1..3044: mol_type = unassigned DNA
gcgcgcgtgtggaaggctgggtggggtgcgcacacacgctcacttgtgtacgtacacacacacacacacacacacacacacaggcacacacacccgagctcagtcacccacattgcttgcccagggcgcctggaagagctggcgagcccgcccagctctgttcacccggccccgccccgccccctccgggagggctctccgggcggcgcccagccccgagcagagcaaaggacggcggcggccacctccgttctccggccgctggtttctcgtctttcctcgtcctttcattgaacccatctccgtgcttcgaaaatctgactctaacccgatctcttcgcgtctccgcctcttctttctagagtgagcgccaaaaagggcctgacagacagaagcctttggccccagcaccggcccagcccgtctctagacgattcttgctcctttcaccctcacagcctccagtggtcgcttcatcttcgcaccctcccggccaaccctaactctcctcgtctctcctcgcgctgtctcgcgtcctcccctcaggatccttccgcacattctcagcgtccagcgcggtttcccacaacttcctcacgccccgctcccctcgccctgtccccgccctcgacaccacctgcgttccccactcgctccaacctccctcccccgctatccccacttgtgggcctccagctctctgcccctttcctggcccccatccctgacaccccagggacccttcctccctcctcacgttctccctccttccaggatcccgccccgacacttcggggccctcccgctacgcgcactctttctcctcaggtcctgacacctgggcgccccctccctgtcacccaccttcagctccagccctgactctcgggcgccttgccacccttacgctccccgccccgccccggtccctcgggcgcccccactcgccgcctctacctccctacctgctacacctggcacccctgcccccacccctgctcatactcttcccccgcccccgacacctcgggcgccccctcacacgctcctattctccacacttccgtccccgaaaactcgggcgccctctcccttcacgctcagtctctcctccctccccgcccggccccggacccagcctggagatcgcgctcgggaggggcggctgccgcccgcggggcgcccgcggtgcccgggcctgggcagcgaggaggtgacgccgcccccgcgggatgagcccgggaggcggaggggcggaggaggtgctggcggcggcactgagcggcggcggcgcagggcgcgcgggccttccgcgccgactccatcgacccaaggggcggcggcggtggcggcggctgagcgaccctgggccgggcgcgtgatgaggaggggccggcgccagaccccgctgcacgtcggagctcgcctggatccgggcgttggcagccgaagggccctggccccgggactctccgccgctagcccccgtcatatcttctccgctttcgcttctccactctagccgggggtggggtgggtggggttggggtctccgcgggggtttccggccccgcggcccgctcccgggtgtgcctggaggagttctccctctgtggcgcgcgggagccctgtgatgcgtcagccggcgggacggatgagttgcttctccgggaaaccgtcctcgcttcctcacgaccctctcggctcccgcctgggtgcccctcgggccggcagtactccgcctccgggcgctcgaagcgagttccccgggggcttgttcgcaggcaccccttcccctccgaggcggcgcgcgcgctcccggccctgaccgcggccggacacactcgcgccccggtccgcctgtcgccctcccgcctgctccctccagtcaccccacccttagctgtccccgccaccttactccaccaccctcccccgcctctccgcgcactccgcgtcccggcctccagttcccctttcccttgaaccgctcacttcacagcccttcgcccccgggaagaagaaacatttcccgaagcgcactcctcagccctccttccccacgcgctcgccctcccctccccctgcttttcttgggggaggggggctgtcgccttggattgaaggccattgatttgtatgtatttgtcccagcgctggaggctgccccagccgccgcgccggtgccgccgctgccagtggagttgcctccccgcttccctagggtggttcggctccaccaaacatgtcggctcctgtcgggccccggggccgcctggctcccatcccggcggcctctcagccgcctctgcagcccgagatgcctgacctcagccacctcacggaggaggagaggaaaatcatcctggccgtcatggataggcagaagaaagaagaggagaaggagcagtccgtgctcaagtaaggacctggctccatattcccgcctctctccctgccctccgccccctcgcccactgccctgcggccgcctgcgcgccccagttcgccgccctccctcccgctggcggcgcccaggccacgagggctgcggccagcgccggccgcccgggctgttttaggggtgtctgagagcaggggtgtgtgtcggggagggagggcgccaaggccggctgaggtgagggtggcgagccttaggcggtgtgattttccttggcgcctttccggatttcctcgctggtcatcttggctccggggccccagcgggactggggctgaacccaggctctgtgcgtaccctctcctttcccgccgcgctgaggcagtgactggggcacagaatccaatatggccgtgcacaggtgctccctggacggacccgggcgaaggcgcgctggcaggggatgcggacgccaccctggtcccacgcctccgcggggcggctctaccagcaacgcgggacagagcagggctgcccacagtggctgcgagcagcgggcggcggcgcgggctaggggcctaagctctgtcgcggtcgggtgggtgtgcgtccgccgccatcttccagcccctccccctcggcg

SEQ ID NO: 5300 - DNA, 1603 bp, Homo sapiens
  source 1..1603: mol_type = unassigned DNA
ccgcacttcgcccgaccaaggccggggccgtagtttgcatccggactggatttggatgcagccaatcctcctttggctgatggaatagtctcccctccccacagccccggcgcgcccctccctcgcgcgcctcgccgcctcccgccgcagaacaggagctgcgcggcccggagcggcggcggcggcgccggagtatccgtcccgcacgccggggcgaggggcgagcgagcgcgctcctcctcccgcgccctgcgcccccgcgctccccctctcctcgctgctcgctctcccgtccctccctccttctcttccttctttccgtgttatttttctcttctctttccccttttctctctccctgaccgttcgcttgtacattcccattctccccccgtcgctctcctctccccctcccctcctcactgtcacactctctgtgcccccgtctctcttctctcatttgcttgctcatctccgaacgtgaatccgcggctcccggaggagcccagcgcccggagcacctggagtccggccggcggcgggccgagcctggccagcggcggcggcggcggcggcggcggcgggagccgagggagcggcagccgcgaccgcgggcaccgcgggagccccagcggcagcagccgccgccgagatgtcccggcgaaagcaaagcaaaccccggcagatcaaacgtaagtttgcgcgcggggccgggagttggtgggattattgcccaggagcggggtgcgcgggacgggaaagcggtgggtgggtggcggggctaggggagatccgctcccggtcccctagatgtctcaaactttgcctgagcagtcgaagggacaactagacagtcatagacagacagacggccagcccgagcctcgggcaggagagaggctgcgaggagcagcccatgcttgccccgctcagccctcgcgctcccgggctgcttttttaattccgacccgcgcacgctgcgagtccccggcgctgtcgtccagccggaggggcagtcccgctcctttagacgcttattattgttgttgtcattgctttgtgcgattgacgtgggactactcttgggaaccacttttagtaaccagggtagaaacttctcagaaaagctgggcggtcgagacctcggggcgagggaggtaacttccccacgcggtggaaaatcagagcgtcagggtcccgatcctgggcggtgccagagccacaccaaacccgaagcgaaacaaaaagtaggtgtaaaagttcgcgcctctgcggcgggcggccgtgcgtctctgccctgcgggcgcgggctggtggctggcaggtcgtgtcctgggacttcgggcgggtccggctcacgccgccaggacgctcagccgagcggggattcgggtggtgtctggccctggtggcgcgcggagtcctccctgggaggggccgccagtcacttcccagcgcggaagctgtgagttcaaggcggtgggcgcgcaggggagtgcatggccctgagcccccgggtgcccgggggtcccgatggtgcttagaggacacggcgggtcaagagacaccttccgaaacaggcacgctcgcagagatcaagtcg

SEQ ID NO: 5301 - DNA, 1365 bp, Homo sapiens
  source 1..1365: mol_type = unassigned DNA
gcggcgaacatgagtgcggaccgcacgacttagccctgagcgcccgattggcgcccggctcgccgagctcccagcgcgtctcgctccggctccccgcgcctccagggtacagaaaacagagtgttttgtagagctccagggtcctaaaggtggggactggggacccgcaaaagctggggtggagagcacagccctgaccatctgagcccccggagccagggcgtgagtgagcgcctccacacgccacccctgaagcccaccacgcacctttggcagagagggacccacctcgcttactgcgtctccatcggttgccttggcagtggctgtaatccatgcagttcagaatgatgagggcaaaggagaaaaggcgaaactgcatctgggcggtcgggcgggggagagacgcctctcaaagtctaggaactggagggttcgcccaaagagccggcgccggccgcgctgctggggaggactcagagggagactcgccactcacccccgggccgcaccggtcagttcagcgcgatcagcatctctccgccacgaacctgagagacaagaagcgaaaacagggtgtgtgggggatggagagagccccggggaggcagctgcgccttcgcacgtcccaatttaaagaagagagggaaggaggaagcgaacccactgcctagcacgagccgcggagcggcttaatccagagcgggcagctgcggacgagttggagaggaaggtgattataatcagtgaattagcaacctctgccgagccctaagctccgacccagcggcataatgcgttgtgccggcgctccggggaaaggaaagaactctaaaggcactgagagcgcagggctaaaagaacgctcttaggccatttggagtccacggcggtgtacccaagcgccgcagctgcggctgccttggtgtgggttgcctaccgtgcgcacgtctcgggcggcgcggcctccctaggcgcggtgctccatcccgggctcgggaagcgagccgcttggttagcacgtgggctggggaaaagtttgccgagaccggctgggagcgcctggcagctctggaattccagcggccgccgcggggttggcgacgccaggcaggagcgcggagcggcgggtgcagccactgggatgctccgtccccgcccgcgagcgcggtccccaggcaaggggtgcgcccgctcacactctctgcctccctaaccaattgtgtcgcttcctgcgctttctccacggtcacttcacagctaagatttctttctttccgagctgtagaaggcagaacgctctcgggaggacgaagtgatccgaagggatgtggcaagcgcactttccgatggagatgcagaccg

SEQ ID NO: 5302 - DNA, 419 bp, Homo sapiens
  source 1..419: mol_type = unassigned DNA
tcggggaggcgacctctggatgcgccctgtgcgagcaaagccgggagagcgagccccaagcacctggcagcggtgcccccagcaggcgccgaggaatccggctatccatttctggtgaactctgcgcccactgaggcattcgaggtacggatgtgtccgcctagtactcggagacgaaggagagagagcggggatatgcgctccagctctgctaggctccagggctctcacccttgcattcaaagcctccaccccatcccactccccgccactcaccttctgcttcggccacccggtgcggctccagcaccgcgcgctctcccggcacggttcccggagaaagtcccccaatcaccagctacggcacttgtagcctctgcacgccgctcggctccgccgggtgggcagcgcccgccacg

SEQ ID NO: 5303 - DNA, 3675 bp, Homo sapiens
  source 1..3675: mol_type = unassigned DNA
ccgcgcagcccagcccgcgccggggcggtgggtgggtgggtgtctgctatgggattattcttagcgctccactctcttcgcaaaagtggcgcctccgccctcccggctcaggcacactcgctcggggctcgcacgcccggcccagacaccagcgcggtggagagcaccgggtggggtccccgaagggtgaggctcggaggcgccgcggagggggggctccctagagaggagggggcgctgcgggaaggcccccaagggaggctgcgtttaaccctcgacgccctgcacccagcccggcgcggcgcgctcagccgcctccccggactcctcccggggcgcgggagcccagcggcgcgcccagcccttacctatggtggtgatgaccgtgatcgcaaagtagaaggagccggcgaatttccactggacgccggcgcggtgcggttccgactgcaggatcaccagctccagctgccggtagtcctcgctgctgatgttgtacttccccttgatccggatctcctcggctttgagtttctcctcctcgcgcatctcgtggtccgactcgagggcgtcgaacacggcggcgcccaccagcaggtaggtgaaggtgcagacgatgagggacagagtccgcacgttctgcctcttcatggccgccagcaaggagccggcgcggggggcatgtcccgcaggctcacagccgcgcgcgtcccactgcagcgcccggcggccgccgccgcctcctcctccgccgccgccgccgccgcctccaagttgtaagcggcggcggcagcagcagcagcagcagcggggaggcggggggcggggaggctggggggggccccctccgctggggccgccacagccaccgccaccgcgaggcggctggcggggcaggggcggcgcgggcccgggctcagccgagaaggcggacaggcacaggaggctgctcgagcgccggggccaggcgtccgggaaccccgacaccctgcgccagacccggccgaagcagcccgccccactgcgcagggccatgcagggcggccccgctgggtaccgcgcgggccttgctgccctccgcaccccgccccccgctcccgcgggaaacgcagggacgggaaccggagccagaaagcggccggagggcggccgcggggcccggtacccctgtgggtccagctcgcgggtggcggtgcccagcaaggagcctgcaggtccgcgcgcccagcggaacctgcttccccttttacccctcctcgccccctctcggtggtggggaggaaaagtttgcgaagtggcggtgtctctggagtcccctgcaagcggggagggggccgagcaggtgcagcgggaggggcagcccgctccccaaaggtccgcgcgcccagcgcccacccgggcgcgcgggtgcgcagcggggtccccgccgggcgtcggccggtgcgcgaagtttgctcggctcaacccccaaggcgcgggagcggggcgcggccccaggacggcagggaccgcgatggagcggcttcgggggcggccgggggacggcgcggtggcggtcggccagcccgctcctccgggggcggcgggcgcggcggcggcggcgggaggggtcccgcgggcctcgcggagcagcggggcggacgcgggcgcatgagccgcgcgggggtcggggccctccggcgtccgggcgtcccgggaggcggccgccgcgctggtctgccccgggcgctacgtgcgtgcgcgccgttgggagcccgaatgtgtgtgtgcgcgtgtgtatgtgcgtgtgtgtgtgtgtgtgtgtgtgcgcttggcagccccgctccggcgggagggcctcggggagcgggggccgggctacgccgaggccgggcctccctccctccctccctcccgcagcctccagggcgcgccacctcccgcctggtccccagccagctggcgaggctgctgtggcagctcccgctgcagacccagcgcggcgcagggcgcacgcggagggagcccgggaggggcggcctgagccgccagggagggggcgggggcggagccgccggcgggttttggcgggggatgggaggataaacgcggcttcttgggtccttctagccccgctccccaagagcgcaagcagccctggcgggtggagagtttgagggactcggggttggaggaggaaaacgggattcagccagagatggcaggctgacagcttcaggcagattgggcagagagtggggagcagaaggggagggggccatgggcacacaggagagcggcagcagcggttcacgaagtcttccccaccccccaccccccacctagccacccggcgcgggagcgtgtcattggccagggacatggcctcgtggagtggtggggtcccgagggctgcctcggccccctcgcctcccagcggcacagcccgcttgggccagcacctgcagacccgagtcgtttccctggagagcgctaaggacagcatgggccgccacttttggagtcaggacagcggggaaagacatcgcaatcccccgacccagtaacctctctgttgctttactgaaggaaaaaaaaaaaatacacacacacacacacacacacacacacacacacacacacacacatatatatatatatatatatatatataatcactctttgatatatataatcactctttggttccccacagctgggcgcaaggtgcgccgtggatgcagccctgagccacgcgatagccccctcgagaccacctggggtaggaacacgaggctcgggctggggcgcacctattccctgcttccagatgagccctctccaggctttatctccttcccattttggcctcctttacctcctccccctccccgccctctccctttaggctatcgaggggcttttccttgaccttcggcttcctgaatcccgcctggagccctggagctccaaaaggacagacccaagcctcagagacccctgggctcctcttcctctcctgaccccagccaaggaagggatggagatgggaaagagttgcctggcggcaggctagcagctggccaaggggtggctggggaatcagacctaaccctcgggcagctcgcgggctccaggagaccagtcccttctgtgggtcgccccctggagcggtgctcgggctccctggcctcagggaccccgggcccagagggtctgggaccccagtgattcaccgaggcctcccagctgggacgctctgcaccccactttcagggatcacgggtgcccaccagggaaggggagcccgcgctgtgggctacgtctgagccgtcaggtcctcgctgggtctgcgggcgccctggggcgagggagcggggagccctaccccgagcaggcactctccccagattcattttggaaaccaaggcccccgcgctcggcaagtgagcctggctgccgggtgagtcaccgcgagcgggcgacaaggattcccagcagctggtaattaattgcgccgtggctcagcccacgacggaaccccagtcaggcctcccgccgccctggcagcggcgccacccctgagtcacagccgtcgggcctccgcgcggtccggaagccgcctgcccgcctcggcgccaccagggggcactggactccgacccacgcggcggccgcgcagccggcctcgctgcg

SEQ ID NO: 5304 - DNA, 3675 bp, Homo sapiens; identical to SEQ ID NO: 5303
  source 1..3675: mol_type = unassigned DNA

SEQ ID NO: 5305 - DNA, 3378 bp, Homo sapiens
  source 1..3378: mol_type = unassigned DNA
gcgagcgcggagccggagagccgggagcacaggcggccgcgccgcgtcctggcccggcccgggcccgcgcgccagcatcgtccgcagcgcgggcatccggaccctccgggcgcccggggggctccagcaggcgcgggggaacgggagggggcctgcgtgcgccggcgggtgctctccagggggcgtcccggcgaggcccagagcgggccgggggcggcggcggctggaggagccccccccacctccggtcgggcgcccggctcagccgccggcgacgcgaggcgctcgcggggatttgcaactcgccggatcgagtcctcgccggcggggccgctgctgctggggaaggtaaggaaggctccggcggggggctgggggcgcggcgggtgggggcgcagcgagggtgggagggggtcgggggaggggcgggcgcccagacttcctaacttcgccgtttggggcttcgcagctccgaggttttgcgctcagagctcaggagtttggacccccaccccctaccccctcagccccctgccttctccagcggtggcgatggaatgtggcaggtccccgcgagcccgcattgggcaggctgaggagggggcgaccctggacgcaggagaggctcctcggcgccgccgcctcctccccatccacacaccacagcctggcacccctcttcatcacatgcacagggcaggctggggagggcgttcccgctgtacccccagcacacacagacgctggcgggggtctaagggagccccccatggcccccaacagccacacatagacgcagcaggctccggagagcccccgagcgtgtccccctcctgctaatcacgtccagggccccctacagacattgtaagggcccgagacgtcctccccccacgcacagagctcggggcaggcaggagaaaaccccagactccttctcgaagccctcgctcgtagaagccctcgcctgtagacctggcattggcagtggagactccctggaggtactctcccccacttcgggcggagggctatttttgcgccccccacccccacgcgaacgcctggctcttccctccttgtctacctttccactgggtcggacaggccgcgcggataagccgctctcaactttgggccggccctatgccgtctccgctccaagcgccgagcactcccgggcgccgagcactcccgggtccgcgtcgccggtgagcagaggccgccggccctccaccgtcgccgcgctagcttggagccgcgcggagctgcctcgaggaacgagcacggcccccgccccctcctggggaggctgggagctctggacccggccaggagccctctccctaggtccccgcggccccctgggcgaggtagagagctcctccggcctcgggagggggcggcggagctgagaatcaccgcgaagcgatgcgaccgggagggcttgacggaggctgcggctccgagcccgcgtccctcctcctggccgcggcggctcctgcttggccactccccggcagcctgaagagaacgcctaatctggcaccccagccccaggccgctgggcaccttacccctttccacttttattttgggcttctaagtttcttggagcgcaggcgcctaggctgggacccgaagagccctaagccagccctctttcagcacccgtccccgccgcgacctccccgttcttcctccgggtctggggcgcagattcctgggctgcaactccggagtagttgaaaggcaggaaggcgtgtgggcgggtagggggcctgcactcccgccccagaggagccgcttgtcgtttgtgttggggagggagctgggaggtctgctctcccgctccatcctgggaacccacggagaccctcggtactctccccacagacacaaacacacgccccctcggagcgagagccgccgcgggggaacagcagaggccgcgcgggcggaggcgggggaaaggggagctgggtcccttttctatctgggagggaggtggtatacggtgtgtggggtctggggaggcgactgtcacgtctcctagaaccctcatgccttccactcgtctgcgaccccggctgccgaggaggcaacgagggaggtcgagccgctccctcccgtgggcggcagcgaaactctgcgcccgcacgccggggtgccgccgagtccggctttgagtacccagcaaggtcaagcaggcgaaggagggggcgggggttcctgggcgcgcccccgtccgcgcacagtcggggccttggaagggggtgtgcgcagcccgccgagtcagtcccgctcgcctgccgcccgcgcccggtccccggaggcggacgttgcgcgcgttcggggatcccggagcgcccggcgccccacgccctcccttcggctcgctagctgctccttggcgctgctttcagacttgttgcgcctcgatctggggggcagaaggctggcccgggagacccggcggctgagggccgagccgcgaagcccagggatgcgccagagaggcgcgcggctccgcgggtgggcgctgcgctggggggctcgagcctggggtttgccgcctccgatcccagggacgggcgcttgttcctgccggggtcccgcgcaggggcggatagagggcgattcgtcgcctcggcctcaggcagcactcatccggatcccgggctagggagggggcgcagccaagttgtggagccctcggaggcccttccctctcccgcaggctccggcccctctcggacctcggtggccgcgtccgtgaaatggggacgcgggctctgctctcggatcccttccagcccccgaccctccgcacttgtcccgagatccaacgtgcccggtccgcagcgtgctgggtctgcggcgtcagggtggcccgagtcccgagaccatctgcgcttgcggacacagccgcggggcctggcatgaagggccccagggagggcctagcaagcgcccggggtccgagcagcctcctgcggcgtcctccgcccccggtcggcccgaccccgcctccgggagtgggtcgtggggcgcggagcccgtcctccggggacgccgcggggctccaggcccaggcggccggcgcggggccgcagtggcggaaggcggagggccggcgcgctgccgctgactgccgggagagggcgcccgcaccgcgcccgcgcggccctgcccgccccttccgtctcctccgcgcctggcccgcggctccggccccatcttgggcagccccggccgccacctccctcccgcccgcccgcccgcccgctcgctcgctcgctcgccgtccgctcccgccgccgggtcccgtgacgcgcctcgcgtctcggccggagcccccctcgccggcccggcccg

SEQ ID NO: 5306 - DNA, 1108 bp, Homo sapiens
  source 1..1108: mol_type = unassigned DNA
gcgtgctcagatgaaaagcggggcagtcgcggcccgtagacagcgggcggctgggtcagaccgcagagggaagtttccagcggcaagcctccccgcggggaaggctgtgtctgtcccaggagatgagccgcaggcaccaggggtgatgaggcccgggggaggtggatgtgggggatggagcggtcccaaggtcgtcagctccagccggcgccctgggccgcggggccggagagctccggagcggaccctcgccgcgctccgaacccgccccgcgcccccaggccacacccggctcgcaccctccccgctccacgtgcgcccacgcgcccctccgggcctccccctccttcccgcgcgggccgggggcgcgggccccggaggagctgggggcggcgggggcgcggggcgggcgactgccgggccccgggccagctctcgccccccgccccgcccccgatcgctcggctcccccgcccggcgctccctcgggctgcgctccgcggctctcggcggcggcggcggcgggcgcagagcgcggcatgggcgcccgggccgcggggcctggcggcggcgggcggacgggcgcgcggctgcgggcgcaggtgcggggcggcgggccggggccggggccggggcgcggagccgccgctcgggggccggggcgcccgcgtccccgccgccgctgacgctccgcctgtctccctcccgtgtcccgcccgcccccagaccctcctcctccgcccccccgcagctcgggccctggtcgtggcgcggctgccgcacggtgcccctcgacgccctccggacgcgctgcctctgtgaccggctctccaccttcgccatcttagcccagctcagcgccgacgcggtgagaccccggccgggccggcgggaggggcgccgggcaggggcgcgggcgggggctgccggcgggcctgcgggtggggagggcccgcacccgtcctgtcccggaggggtcgctgtggcccgcagccgccgtggcctggcccggccggcggggtccatgcgcctctggagagggtgggtgggcgccgagcgggtggcagtgtggagttggagacgggcctgggaggagtcgggacccccg

SEQ ID NO: 5307 - DNA, 1700 bp, Homo sapiens
  source 1..1700: mol_type = unassigned DNA
gcgcggggtgggcgctcccggccctccagcccccaactccctcgcgcacccgggacgggtgaaggcgcccagctgccgagcatacccgcgacgcgggttcaaatcccgccggctcccaggcaccctcaccccgccacagcgcgggctgtttctcctcccttccccggaggaattccttaactctccagtacccataccataacaaaggaggctcggtccaccaatgcgcgatcgtagcctacagggacccccaacgaaccccggcccagagaatgcacctggccgtgccacgcgcgacccccgaggggcaggcggacgggtccaggcgcggacaaaggggcctctcggggcgcccaagctcggggcgggacgccgggagcggagctggccgggaactcaccttcgcagcggcccggctgtgctcctcgtggagcagaagggcggcgggcagcagcagcagccagacgctgagccggggccccatggtggcgcgcccgaggcggcgagggacggctgcccggcgtgcgggggccgcggcggacagctagctctcggaaggccggacttccagcgctacgcaccgtcccgggtgcggcggctccaagcggagacctgagcgcggcgggccgagctccccaatttgttggcgctgccccctcccccccggcggtgcgcgggcggcgcctcaaaggggaggaccctgcggcgcgggtaagaggcggcgggagcgcgcggcccgggagtgtggctgcagtgcgccgggacaccagggctccgcgctccgcactcaagaggctcccgcgtcccaacccctcgcgcccgcgcgttcgcggatccaggccgaggaccgaaaggggccgcccgagcccccggggccggcgcccagagagcccagcaaggccggccgccctgccggtgtgccgccggcgggtgcttctggaagggccaatgcgttcgggcagcagcccctgaagccgagcccgaggtgagagcgacccccgagcggcgcccagaccctggcccgagagcaccgacttggagcgccttgtgcaggctagggctgcacgctctcctgcttgggagtagaaagggggagggtgggagagcgaagaccgagctcctcggccaaggagcacccacaggggcctaacgggaggctctccttctttccgggtcgtgggggggacggccctccggtcacccctgcatgcgggccgcgcaccgcgctgtccccgcgtctcgcggaccgagaccggcggtgaggatgggctgcctccctcatcctgcgctaaactcgctttgtctgtcgcctctaggctaagtgggactgaccggggcccagagtggacgaaccgccagcatggggagagaccagcgcgcggtggccggccctgccctacggcggtaagcgactttctgcctggtccccgtgggtcacgcgcgcatggacccttcggtgtaactctcggggactgacaagccgggcccgcacgttcacgtctctcttcctccctttcccatgcaggtggctgctgctggggacagtgaccgtggggttcctcgcccagagcgtcttggcggtaagtcctggctcccgcgcttggacttgcgcgcccgagagtggttgggacgtttgagtggccttggagaaggcagctcgtccgtgcgctcccgagtgtgtgtgtgcgtgtggatgttcg

SEQ ID NO: 5308 - DNA, 692 bp, Homo sapiens
  source 1..692: mol_type = unassigned DNA
tcggcgacccggccatttcccgagggtctcaggcgtcccacccaacggccgctccccgttccctgtccgtcacctcctcgttctcctacgaaggcgcgaacgttccagactctcgccggtcctcgacagcactcattcagtctcccccctggagatcccaggctgtactctgggacagaaaagaaggcgggtacgaccgcggtgtcgggtcctaccttagccgctccttctcctgagggagccaggcgggagagaggggaaccaccgaggcctcggtcttcccgcgtcccagagcggccgggcgagtctcacttccggcctgtgacccgctgacctgtccttgtcccaccagtcgggcggtgaattggactgactggtgacccctggcaccaggcttccccatgggcaccggagcaggcggacaggggtggggtcccgcgagcgacacggaagggtcagtgtggcggagcggaccctgtggaggcggggtcactgtgctcctgagaagggtcctcgggggtggagtctatcaaggttgcgggggcgtggtcacggagcggagccaataaaagcggggcgtgcacggccgcgggccagtgcctatgaagggcgaggggtgtggtcacagggcgggatctacgaaggatgcaggggcgaggccgggtctctgcaggatgtgcggtcgcgggtcg

SEQ ID NO: 5309 - DNA, 1924 bp, Homo sapiens
  source 1..1924: mol_type = unassigned DNA
ccgccgtttgctcaatgtccccgccagccttgtcggtccttaccgccgtttgactccactgtttttctcgtggtttctgctgcttctctaaattgtccaacgaccgttattcagtaaaaatgaatgaaacggggccgtgtgatctaggcagcctggagatgagattttggaatcataagctacattccaacgtataaaccgattttactcgttttggatactcgatgtacgcggaatgggcgctgtaaaatgcggctgccccgccggaggcatctgcttgggacttgctggcagccgccggtcccctctgcttgcgaccctcggcccagccgccgggaccctggtgcacctgttcctgggcgtcctctctactccccagtggccgccagctccactcccagcctgtggccccggacccgccggcctgagcgttcgcagagggccggtcgtcgccacagccccgcgtcccggcccccgcgccccttggaccttcgccccaggccggcgcagcccagcttcccgggcaggctccacgctaccggggtccagtgcgcggcgacgaagcggagagctgtgtccagactccggagagaaactccggctccgcggggcggcgcggggcggcgcggggcccggagctgcccaactccgccgcctcgggaaggcggcttcgggcccgcagggagccccggggagggttcccggttccgccggcagcggcgtcgaggggtgcctgggctcctggggaccgcgagaggaaaaagaacggaaatcgcaccggggaggaaggacgcgcagaacgcccccgtgaagcggggtgctccggtcaggcgtgcgcgggagcgcggtccgggggagtccggcggcgccgtcgcgcgcactcggcagaggcttcgcgggagaacgcgcagcccggggcgtggggcggggaactgcccgcgcgaggctttcggcgcgtctgggtctcggcgagagcaaagcgcgtcctggcaccgggggcggcggcgcagaggccgggaggaagaaatccgggccctggcccaggtcgggcttccacccctgcgacccgcgagaggcccaggcgggaaaggcggcgagtggcgtcagcggttccgaaagcaaacctggcccggtgctactgcccgagggtcgccgggcgcgtttcctaattcccccgagtctggaaaacggagacttccgtagcgtcttcttcagtgcgtgctgcgagtgctgaaggaggacccggtgcctggacgacccggagcaggggaagcactcggccgacgctgtcgctgtcatcggcgtcattggcgggcaggacagtggggcgggtaaggggcctccccgcgcctcccggcccttcgcgctcggcgccagctctttggctcccttccctgcgcagctctaggcttagctctcagccatttctcaagaagacgatcccgagggtcgaaggccgcccttgacccttgaccacggactctccgtgtaactcggaagagccgtgattttaaaacccggcctcggggttacagaagcccgagatctgggaggcgtccgggacctccctcccagaaccgcagggacccggcctgggatccagggtgtggcctctcgctctgcgcggtcgggaaggcggccgggtccggtcaccgcgccaagcactgcgcacccctgggacgcgtcgttgcggggggctggggggctggggcgcctccacgacgcctggtctgcccggccagtgcttggtgtcgttggtgggttcgtggctgcgacgggtaaacgtccgttccgcgagccgggcaaggcaacccctgcgggtcgcgcccgaaggccggacccctccaagccgcctgggagcttccaaacaggtggacccgaagctcctgtttgatcggagaataacgttcaatttactccgccg

SEQ ID NO: 5310 - DNA, 1991 bp, Homo sapiens
  source 1..1991: mol_type = unassigned DNA
tcggtgcaccgtgctttggcaaccgggtcttggcgcctccgagagcggggcgaggggtgccacgcgattcccaggccgctctgtatctctcggtgcgcttgcagggaccctgcagcaaagccctggatgcttgcagccggtgcaagtttgcaagcagctggagagcggtggctggagtcggggggcggtgggcgtggccacgctccctcccaggcagtcccgggaatgttctgaaaagtatccgaaagttctgagtcgcgcgcgcgccaaaagaaaaggcacaaccccccaccactccgggcgtggcgtgcccagacctcgccactccagctgcgcctccggctgcagcgcacacgtctcctgcgcctcctcctccggagcgtcgctgtccgtcgggttcatccctcgcagcagtctccaggcgagagagggggccagagtgctcgcacttctcctaggggcaccatgcccaacgacgaggcattcagcaagccctctacaccgtcggaagcccctcacgcccccggggtaccgccgcagggcagagccgggggctttggcaaagcgtctggggcgctagtgggggcggccagcggctcgagcgccgggggcagcagcagaggaggcggctccggctccggggcgtcggacctgggtgccgggagcaagaagtccccgcggctgcccaagtgcgcacgctgcaggaaccacggctacgcctcgccgctcaagggccacaagcgcttctgcatgtggcgcgactgccagtgcaagaagtgcaacctgatcgccgagaggcagcgcgtgatggccgcgcaggtgggtgcgggcgtgcgggagcccgggttcagccttagtttttttttttttttttttttttagatggagtctcgctcggttgcccaggctgcagtgtagtggcgcgatcttggctcactgcaacctccgcttcccgggttcaagcaattctcctgcctcagcctcccaagtagctgggactacaggcgcacaccaccatgcccggctaatttttgtatttttagtagagacgggggtttcaccatattggtcaggccggtctcgagctcctgacctcaggtgatccacccgcctcggcctcccaaagtgctgggattacaggcgtgggccaccgctcccggcggggcccgagtttcttgaatgaagtccccccagcatggccgttgccatgcgggtcctgggttgtggagagatgcggcggtacttgccgacagcggcggcgcttggggtcctgggctcccggccacgctacatcgccggtctgggagcgccggagacgcgtctgatcccgcccgccgggcagagttgcgggcttcgctcggctcggggttccccacgatctctcaccctgtgtttcggcggagttgcgggggttccctctgctcccgggtccctgagatccctgatcccgctctcagggcagggaattccggggttcgcccctctgggcttccccgcgatcccagagcccgcgttccaacagaattgggagggtttattgcgctagaggagtcttcaggatcttcgctcccgccctccgaggtgaggctagaggggagggttcgactccaagggaatcccagggatctctagccccgctcttctagcagagaattaaggaattctctccgctttggggtcccaaaaatctccgaccgcgccttgggagcagagggtttcggggttcgatttcctcgagcgtccccagaatctctgactctccctccttgctgagttgcacttaaattagaaaggatcttggagggcggcagcgctggctgctaggttagcgggaaagggaggctcggccggctgctgcttacgcgggtaacctgtcggaaagccttgtttgtttttctggaaaagtcgctgcaatggacacagcgttgcgcggtttccctgcgcgcctggggcgctttttgtcttcgccctccgtggatggaggctgagcg

SEQ ID NO: 5311 - DNA, 1667 bp, Homo sapiens
  source 1..1667: mol_type = unassigned DNA
ccggggtgcaaccgcaacactcccgtaggttcgagttctcccggagctgagcttctgcggccaaatgtcgggataaaagcggccttgggctcggaaaaacgcggccagatctggactggagggaggagaagagagagaagcggagcggccacctcactcgcttacaggcacccccaccctcactcccgctggtcctccccttctccgccccgcgagcaccgccgcgttctggagcgccgcagtctccagccgcgggctggggtagcggagagggcttggaggagggggccgcgagcgcccccgcgagagtggcctggctgcaggtggcaaggaaggtgaagtgcaggcacccgaggggcgcaaaggaggaggaaggcgtggggcggggagtgcaaggagacagggaccccaggggcgggggtggcggtgggaaggaggaggggttgggggagggcggcggaggtgttgggtccggccggctcacgagggagctgcagaagagctggctcagaccttaatcagagctgtcgccggctccttgcagccgccgcagcgcctccgcgaaggaggacgtgccgacccggctgcgcgcccaaggcagaggcccgcgtcggcgttggctgggcgtgagctgggaggccgagctgtgagcgcgaagggagctggagagacgactgcggcacctccggccgccccggagcacacacgaccaccggggctgcgggaccaagggccgcgtcgcccggaggccgcccctgagcgggcctcgcagccccgccgtccagcgctccctggccctctcccgcagccaggctgccaactcattcgggagcccggggcatgaacggctacggctccccctacctgtacatgggcggcccggtgtcgcagccgccacgggcgcccctgcagcgcacgcccaagtgcgcgcgctgccgcaaccatggcgtcctgtcctggctcaagggccacaagcgttactgccgcttcaaggactgcacctgcgagaagtgcatcctcatcatcgagcggcagcgggtcatggctgcgcaggtggcgctgcgccggcagcaggccaacgagagcttggagagcctcatccccgactcgctgcgcgctctgccagggcccccgccgccgggggacgccgtcgccgccccgcagccgccgccagcctctcagccgtcgcagccgcagccgccgcgccctgctgccgagttggccgcggccgccgcgctgcgttggactgccgagccgcagcccggggctctgcaggcgcagctcgccaagccaggtaagagcgtctgaggtgcgggagtttggccgggcgcgggggcaacttcggagtgccagctgcagctccacttgggaggactggaggcaaagttttgggacgtgggcctgtcggggctttccttcctactctccgccaggccggggcttcctctcccgggagaagccggctgagtctggacccagcgcgagtggcactcgcgcccgcagggaaggcgcctccgggcagccaaacgacgggactgtgcgtcagtatcgccaggtgccttcccaggttgaagggttcggaacgtgtcagattgagcagggagacaacggagttgagacaggacaaaattaaaacccacgtgcgcacactcactacggtggggtcg

SEQ ID NO: 5312 - DNA, 433 bp, Homo sapiens
  source 1..433: mol_type = unassigned DNA
ccgcgagataaatggtgacttctctcttgcaggcaccgtcatacctcgggtttagattctggacaggcgagccggctgcaccgaaggcccggtaggcggactctggcggagcgcttcagagagaagagtgtagaccgcgggaggcggagggctccctgccagcgtgcctcggccaatcagtattcacaccgcctgacaaccggccaatcagaggacgtaaagctccggggcctgagcggacagtactaggaaggggagcgcagtctgcagactgaagccagtggcgctgcgctgaatgcaactgcgcgcgcccgccgggtgagccagcgatctgagccaggcgggggcggcccgacctttcccgcccagcctgggtcagaggaagccgaaagcggcctcagcaaggtgaggcgcccgaggctgcagaagaccg

SEQ ID NO: 5313 - DNA, 896 bp, Homo sapiens
  source 1..896: mol_type = unassigned DNA
acgaggaccaaaggcacgaatttgcttccacgccacggcccgggacccagggtgcggggaccacgcggagcgcagcagagctcagggtaggagccgggaggccgcgcaggcagagcccgggcagggcggaggggaggccgcggagggccgggtggaggtccttaccgccagccccaaggtctgcagcatctctctctggtctttgtccccagggccgatgtgcctccgagcgaagtcgtcgtgtctgggcagaaggcgctccaggaggcgcgaggccccagccgcggcgctgtccccgccgccactgctgctgtcccggctccgcggcgcccagcacggccccgatcccccagccaggcggcggccgcccccgaccccgcggcccaggcgcagcccccacgccctggcacaggactgcatggccgcggccaccgtcccctgccccggcccgcaagggtcagccgcgctcttggcccctctcctggcctcggtcccccgggtggcggctgcgcccggcctggagcccctttcgctggacagtcggccggacagatggatggacgctcgcgggcaatgaatgggcgctgcgctcaaccaagacactcgcgcaaagttgtggctccacccaaggcacctgctccgcacactttaagcggcgccctggaggcgggaggtgggttggggccaggaagcccttggccaatgaaagtagacagagggggagggggcggaacagttcccgcccccgccccctcttcctaccctcttcccagcccttccgtggagtcccgcttcccctggaccggaggctgccatctccagtcctacccactccgacgctggctggtgccgggggccgggacgctccgtacgccgcccgccagggtgtggagccg

SEQ ID NO: 5314 - DNA, 1494 bp, Homo sapiens
  source 1..1494: mol_type = unassigned DNA
ccggggtcttcccaagcggagcacctcaaaagccgcaccgcgcagtagaggtctccaggggcccccactcgcccccagtgactacggagcggcctctacctcccgccggcgcctggccacttctcctcccccgcagtctccgcttgatttccatgtgactgcaggcaagaatagcccagcctttgtgcctctgcaaagaacgcaaacaaaaatgtacaccatcaccacccaacaaacgcgcaactccgcaagacacaaagcgtctcccaaacatcgcttccctggtaacatccggcatcctggggctgccaaatcgcagacaaagacgcccatcagcgcggggggtgaggagactaagggagagacaagaccaacgtgctcccaccaacgggagcggcggttaaaagggcgccggtgccaggggtgagggacggggcaccggtaccaattagcggctcgcctcggggtccccgcggctaaggcgagaacgcaggaccaggagcattgctgcccactctctaccgcaacccgcacatcccgggaccacgtaacggcggatggggcgtccgggagcggcccctgcaggggagagcaacaggctcccgcgccctggaggcctggtctgcgctccgggcccccaggctaacaccccacccccagccccccgacaccaagactgtgcccctctgggtcaaggaaaaggaaaaacttttaaacctcttagtcagcgagagcaaaagaaaggggtggcgggggtgctgaaaggtctaggattatccaccgcggggctggggggagtggagacttgcgagtagcaaaggaaacttctagaccccatccttttaaaaaagccacagcagcggcttccgcgaagcgccgggccgcgcggggtggggcaagcgcaccgccccaccgccccacggcccgccgccacccctacccccacccccacccccacccccatccccgcccccacccccacccccaagcgccgagcccagggcgcccgcgcaccttccccgccggcgcgcgcgcagggcgcgggggcgcgcctcggcctctgggccggggctcaagcgccgcttacccggctcgcggcgcccgcccagggccgcgacgcgagggggcggaggactggggagcaggggtcgccggggcctctggatgcctcgcctcgcccacgctcactgtcttctcttctgaagtaacgacccggcgaggagcttcggatcaaaacgcacagacactcacgcgtgactgagaaacttaatcccgcggtggcccgacgccagcctagcgctccgccgcgccccctcccccagcgcgcgccgcacttgcgccgaccggggctgccgcggaggcggtggcggggcccaggctgctggggctgccgtgacgcctgcgaccggcggggcggcgggcgcgccttggccaatcaggggacgcggccgagcaggcctgtgcggggttttaaactcgctcctgggccgctcg

SEQ ID NO: 5315 - DNA, 828 bp, Homo sapiens
  source 1..828: mol_type = unassigned DNA
ccgcgacctcaccggggaaacaccgcggacagtcgggccagcagcgcccggagctcactccaggtctccaaacttgcagcacttcccagagcgcgcgcgctcggagcgggacctgcttgctccagtgcacgccgcggagcgaaccatcgggctggcgggggtggaggggtgcaggcgtgggggctgcgggccgctcgggccttgggcttctcctgccgccgccgccgcctcccgcccccggccaggagtcgcgcgtgacgcggttcgccgcaggagcctcgaaggcgcggcgccggcgagcccttccccggcaggcgcgtgggtggtagcggccaatttgacagtttcccgggccgggcggccagcgcggaggcgccacgctcgggtcgggggcgggctgacgccgccgccgccgcgggaggagggacaaaggggtgggtccccgcgggtcggcaccccggcggttgggctgcgggtcagagcactgtccggtggtgcccaggaggagtaggagcaggagcagaagcagaagcggggtccggagctgcgcgcctacgcgggacctgtgtccgaaatgccggtgcgaggagaccgcgggtttccaccccggcgggagctgtcaggttggctccgcgtaagtgcctccttgtgccgcgcggttgggaggagggtcgtgagcgtgagcgtgggagcgctgggggctctgctcgcgtgctgctctgaagttgttccccgatgcgccgtaggaagctgggattctcccatccggacgtgggacgcaggggaggggtaggtttcaccgtccgggctgatgactcgtggcctccg

SEQ ID NO: 5316 - DNA, 2705 bp, Homo sapiens
  source 1..2705: mol_type = unassigned DNA
ccgtgcttggtggcccgggtggggcgcagctgcgggaaatgcacccggagctgtgccccctcccggcgaacagcctgcgccacccgccgcaccgggaggtggctgggggctgccgagcgagtggtgaacgcgatgggtggagagcgcccgaaacgaggtggaaaagggggcgggggcgaggcacggcgccttcttgccccttcttcagctacagacgcggcggcggcggctgagtccctcagcctcggtcatgtgatagtctcgaagcgctagctgcgggggtctcggcgtctcggggaccattacaaaacgcagccaggagagcgcgtcgctgccactgccgtcgcctctcctcctcaagacaagcccgggagaaaggcggcagctgcggcgcggacggctgagcctccccggccagcactcacccagcattcgcagacgccctctccagcccgccgctcgctcccagagtcctgcgccccacactcctcagcagaacctgcgggcgctgccgcttcagaaaccaccaaagttttttctcctcagcgacagcctagggctgcgcgtctcttctaaccccggcgacgctgcgagcctcggagaaaagagaggcgccctagaagccaatcttctctctccttaccctgatttttcactccaggaaaaggagaactccagcgcggtctggctaagtgcctggccaggggcctgcgtccagggcactggaagtcctgctgtcactggcctccaggacagcaggcgcaaactcagatttaaagggccagagtctctactgcccagaccttcctcccagccatcttggtctgggtttccctcggacctagaaaaagcaaagaggccgggaggaaacacggccccttgccactctcctctgcagccagctccagcactcagtctttggccacccgggggaagacgcagagaaggcggcggtaaacctggtgcactccgcccgcgactgtgcgcgccagtcggcaaccgtcggggccagaagttgccagcttccgagagctgagtaggcccgaaaggccaaggtcggagacaccaggcaattcggagaaggcaggagagagaagcagagagggcctggagggcgagagggcaaagtggcgggactggaggggccgagtgggaattagtgggggcagccaggccccaggaacggagtgcggagagattctgtggtccagtgcgggccggagggcggtggaggagccgggggcgatgccgcggccggggaagagctcgtacagcgaccaaaaaccgccctactcttacatctcgctgaccgccatggcaatccagcactcggccgagaagatgctgccgctgagcgacatctacaagttcatcatggagcgcttcccctactaccgcgagcacacacagcgctggcagaacagcctgcgccacaacctctccttcaacgactgcttcatcaagattccgcggaggcccgaccagcctggcaagggtagcttctgggcgctgcaccccgactgcggggacatgttcgagaacggcagcttcctgcggcgtcgcaagcgcttcaaggtgctgcgcgccgaccatactcacttgcacgcgggaagcaccaagagcgcgccgggcgccggtccgggagggcaccttcacccccatcaccaccaccacccccaccaccaccatcatcaccacgctgccgcacaccaccaccatcaccaccacccaccccagccgccgccgccgccgcccccgccgccgccgcacatggtacactatttccatcagcaaccgcctactgctccgcagccgcctccgcacctcccgtcacagcccccgcagcaaccgccccagcagtcgcagcctcagcagccgtctcaccccggcaagatgcaggaggcggcggccgtggcggcggcggcggcggcggccgcggcagccgcggtgggcagcgtgggacgcctgtctcagttcccaccctacgggctgggctcggccgccgccgctgccgccgcggccgcggcgtccacgtcaggcttcaagcacccctttgccattgagaacattattggccgggactacaagggcgtgctgcaggctggagggctgcccttggcgtccgtcatgcaccacctgggctaccccgtgcccggccagcttggcaacgtcgtcagctccgtgtggccgcacgttggcgtcatggattcggtggccgccgccgcggccgccgcagccgcagccggagtccctgtaggcccggagtatggggccttcggggtcccggtcaagtccctgtgccactcggcaagccagagcctgcctgccatgccggtgcccatcaagcccacgcctgcgctgccgcccgtgtccgcgctgcagccggggctcactgtccccgcggcttcgcagcagcctccggcgccatccaccgtgtgctccgcggccgcggcctcgcccgttgcctctctgctggagcccacagcccctacctcggccgaaagcaagggcggctccttgcactcggtgctagtgcactcctaggggacccggcgggcgtggggagaccagcggggtgagagacgccgggcccggaaccgcccaaaccacccgacggggagagggcgccctggtcaggccgggcagagctggcgagtctcagcctttgctggaacggaaggtatttaaatagacgaacaaccccg

SEQ ID NO: 5317 - DNA, 704 bp, Homo sapiens
  source 1..704: mol_type = unassigned DNA
gcggaatgtgggcggggcgcagttggggagcttgcggggaatgtgggcggggcgcagtggtgggagggcgcaggagtgtgggcggggcgcagttgggggagggtgcagagacctgagggcttgaggttgcctggctggccccgctcccagaggcgggtgccgcgctgtcgcccaggtatctggggtctctggtgtctgagtgtctcattgtcggcgcgaacacaattgctccagccacaggcgaggcctggccaaggtgtgggcgcatctggggcaggtcttgagaggtccagcgcccggtggtgcggacagaggcggggcaccgcggcgctcgccgccgcctccccgcaggtgatcatcctcctgcaggtgtcctcgggtctcaggtggctgcgtgtctgcgccatggttgacattctgggcgagcggcacctggtgacctgtaagggcgcgacggtggaggccgaggcggcgctgcagaacaaggtggtggcactgtacttcgcggcggcccggtgcgcgccgagccgcgacttcacgccgctgctctgcgacttctatacggcgctggtggccgaggcgcggcggcccgcgcccttcgaagtggtcttcgtgtcagccgacggcagctcccaggagatgctggacttcatgcgcgagctgcatggcgcctggctggcgctgcccttccacgacccctaccg

SEQ ID NO: 5318 - DNA, 950 bp, Homo sapiens
  source 1..950: mol_type = unassigned DNA
ccgggacggagcgggccacccgagtggtaaaccttttcccaatggatgcgggaaaagcgcatttgtagttccctcctcaccgctgtcaagcgagctgattgctaaggagtgcgcatttgcttgcctctaacgtgacagtcgcgggagcgccccgcaccccgggcttcagggaatgaaggagtctgccccgaactggccccagaacccccagcccccagggcggcccgcgcccgcacccaccttgaccacgtaggtgactccgggccccagcacctggtcgctggcgtgcggcgccccccgagggggcctgggcagcggctcgtcgccgggccggcccttcctggcggcgctcatggccggggcgcggggcgccgagggcgcactgccgtccggggcggccaggctgggcgcgctgcagctgcccgagagccgcgcgcccgcccgctcccgggcggccgacgacaggccgcggaggcccgagctggagagtttcaggtgggacaccttgtggagcaggtggcccaggctgccgggcccatcgtcgggcgccttgcgcagcgcctcgccggacaccaagtagggagccgccgccggggtcgcgcgcgccgccgaaaccttgcctccgccgccgctcaccgacaggctgtggagaaggtcatcgaccgatgtcaccgagtcattcctgaagcggttatacttggtgcgtggaagcatgcccctccgtgggctcgctgcatccgcccgggcgctgctggtgccggccccggcgcgggctgccgcgcatagcaggcgagccactgtccccggagcgggacggagagtgggggccccgggacagccttctggagaacgagagcagagcaagaggatggtgccctcccaccgttaaaagccagcacagcggcggccgcgcagccccggcccgggagaccgctgcttggggttgcacg

SEQ ID NO: 5319 - DNA, 4861 bp, Homo sapiens
  source 1..4861: mol_type = unassigned DNA
gcgccgccgccctgagtatcctgcggaaaatgtgagaactctggggagccattgctgctgcaaggacccgcgggcgggctaccgcgctggtgggggggctctgtccaaaccttgcgtcctcgacttcccatccgcctcataaagggttggtgaagaccatctcaaggaccgcacgaactggtccttcaagtcccaggaaaccgaaacaacaaccgaggcggctctctgtccgggccacttccggagcgagctctgcggcggacctctggctcccgctcctttgggcacccgcggtgcggccagaccgctcctgccagcgactctctggctggcaagggagaggaggtggagttcagactggcccctcacgcccagagtggaagcgattcctaggatcctgcagccaccgagccgcccgccgtgcctagcccgggcttgatggtgaagagcacagctgccttcgacagagccggaggaaaggaagtttaagaagcaactgcccgcgttccgcttatcttgccgagcccacccccacccccaccctcaccccctgcggattcagaagctgctccaccgagcccgattgtgtcataaaatattttattggaaaaaaagtcaccgtcttcgcaagagggggtaggggccccagcgacatcggggacccggcctccaggccgagccgacgggttgccccggggcaatctcaggccgttgtggcctgagcccaaccgctgggtccccgacgtccagaagcgggtgtgtgcctggaggctccccggccgggagggcaggccccagacggggtgggggtgcaggcgaggagcggggcgtgaatacgcgtggagcgctctgcgccacggagctcagggtagagactgtagcttccgccgggctggatgcgagtctcccaggttagagcccagaagcgcgctgggacctgggtctggcttttgggtctgtgtccttcctcgtttggccccaattgtccgcattcaagatcataataaaaaggcttaggaagtaaacttcttggacgcggaagggccggctcgcgggtttccgccgagtgagggggctgcgggtggcgcgggcatcccaggccccgcaccgtataccgccctcagtcctcgcggctcctgtcgctgggctcgcccggcacctccgccggtttctctgcatccttggcgcgctcctgctcagtaagctgctcgctcgttggaattgagttcttcttgggccgccccttgggcttggtgggagactccaggccgccgccctgcagcacctgcacgggggaccgccagcacctgggtgagccagcacgtggactggggacccccgaggagacttgaacccaggtaggactaaggagtgcagggtccatatgaggaaatggtggggaaatgtcccgggaaatggcggccatttgtccaaatgccgcctggggagcggcccggcctggggagcataagactgccaggaggcctgaaggtgccgcgggaaaggacgaaatgttggcttacccaaggggcagaaaaaactgagaggattccggtgcgtaccaggcaccgagggaatcggggggttgggcagagtctcagtggggagaaagaggagagcagctctgcatgcaccggggcatggcccaggaagctgaggggtgggaagccaccaggcacactcactattttcttccacttcatcctccgattctggtaccacgtcttcacctgcaactggctcaggcccagggactcagcaagatctattctggaaagagcagggcgcaccctcagcaaggcaagtgaccacactcccacagcccgctggccccagccttgtaccgccctacctgtccggcgtggaaaggtacttctgcttctcgaagcgtttctccaggcccatcagctgcagctcggtgaacacagtgcggctccgacgccccttcttggctttggtgcctggctccccagggcctgccgcctccagcttcccgcggagctgcaactcgagcggcaggtgtggcgcacccgcggcgccgggcagcccgggccctgccgccagcaacgcagagctcagccctgaacagcccagcggcgccagtgggaacttgaacaccgccgcctgctcggccttcagcacggctgcgaagaaagagaatgaggacccgggtgagctacggccgcgctcctctgccccagggactgccgcaccacgtgccgcgggggtgctcgcgcttggccagtgcctcccagcgcaaaacctccacgccctgccggtcggcgccggtggcgcagatggagaccctcctcaacgttgccgttccccagatttgggagggagtatctcctcgaccctgtccgtgttctgtcctggagttccccaggcctcagctgcctctgagatctcggggttcctgatgaacatgtttgcagctgcgagaaactcggagtgtgtcttgtctttcggggaaagtagaaaccaaaaagaaaacggcagctggtcctaagaagatggcgtttgctccaaccaaatcagccttgctgcgttagaaaaagaacatgcacggagcgtgcacatttgctcttccgtgcgtggcacaacagccatgcggtggccaggagtcatctgggccggagttgggtgcttcccggaaattccaaagtaccctgagaacctggaaattattgttcacgttttctattttcagacgcttccccatgcagatgtttccattttcttcagtcctaaaatgattgtgtgcccgcttcaaacgaattagtagcaacagagcagatggagacgaaaggtagccgaatggccgagtcccagctggacttagaaggagcgcgctggccctgccgtctccaggctagggagcaccgactaggaggtgggggggtgcagggaaggcgacttgaagggctggggtcccggctacagcgtaggagcctcccttccccgacaggcctgtcactgaggtgcgagtcctagcctggctggagtcggaaagggcagggcaaggcgcaggtaaatgtggggcagaggacccgtagggaaaaggtgggagatgggaggcaggccgaccccaatgagagaagcgagggaggccgaccggcagacggttggaaagcgagatagggaaagacaagacgagggtggagtgcgatggagacagcaccatcagggcagagcaggccccgccaaattagaagaaagggcagaagctgaaaaggtctgcgcaggccgttcaagccctgcagaggcccagccgacctgaaaccagaagggacagccaggcagctgctcacagtcaggcctctggccccaaggcaaggccgaagcaggtccgcactgcggccaaggccgcgttcctcgcccgctggagctcccggggactccgggccggcttgggcccgcgtcagcacccagccctcgggagcgcaggcctcctccccagaggtccgacttccctgggttgggcagccgcggccactcccggccatccctctgcggcgaagcccaggcgcccgtggcctgaggtcgcttccacccacgagagtccgtagcctggcagtgcgcctgcactggggatgctcactcggggtccccgggctggaggccgaagggaagcagtgaaggaaagagcgaacaccctccccgggcggcccgcgggcacgaggcctggtttctgtgaggcctggagcttgcaccctccgcctcccgcctggagggctccgagagacggtcccagaacctgcgctcccagagcagcttcccggggctgcttcgatgccggaggaggctcggggcgcccccgcggttcagctcgctgtctcccgccaagcccggcccgcgaccccgcggccgccacacgtacccaggtggctgtggaagggccgcgccgccagcagcgcctgcacgccgaacttcagcagctcgcccgccgcggcagcggcggctgcgggcgcggcgcccttgggcccgggtggctccgtgaggatctcctcaatcatgaagctgcgatagcggtgcggccggtggtccgcgcagccctcgggcgggccgaagcgcgcggcgcccggctcccccggccgctgcatcgcggcgcccactgctgcgcccgcggtttggcggcggcggcggcgacggcttggctccggcgcggggcccgcgcggggctctaggccggcccgcagctcggggcggcgcgcgggcgccggctcatgccccctcccccgccggccggccgggcggaggcgcagggcgcgggcggggcgcgcggggctcggccggtcgaacccgggactgcgccccctccccacgccgccgcgcctcttgcccggccagccccgcgtcaccgccccgccccgccccgccccgcgccgccgcccccaacccctaggctgagccggagggagggacccagaagggagggaggcggaagggaggccaaaaaggagggggccacgtgaaagaggccggccgaccgagaccgagggagactgagcggagcgcacgccctggaaggagagagccggagagttcgggaggcaagacccccagagacgagagtcggagggatcaaacgacacaggtgagagaaggggcagaggcagacggcgtgggccaaacaagattccagacagtgatgtgagggcaccagagacgccaccgagatgtgcgcagagagaccaaaagaggcgtgagagccagcgggctgtgacgtgacggagggcacagaggcaggcggggcagaggaagggggcggtaaagaaatgggaacagctagaaaaccggcggcttgatcggcttttaggtagccccggaaaggtcgggaggaggaggggcaaaggccgcg

SEQ ID NO: 5320 - DNA, 999 bp, Homo sapiens
  source 1..999: mol_type = unassigned DNA
gcgtaacggcctgtttgcgctccctgcggttacagccgacacacgctcgcagacgcacgcacggacaccccgctttccaccagcgcacgaagacgggacgcgcgctcacagccccagggctcggccctgcaccacgagctaacgcgcggtccccagggaggtggcgcagaaggcatggcgcctctgcccacggcgtcccggtcctggtagtccctatagagaccttcgttgatggcccaggtctaaaaggctttttcctccgagcctgcgttcctccagccttcccgctgggccagggctcaccatccttcctcgccggcgagcgtgggcctccctggaggcgggggtggccctgcagaggcagccccaggtgcgcgctggagaggccggcccgccgcgcgggagacactctttccaaagtggaagcgctgcgtgggcagcagcgcgggccgggccctcggatcccagtctctgttgctcccgagacccccgccccgcgccgcatcctccgagctcagcgccctcgggctgcgctgggcgcagtggctcccggtcagggcgcagtcggcctgggcgctagagcccctctcagctcccggcctagggcggggaagcgccagctcccgcagcccctgtgaaaggtcccctgtgcctcctgcctaggtgcgcgctgtggcatctctggccagaagcacctttggcggcctgttgggcccctcgcagcctctggctgagactctgccgccggcgctaacgggctgcgcccgcgctcccgctctgtccccgcccgggtcccgggctccgcgtgcacaccactccttggccttttccaccaaaacttcctgatctccagttcgatgctgtcgtcgcggttcccggaactgctgtcttcagacggcgagccggggctgggagcggccctcacggggacggactccctccggaggcggaggtggttctcctgacgcgaaaggcaggggcgcgccccggctcccagcg

SEQ ID NO: 5321 - DNA, 1750 bp, Homo sapiens
  source 1..1750: mol_type = unassigned DNA
tcgcggctccagggcccggcgacctccaaggcccccgcctcaggcgctgcgggcaaacagggcctgggggccccctcccaccgcgggctgagcccccgctacctgtcctttctgtcgcgggcatccaagtcccggaacctgcgagtcaggcagcgctccacctccgcggcgtcgcccttgatggccaccctgtggatcttccgcagttcccagtccccgatgtggtacccccgacccgcgtactcttggtccatggagctcaggagcgcctggcccaggcgtctcccgaaactgaagagtttcctcatggtggcgacttctcagacgccaaccacccgctactgagccgccgcggctcctcgtggcctttccaccccgaccaagttccaaatccgcgatccccctccccaccccgctatccacccctaaatccaagatccaccaccaaaccagcaatccacccccaaacccaagatccacccccaaccccgcgatgtagctcagaatccgcgatccagcccggtccaccacagccttcagcagcgacactcgcagcctccgacctctcagaccgagtgagcttaactaagccgttactcgcgtgccagcagttgggcgctccgacctctcagaccgcgtgagcccagcaaagcggttaggcgcgcgcctgcagctcggcgctagcccggactccgggagccgctctcgagctcgcgtggacggcagagggcggctgcagctcgggcgcaggcgccgctggcttgcgggttctcctgggctcgcgcaggacatcccggaatcgcaggcgcgcatcccttcccgcctgagggcccgcctggccgtgactcccgctcctctcctcctccgaagagagatggggccgctggcaggggctctccgcagccaccggggatggggctgagggtcggttcctgccccggtgcagccgccgcgggcagaccgcctggcttggccgcagccacagcgacatctagccccggttctgcgaggctgggcgcgccagccagcttgggagttgcctggcgcctgtagctgggcgcccaggtggtggagcatggcctgggcggcctctggatcgcgagtgcccctggcctgagagcccgccagaccctgcccccacccggctcctcctctgccagagctcgagacctctagccaggggccctctgcaaccaccggggatggggctgagggccggttcccgcccctgtgcagctgctgcaggacagaccgcctggcttggccgcagccacagggacatctggccctggttctgagatgtggggagtgcgggcgggctcgagagttgcctggaggctgctgcctgcacacagaaggcggctgcagcttgggtgcccaggcgggctggaggtgcatggcctggtcggcctcgggatcgccagcgcgcccagcctgagggcccccaggtcgtgcctcccgcccactcctccacctgagggggattggggccgctggcatgggcactcggcagtcaccccgtgtggggttgagcggcgggttctcggttctgctcctgtgcagccgccgctgggcagaatgcctggcttggctgcagccactgggacacctggccctggttctgcgatgctgggagcgcgagcgggctcggaggttgccaggcagctgctgcctgcacacagagggcgactgcagcttgggcgcccaggcggcggagcatggtctgggtggcctctggaatgcgtgcgcg

SEQ ID NO: 5322 - DNA, 391 bp, Homo sapiens
  source 1..391: mol_type = unassigned DNA
gcgcaggtcgtagaactcccccgcgaaggtgccgtaggaggagtcgtggcgcggcaccgcctcgtcggcgcccgtgtccccccgcgcgcgtccccggggtccccggccccccgggcccgcaccgtcgtccgcggggctggctgcgcaggcggcgggccccgtcagtagcagcaggagcagcgacgcccagacccccgggtgctgccggggcggccgcgccatccgtgcgcacagatcccgcagccaggccgctcgggccgcagcgggggcgccgcgggcgcgggccgggactgagcctccgccgaggccaccagcacgcgcccgcgcagccgcggagcctcccgcacccccgcctccctgcctcggtctgcgcatcctcgctccagcaccg

SEQ ID NO: 5323 - DNA, 817 bp, Homo sapiens
  source 1..817: mol_type = unassigned DNA
ccgggatagagacgggcaggcagcggtgggtcgaagggcccggggactagggcccgggtcgggaggggcgggcgccttaccgcggcttgctggaaggcgcccttggtgtaggtgccgccacctcggtaggagatggcagggatctcttggaggagcagcgcgcacttgtgctggcgcgcgcggcgggtggagatgtaatcgacgcgcggcaccacgtagttcttggacgagaaggtcacgatggccacgcgcgtggccgtgggcaccacggggaagtcggacagcagcttgcggacgaacatgagctcgctgcggaagttgacttcgcccacgctggacgaatcatccaccaggaagacaagctccaggcgctcgctgagctcccgcagcagccgcacgcgtcgccggaacgcctggcccagccgctccactctgctccccgccgcttcgtcgccaggagcgggcggcgcggggatactcccgggggccccgggcgcggtctcggggaagaggcggaagctgaaattgcgcgacggggacatctgctgaaaggtcgcccagcccgaaacgagcgccagaccccagcaacaaaaggccaggcgaggccacatcgcgctggagacagagcggctgccccggagcgcaggcggcggctcgggcgggaagaggcgctgggcggccggactcgcagaggggcgtgcgcggagctgggcgcggggcagcggccaagagcctcagcgccctttcatctgacactggggacagacacaatccagactcctcagcagctcgggaactccggagggaacggcgcgcg

SEQ ID NO: 5324 - DNA, 814 bp, Homo sapiens
  source 1..814: mol_type = unassigned DNA
gcgaagaaagtcgaggcgccgaggctcccaaagctggcagctccgggtggcggtgcaggggcgaagggggggcggggggaaccgtcggacatgcggctctggagttgggtgctgcacctggggctgctgagcgccgcgctgggctgcgggctggccgagcgtccccgccgggcccggagagacccgcgggccggccgacccccgcgccccgccgccggcccggccacctgcgccacccgggcggcccgcggccgccgcgcctcgccgccgccgccgccgccgccgggcggtgcctgggaagccgtgcgcgtcccccggcggcggcagcagcgggaggcgaggggcgccaccgaggagccgagcccgccgagccgggcgctctatttcagcgggcgaggcgagcagctgcgcctccgggccgacctcgagctgccccgggacgcgttcacgctgcaagtgtggctgcgagcggaggggggccagaggtctccggcagtgatcacaggtaggtgagggcgcctcggcgggcgctgcaccgtccctgcggccccagaggctcgcgggtgtctgggcgcgggtggcgggcgggtcgggggcttgcgggcgtgtctgtgcgagagctgccccgcgagcggcgcagagacatccgggcgagctgagagcctcactttgctccatcggtggaatgggcacactcggaaggcgtagctgctccatccctgggaggaacctggggagccctcctggcggccccgcggaccctcggccagtgagggctggttcccggagcctagggcacgtaacccgtgctccg

SEQ ID NO: 5325 - DNA, 1429 bp, Homo sapiens
  source 1..1429: mol_type = unassigned DNA
gcgcgcacaatgaagtagttgcctgcagcgtcaattagttggcgattctgaggttattgcgtggccctgctttggccgcctctaataacgggacagagcgccgggcaccgcgcactgatcaatcaccctccttccgcggccgcccggctccctcccctctcccccgccgggtctggcctcactttctccgggcggcttgcgcttcctccctccgcggccccggctccgtggcgccggcagccccgggagccccgggaagtttgcgcgcggcagctccgcagccggcagccgggagccccgcagccttcggggagcgccggggctggtggcccctttgttggaggaggcgtggagggagcgcttttgttctgagttagtcacggtggccggctggaggctgctacctcattatgcgccgggtctgcttgtctgcgaggaagcagatggtggggaggtaggcagcggcgagagtggccagacctgaattccgttcacctgtcacctcccacaaaaggcaggttcgggggacttaggcattcgttgccactttctgggggagggggaggtcgaggggccgccgtttccggcgcctgcgaaggttccgtacctgtcggtgcccgctccccccaccccttgcctttcccttggctgcagcttctcgcaccgcgtaaatgtcactcacgtgtcaggatgtgtgtttacagcctgttcctctgcttgtttagtctcggcggacagggctcagcggttgcgcgacgttccccgccgctgggggagattagcaaagttacccgcctctggaccccggggcctgggcccctagatcccgccccgcggcgggagatgcgtttgagccttttacagacggagcgcgtcccagcctgacgcagagggatgaatagacaagcgcaccgggcgggaatcccgactgcctgtgtatctggggtcggcccagcgttggacgtgggctgctggtccgagaggtggcgacggaatcgcgtgcctatatgtatgggggagtggaaagtcgcagggtgtgtttccacgtttcttgagcagcccgcggcaagagttgctgagtaccccaccccccgcccccagatcctaaggcagcccctcgagctttccaaacgtattgtatccagccctcccgagagtggagttgcaccaaggacaaacactctagcgtcattacaaattttttctgccccttgggcgacctccagatgaaccctggtgactctcagattggattttcattccttactttctttgaaagaaagtgccccagatgcgtcaataaaacatgcctatgtattcgtgtaggcgtccgcatgcctgcgcgccggccgtgtgcaggcgccgaagcacacgtctgtgtgaacacacgggcacgcgcgtctttgggtttagtggtccttccctcgcg

SEQ ID NO: 5326 - DNA, 7708 bp, Homo sapiens
  source 1..7708: mol_type = unassigned DNA
ccgggaagagcgagaagctacacgctgggctgcagattgggccctagcgggcttggagcgtggatatgctggctggcccccctccccgggagtcacagctctcgccggtctcgccactcaggctctgccgggtacccaggaggcttgcacggccgcctgcagcccgctgtgcagagcccgggccgaaggcggagctcgatgggaaacggccggccgaaggctcttgcaactctgccacaggcctgccttcccgggcctcccaggcgggtgcctgaggccgcggctccaggccgaggggagaccgcagtgagacgagcatccccttgctgcgccttcttaggatagagggtttaattttcctttctgaagatatcgcaggaagctgttcgtatcttaaaaactccaaaccccgcgctctccctcctccctgcctcccccccacccccgccctccagcctcgcccaccagctcccaccatctcgactctcctctgctcctcttgcctctcccctccctcttgggtctcccgccttcccggagcacgcgctgccagggcctggggcgccgagcggccaatggcacggcggcaggacgtgatgtcaggcgcggctgtagaaaaggcgcggaggcttgcgctggcgcggactgcagagccggggctgggctaggcgcgcgcttggagagcattgcgcgcggctgggcccgcggccggcggctcctcctcccactctgctcctcctcttttttctcctcctccacctcctcctccgcctcctcctcctcctcttcctcctcctcttcaattctcccggtggctcgactcggctcgcaggcttcggagaaacccctactccagtcgccgactcagcgcccaagagggtcgccttgggctgggggcgcaccccagggaggggaggggtccaggcagctgggccgccgcggacacctagcggcttcagggtgaaccccgaccgcagccgtcgccgcctcgggcagagtttgcgcccttgctttgcgccccgggcgctgaagccgggcgggcgatgcccgcggcgtgaaagcgcccgcggcgggcgccgacctctgtcctagtctcctgctccccccgccccgcttgtcccgtgcccttgtgaccctggctttggcgccgtcgcccaggcgccccgcaatgtagctgcccctgcgcctcggcgggaggcgtcctgccccgcgagcgcccggggcccggagcccggcctgggggctcagccgagctcgggcggggccggggccgcggtggcgatgcaccgggcccgttagcgccaggagcgccaggcagctgaggcggggggcaagccctccctcggaggagccgcgcccccggccccgccggtcccgccgcgatgctgttccacagtctgtcgggccccgaggtgcacggggtcatcgacgagatggaccgcagggccaagagcgaggctcccgccatcagctccgccatcgaccgcggcgacaccgagacggtaggcgcgcggctgtggggtcggggctgagagctgggatggggccgggccagtcagcgcctctgctccccgaagtttggggagcgtccttcgtgccgcacgggactgggtgctggggatcctcggtcagaatgcaaggccggtggctcccggttcgggggaaacccggctgctgggacgcagaagggaaacaaggttgaaaccgaaatctcggccctgggggtagaggagagcgtttcttccgaactggaagcgaagtcccatccgcggcccggggcggctcccttctcaccttgcccggtgccggggtcgacagccccgcgctctcctccacctctcggctccggttgctggcggcgccgcgagcggcgccagggaagggcgaaccagctgggagcattggggctccagccggcttgggccgctcccagctttccggcaatcggggatcctcctcaacccccagcgcagtttcagaggccgaagtcttcggggccaacatttgtcgttgatcgcgtccccagacccttgactggtcagacttagccaggccagggctgggagttcaggctccggcctggccctcgccgaaggagactccatttggatctctacacctggctccgcgggcccagccccaaatagccagttcctcgcctcaggcctccctgggggccagacgagcagacactgcccgaccagcgggcccagaagtgacctttaggaggccgcggaggtggggagcacgggagaagcttctctgctccgggagcaggagcagcggcgccagtgtcctcccggcctctgagcgcttcttcggttagaccttctctgctggtcagtttggatagggaagtatttgggttgaacctgtccttcacccacggactttgagggtgtccctgcaccccacttacctcatccccggacccaagagggccccagcccgtgtggcagaggagccagaagttggctgacttgtcctggccttaacctctggtctaaggatccagggatcactggagctggggcccaggaactccgctgtctctccaaagaggattctgtgtggagggtgacttaatggtcaccttatcccccgggtggctcatttaagaagcagtttagggaaagctcttggagggcttgactggagtagctgtcctggtccctaaacacagcccgagcattttgggggaaaggacagggaggactggaaggaagagaggtaagcaccagagccatttaggccaggagcccggcctgggcccgtggctggcgagggctgcgcaggcaggcctgggttctgaaccgcccagaaatggaaatgggccttttggggtggggggaagcgcgccgcatgtcctggcagccccctccgcgttcagggtagccaaggccacagagggagttgtgggtgccggtttcccggcggcggaggggccgctggctgacgcaggcgctgctgtcttccgcctccctcccttcgcagaccatgccgtccatcagcagtgaccgcgccgcgctgtgcgccggctgcgggggcaagatctcggaccgctactacctgctggcggtggacaagcagtggcacatgcgctgcctcaagtgctgcgagtgcaagctcaacctggagtcggagctcacctgtttcagcaaggacggtagcatctactgcaaggaagactactacaggtagcccccccacccaactgcccctcaggacccctccccccaatctcaggcacagtcttacagtttggccctctcctttccgtttagtcccaggagagggttcactactcaggactcccccgctccccccccaagttctccaagccaccacaagttgggtgataaccttttaaagcagcaatttggggagctcttggaaaggtctacgaagtaggagaaccagaaaaaaagcagaagctgccctcctgctcggagcttagaccacaaaaaagcttgagttgggatccttgctcccctctctctttgaagtttcttgagttaatccgaggttatagaaacaggcacccccaaacctaggcagcccaagctggagtgaaacacagctggaaagagagctgtgggagtgggtgcatttccaggtcttttgagaaaatgggaatgaaaggtggccaagatcaaagaaccagaatcactagtagactccaagttctctgtttctccttctccccagttttaggattagggtctatgtatattctctctgtctctgtctctacgtctgtgtctctctctctttccctgtctctgtgtttcttccaaattataaaagtcagtaggattcccaggcgctggtttggagggaggagtaaaggttgaggagggggtaagtggtaagtgtctccctccactcccaggtaaaggctttcctagggcttgcggagactctgggtgaagtagaagtctctgtaggcataagtgtgttaagggaaactattttaggacaggaccaggcctgggtcaaaatctagttctctctcccccccatcctccaaataaaggccgggttgttcgtcttgaggaggggattgccccccgcagcagcagcggcacctggaggaggaaaaggggggtacccaaccgtgtgttcccacagcccctccctccatggtccctacaggcgcttctctgtgcagcgctgcgcccgctgccacctgggcatctcggcctcggagatggtgatgcgcgctcgggacttggtttatcacctcaactgcttcacgtgcaccacgtgtaacaagatgctgaccacgggcgaccacttcggcatgaaggacagcctggtctactgccgcttgcacttcgaggcgctgctgcagggcgagtaccccgcacacttcaaccatgccgacgtggcagcggcggccgctgcagccgcggcggccaagagcgcggggctgggcgcagcaggggccaaccctctgggtcttccctactacaatggcgtgggcactgtgcagaaggggcggccgaggaaacgtaagagcccgggccccggtgcggatctggcggcctacaacgctggtgagtgcgcggcgcacgaagcgcccccatagggttgggggaaagtgtgcggcctcgacggccgggagctggattgaatctctgtgtgctgggcaaatagcgagccttaagcaccggacggcctcgcagaagggacattagccccctgggcttccagactgtgcgtcctcggctggagcgggaggagagggtgcagtggtcccttgctgctccgggtgcagggccttgtctctgataaattgtttttttggagatggctttttggtttgggcctttgccccactttgctaggcaggaagtggcagggatggagaaagcaaggcggcgctgacgccaaacaggttttgggttggcgcggctgagggccgggaactggggcagcgaaggaacgaggcagggcggcgagggtcccaagagaaagggctggctgtggcccggggcgccgagctcggcctggagtgcggcctgacctcgtgaaatgtcccaagggcggcaggcttggggaactcgggcttggggaactcaggaaagcaaaggctgcggttccttttgctcggcccgatcctcctttaaagacaggtctcagttttcccggactttttcctccgagtttcctggcgcctgctggggtgagggccgtgaccctcggaagcgagccccccgggcggggacgagaccggagcaggcctggcctcgcgccggggtggggtggggtggggtgaggtggggggcttggttcggatttccggcatctttgaaccccaggccattcccggagaagctctgccccctcccgcgcccctccctgctcaggacagctgcagaggttctgagttccggcaaatgagccgtcaacatctgcccgaagtctgcaaggcccggaaaggtttatgactctccgggcttccgaactagagtttatgtgcaattattttctttctttcgtttgcaacagaattagatttggagattttgtgttcttcttccttttccctttagtctaatgcacaagcagaaaaaagcaaaaacaaaaacaaacccaagactgtgcagagggtgctacggcgggaagaagtcagttattttcatcttaaagaatctgagttgaatagagagggaaatgaggggcgggtgttcgctccaacgaaatcgcttggaggatcatggggcgtgtgtccctgtgtgcggaactgggaggaaaacgcagcccccagtttggtaaatggtgaagcagcggtaggccggtcggtggcgcggatttaagatttgctgaaggcactaccacagatgtagctctctggaacttccatccctcctctcctaccaccccccaaaaaaagacaaaaccgagttcagaccggctcccccaacaccaagccgcttctatttatcaagtgggtcaacttccactcggaagcacctcgcggggctcggctccagggcacctggtggctggggagctgtattgttttcctgggcacggaggttcggcgccggttttaggattgtgcaaaaagagagtagaaggtacagagatttatttctgctttttgctgttcagccgccgtttgccccagcgaggtgggctggaggctgaatttcaagccttgtttaacctctacaagagacaccctccattcagccatctcactttctctctggcctccctctctctttttttcctttccgttctctccgtcctttctctctatctctgtctctgtgtgtgtcgtgtttgttcccgtgccctcctctccgaccttggccggggctcctagtcctgagagaaacggcgttcggtgcgccggcggtggctatgcggctggctctttcggggctcccgggactaggttggggaaagagggcatctccccggcctctcggggcccagcccagtcttcctagatctggcgtccgcccttccctcccctcccgcactggcaggagagaaatggccgcagtgtgggccgcggggcagctaggactggaaagcggggaccctggagggtgcgatcgcggacggggtgtgcgggcgcgggtcgtgtgcgtgtgcgtgcagggttccgaccacggggacacgagcttgtttgtggcagtgtcccacatcctgtggcccagccacgacgaccccttgcaaagcctcttgctctggggacagtccctccgaggcgcggcggcaccttactgaagggcggcgagctgggggccgagtggggagggggcgccgtcggggcgccgggcgctgggcttacagcagagccgcgggccgcggggtcggaaagtccttccggggcggggccgcagcggcctcttcccgcagcccctcgggcccgggccccggtggaacggaaacctccccctaccccgggaggggctgccagcgggctgggggtgcgaaaacggcggcaggagcgggcgaggggcccgggccgcgcactttgcgcctgggtttgcgcgccgcggccgcgggagtcccgcgcggaccggccggacgcccggcctcccccagccccagctttttgtgtgtgtgtgcctggcggcgtaattactgatttgattccaatccattatttagacaattgaacctacaatctcgtctttagtaaaatgaggcgaagtcagatttgattacaggttcagtcccagcgacaagagctcgaaacccgatgggttaataacagatcacgagtaaattattcatgattttacgagctctttagctccattgaatcggcctaattgagaggaaaaaaaaaaaaaaggagagagaaagcccgggtcctccccctcccctcggcccctcgctcctccccggatccgatcctggggaatctcgacccgcccccgggcactgggggcgggagtgagggggttcggggcgccggccaaacctgggccccacggctgcctcccccgccgccgccccctgcccttgcctctggccggcctcggcctcgctacttagggccggctcctttccctttttctccactccccttctttccccttttctctactcccccgccaataacggcttcggaaaaggcctcccccgcagggaccgggtctcccggagccccgggattcagctcggccaccggaccctcgccacaagctgcgcctgtttccgggactcgctttcccctccg

SEQ ID NO: 5327 - DNA, 3969 bp, Homo sapiens
  source 1..3969: mol_type = unassigned DNA
ccgggagtgtgggtgtcccgggggcgtgggtgtcccaggagtgtgggtgtcccgggggcgtgggtgtcccgggagtgtgggtgtcccgggggcgtgggtgtcccgggagtgtgggtgtcccggaggcgagggtgtcccgggagtgtgggtgtcccgggggagtgggtgtcccgggagtgtgggtgtcccggaggcgagggtgtcccgggagtgtgggtgtcccgggggcgtgggtgtcccgggagtgtgggtgtcccgggggagtgggtgtcccgggagtgtgggtgtcccggaggcgagggtgtcccgggagtgtgggtgtcccgggggagtgggtgtcccgggagtgtgggtgtcccggaggcgagggtgtcccgggagtgtgggtgtcccgggggcgtgggtgtcccgggagcgtgggtgtcccgggggcgtgggtgtcccgggagtgtgggtgtcccgggggcgtgggtgtcccgggagtgtgggtgtcccgggggcgtgggtgtcccgggagtgtgggtgtcccgggagtgtgggtgttccggaggcgagggtgtcccgggagtgtgcgtgtcccgggggcgtgggtgtcccgggggcgtgggtgtcccgggggcgtgggtgttccggaggcgagggtatcccagaagtgtgagtgtcccaggggcgtgggtgtcccgggggtgtgggtgtcccgggggcgtgggtgtcccgggagtgtgggtgttccggaggtgagggtgtcccgggagtgtgggtgttccggaggcgagggtgtcccgggagtgtgggtgtcccgggggcgtgggtgtcccgggagtgtgggtgttccggaggtgagggtgtcccgggagtgtgggtgttccggaggcgagggtgtcccgggagtgtgggtgtcccaggggcgtgggtgtcccgggagtgtgggtgttccggaggcgagggtgtcccgggagtgtgggtgttccggaggcgagggtgtcccgggagtgtgggtgtcccgggggcgtgggtgtcccgggggttgtgggtgtcccgggagtgtgggtgttccggaggcgagggtgtcccgggagtgtgggtgttccggaggcgagggtgtcccgggagtgtgggtgtcccgggggtgtgggtgtcccgggggtgtgggtgtcccgggagtgtgggtgtcccgggggagtgggtgtcccgggagtgtgggtgttccggaggcgagggtgtcccaggagcgtgggtgtcccggaggcgagggtgtcccgggagcgtgggtgtcccgggggcgtgggtgtcccgggagtgtgggtgtcccgggggagtgggtgtcccgggagtgtgggtgtcccggaggcgagggtgtcccaggagtgtgggtgtcccgggggcgtgggtgtcccgggagtgtgggtgttccagaggcgagggtatcccagaagtgtgagtgtcccgggggtgtgggtgtcccgggggtcgtgggtgtcccgggagtgtgggtgttccagaggcgagggtgtcccgggagtgtgggtgtcccaggggtgtgggtgtcccgggggcgtgggtgtcccgggagtgtgggtgtcccgggggagtgggtgtcccgggagtgtgggtgttccggaggcgagggtgtcccgggagtgtgggtgttccggaggcgagggtgtcccgggagcgtgggtgtcccgggggcgtgggtgtcccgggagcgtgggtgtcccaggggtgtgggtgtcccgggggcgtgggtgtcccgggagtgtgggtgtcccgggggagtggatgtcccgggagtgtgggtgttccggaggcgagggtgtcccgggagtgtgggtgttccggaggcgagggtgtcccgggagtgtgggtgtcccgggggcgtgggtgtcccgggagtgtgggtgtcccgggggcgtgggtatcccagaagtgtgagtgtcccaggggcgtgggtgtccggggggcgtgggtgtcccgggggtgtgggtgtcccgggggtcgtgggtgtcccgggagcgtgggtgtcggggactgcagggacatgggcctcccctcccactcctgccgcccagggcacctcctgtgaggactcggagtccgtgagttcccacctccttgagcccgattctttggtgtccccgcctgcatcctcagcctccttccaaaccagaccagttctctaggggcgtcgacgtgtgaaactgattttaaagaaaacaggcagtggcctttctctcggccccacgtggcccagtagcgctcaccttccgtcccttcttccgcgctcagtaaccaatttaggccgctcctgcagaactcgggctcctgcccaccggcccacagcgtccacctgaggcctcgtcctcccagcaaaggtcgtccctccggaacgcgcctcctgcggcctctccagagcccctcccgcgcgtcctctcagccccgctcgcctcctcccggggcctccctctcccgcctgcccccaggcccgtctcccctcgcgggctgaggcaggttcgggcagcacggccgccccggggcgggggtcactctccaccaccgcgtggtgcccacagctcacggcgctcccgggtgacggtcccctcggctgtagggcgtcctgaagagcggcctgctcggagctgagcgcacggggttgcctcgccctgggcgtctctggccctcaccagccccgtcttcccatgggcaaaacggcggtcctgtttgtccacaagtaaccgtcggggttacggaggggccaggagctgcggcggggggctgtgctctcaggaccggccccaggaggatccgcgcgaggtctggagctctcaggggtcgcgggggacagaggggccccaagcggaggcggggaaggcggcagaagcccaggaccgccaagagctggcgaggaagcccggggctcgctgtcgggggagccgggcaggggccgcgcctcggaccaggacggaggcctggggaaggcggatctggccgccggagacgcggtgcgggtggagacgagggatttggatttccgcgggcggctgtacggatttccacgcgcggttcacgtgggccccagggggttgcccggcacccggggccgcgccgccttctcctcgccggcatcgacccgcagcctcacgtttacgcggcggcgcccgcagcccccttcggcccggcttccgcgcgtgcccccgagcgcgccctcgggatcagcccccggaagcagagaggccaggccgggaaggatgggcgacgggggtggctgacccgggagcacggcagggaggacacccagccaggcccgcgagcagcgccgctcccctcctccaggacgggcgggaacctgcgatgcccccgccgcgtgggccgtggggcggtctccgaggcactgggcggggcacgcggtgggcgcttcacggaactcgcatttcccagtcttcgtaacccaggaggaagcccacggcgtcctgcaccggcgccggcgcgccaacgcgttcctggaggagctgcggccgggctccctggagagggagtgcaaggaggagcagtgctccttcgaggaggcccgggagatcttcaaggacgcggagaggacggtgagcccagcctcggggcgccccgcgccgcggacactgcaggcggcggtgaaccaggccgcgtggggccgcctgcgtctctttggctgcggctgtgggcggcgaacacgcagcggcgcccgcgcggcgctttctgcgggggtcgctttccgcccggggtgactccgctttcctgggcgatgccccccacccccaggcacgcgctctccccgtgcggccgcaccgcgcatgccggttttcacatcagaaaatacgatttgcaaagcacacttagggtgtcccccttaacttcccaagggagtccccccagtccccgaagggtccagggcagcctgcgcatcgcagacgcgcgcggctcgcagaagggacg

SEQ ID NO: 5328 - DNA, 2490 bp, Homo sapiens
  source 1..2490: mol_type = unassigned DNA
gcgtcccttccccgcccgaggcccacccagcgccagcgcccggttctcttgcagcgactgggccctaatgtcgcacgaggggccttcgcgaaggccaatggtactatcccctcagcccctctcccacccccaccccctaccccctcaggctgtggggggtcaggggtcgaggcccgcgcggcgcgcaccttccaggcgcatccccaccgtcaggcatttctggaagcggcagaagggacagcgcttgcgctgcgtcttgtcgatcttgcagctctggctctcggtgcacgtgtagtgcttgttgttctgcaccgtgcgcttgaagaagccctgcgggagctgagagtcagcgaggccccgcagcgcccgtctgccgcacccctgccgcgcgctcgccgctcaccttgcagctctcacacgtgagcagtccgtagtggtagccggacaccttgtccccgcacacggggcacagctcgtccaggtcctcgtcgtacgaatagtccatgcccgcggcgtccgcctgcggagggacagcgggtcagggagggccggcggagaccggcagcctggggtccccgcggccgccgccccagccgctgtcgccggcccgtcgcgtaatcccctctctgtgcccaggcgctgccgccggcacccaccgagcgccccgcgcagcgtcccggggtgggtccggtgcagtccccgcgcccggccttcccctgccaggccccacgctcccgccccgtccggggggctcctcccgcgcggaccccgtcgcgcccgatctggggccctcgggttcgatgcgcttcgattgggattcgtttgtctgagaacaaaaccccgattctgagaaaaagagatgggctcagccgcggggaagacgccaggggacccaggagcgctggggcgcccggcccgggtgttctgggaacccgacagagacgaaggaggcagagacagagtccgggggagccagagatgggaagaaactctggcgagagacaacgaccgacgccaccgggcgcagacacgaggccagtccgagagtgccagagacacagacactgagacgcccagctagagagaacccggcggggacgagacacagggagggatggagagagacagggagacagagagagagagagagagagagagagacgagagagagagagagagagagaaacgaggggtgggggattggatcagagactcggagagacagcggaggcccgaagagaaaacccaagagagactgacgcagagccagagacacaacgatagacgacagacagagacgccgagacgagaggagccccggagagacgaggccggggagctacagaaacacggagagaaaacctggaggcggaagcgcccagcccgagggtcggggacaggggacgcgcggaaacctgccgggcaggagcccaagcgccaaggcgaggccccgcagggtcggacccagacgggggcccgggccgcaggaggcggaaaacgacggcgccgggaccgagagcccgaaaacgcagagccgccgggaccccctccccgggggagacaaagccgcagcagcgacggcaacgggaggcgcagcccgagccgccgctgccaccgggacgtcgggcggggagacctcgggcgggggtcggcgggctccgggaagccgagcccgaggcgagggagcgacctcgggcggagaggcgaagtccggaggagggaagcgcgaagagccagggcccgggacgcgagagggggcgcgacggcggctgcggtcggcccggcgcccacctggtcgctcctgcgagcagcgccccgcgtcccgcccgcgcggagcccgcacctctcggccgcgccgccgccgccggcgaggagccgcacccgggcgcagcgccgcccgcccgcgatgacggccgctcgggccggggacggggaggcgggggcgcggggctggcggcgcgggggcctcggctcccccctcccgcctccccgccccccatcctgcctccctgttcccccccgcaccgccgccggggccgctccgaggcgcacctgggacccgggcccctcagccgccaccccgccctgcgccaacccgccgcgccggggccgggggccggcccctctatatcggcgcgtgcggtatccgggggcggaggcccggtcgtgtcctccccccaagcccggcccgcgccggcaccctctccgcagtccagctcgagtcttcgccctcatcctccaggccccccagccgcagcccggctccccggaccccgagcgcggccagagagctgcggagcccgagtgccccgcgatctgggcaggtatagggcagtgggggccttgggtcacccgcctgcagtgggaggaggcagctcctgtctgtgaacccagctgggtcgtggcgaatgccacgcgggtggctggtcgcactacagcgtggaagtgggtaagggcgagtggcgaccgtggccgaggctcggattcacg

SEQ ID NO: 5329 - DNA, 5370 bp, Homo sapiens
  source 1..5370: mol_type = unassigned DNA
ccgtgctcgagggaggcgggtagcgcagaggagagggtgcaaggccctaagaagaggagcggggggactagggcggggctcaatggagctggggcgtccgcagactggaaggagccgggacccccgctccagagcctccctttccattctcgcttcttccagtgattccgagcccccgactcagtctttcccccaggtagagagaatccgaggctgtttctgccgctgaaatctgagcgggagagcatcccgaagccgcctgcgtggagcgagcagcccccgcgtcatgggccagaggcgcccgggagaatctgcgggtcacggatcacacccgcaggggcctggcggagcaaggtgccgttcgccgcctgcgggcaggagccggctctgggcctcggcccctgctgtgccgtccagtcggccgcttcttcgcttcttcggcaagggaagcggtggagaggcgcgggagccccgattgtgctggagagatctgggacccctgcgcgtctgcgtgcgaaggacccgagaccggccaactcagctgggagcacgggacacgaggagtgaggacaaagggcaaggaacggggcctatagggagggtgtgtgtgtgtgtgtgtgtgtgtgtgtgtgtgtgtgtgtgtgtgtgtgtgtgtgtgtgtgtagggggaatgaatggacagcggggaaggcatgcagaggggcccaaggggtgtggactcagcagccccaccccagaccagagaaggcagccaggctctggcgtccaccgagccagcgcccctatctgggcgcgggccgcatggcggcagaccaccctatatccgccttggtggcgtgggatatgactggcaggagcgcggaagaggcgctgagaatgcatgcgcacccggacagaccagacgcggcacggagggggtacttcccacaagtcctcctgccttgagaccaggccttcgagtggtccggggaatgcgcctctgggcacagccagcggccccagatcggcactggacgccaacccgagttagagaagcctgggagactggatcgcaggggccctcattcagccaaggagggggaaaggagagctgtagggtaggagaggccaggcacagggaaggtggggaggggatggagccttgcgccaggagttgggggtgcagggcctgtgacgagagagtattaccatgtgcaccctgaaggagagggagagggtctgggcctggaacgaggactctcgcctgcaggcagtcgcccagccccggttgcagggatggaccgcgaccagcagagggcagaaagtgcctggtccgcccgccggccccgagccgcgctccgcgcctcgggactctggctctgtgcgccgaagccttgcccgcccggcttctccctgcagcagccgcgcccccgccccagatgcccggagaaggcggctcaggcccagcccaacttcgcgggtccaggcctggggtttccaggtcaagcaaagaggggaccgagatgtgggagagaaactccacattgactgtccactctccccgacctagccacacaaaggcgcctagaaatacacgaaggcacaaagccccccaccacacacaaacacacacacacacacacacgctaggagacacgcgagcacacagaagcattcagaaccccggagataagcacagatacgcaaagctgacagagacacccatacagaaaaggatcgcagacacaacacagaggctgagacacgcacaaagacttaggcccccgcatgaaatgatgcggacacacaccccagacacaggcacgaaggacccacacattcacatacacacgggtgcaggggactcagacacagatccacagattcacccctgggagtctggaaggttgcagggacacacataccgtgtgtgcagagccaaggagcacacggaggcaagagccgcagaggcgggggcccgacacgcacagacacacacagatacccaccgacacacacgcaggtagggtagggcgggagcctctaatcctccacaaagccgggcccctccgcggggccccgcggcgcagggggccacttctgaccaagcctcccgcaggttccaaatccgatccgccctttcgcctccagcgaggtcaggggacccgccccccatgccctccgcccccgcccggctccgcgccgctgcctcgctccgggaggggccggggccgccccgcagcggatcgcggggggtcagcccgccgctaccccgggccgcaaccgcccccctgctccccggtgagccgcgcgtcggtggggaccacgggccgcagacagccggtccgacgctgtggcctctcgcaccggacgcgggtgccaggcccggctggcgcggaagtcggcagctccatctcgccagctttcgcgtcccgttgccgaggtccactttgcccaggctggctagagcactgtccttgatccgcgcgtcccagcgacccctggccgggcacccgacccgccaaaggaccccgatcttggcagccaacctaatttcttcagagccgctaccctggggccaccactccctcctagcgcccctcactgcaaaccctaggaggcccgggtcttgcccactgctcctgcccctgcccggggaccccttttccagccttagttgtcctctaaactctcggtcgcctgaacccaggcctgaccttccttgtcgtcccagtgtcccccattctcgatcccggggccccaacctcccatcggctcagtcccccgcccaatctctgccaggcccggagctttcccagacccctcacccacactccaggctcactccccgttcctgggcctgggccccccttgcacgagtccagggccagccgtcctcgccttctgcccgcccccgtccttcgttcctgggagccggccctctccgcggaccaagcggccccgagcaggcgccgccgcccgggggactccgactcagcccccgcgacctacctcggccgacagtcgggggttcccaagcggccactcccggccggcgccgtcccctggcggagccgccgcgctccctgccgtccgcgcagtctggcctcgctcggggccactcctcgtagcgctggagctttacaaaatattaataataaagaaggcagaggagaaaaaagaaagccttcgctccccaactcccaaatcaatttttcaagggggtggagcagagggatttgtttcgaagacgatcaaaacttctgcgaggggcccgcggggcggccgggccggggagccggggcctgagctcggggccaggcgcggcgcggggcgcgggccaggggcgcggagccccggggcgcgcgggggggcgggacggcactatttgacgtggagccggcggcgcatcccggcgcagggataccggccgcggggttcaaatgtcaggaagtttcgggaggtgaggcggcccgtatccctccgccgccagccccagctctaaacccggcggctcagcgggcgcaccatggcactggagtagcgcggggagcgcgcccggagccccgcggcccgctgcgccccgcccgggaccccgctgcgccgcgcgccccccccgcggcccgcggggccgcccctgcacccccaccccctcccccgcctgccgccgccgccaccgccaccgccgccgccgcctcctccccgcggctccgtctgcagcagccgccgccgccgggttccgggactgacaagcaggtgacagaggagccggcgcgcgtggctgcaagtgtccgggagagcgcggcgcgggctgcagccgccccggcccgcccgcacgacgccggggcccggggccagcgcgtcgccgctccacgatcgccgggggccggcgcaacccctgccctgcgggggccgcgcctccccggttccagggccgcggcggcggagagcgggtggacgggccggcgggcgagcagcccggccggcggggtccgcagcgcgccccgcgtcccatggatatagcaacaggtcccgagtcgctggagaggtgcttccctcgcgggcagacggactgcgccaagatgttggacggcatcaagatggaggagcacgccctgcgccccgggcccgccactctgggggtgctgctgggtgagtgcggggtcggaacgcccgagtggtctcgggcgtgggatggggcgtcgtccggctgtggacacgggcgttggggccaacggataaaggaaatgggtttgcaggacatggggaggaggcagagacaggactcctggagtgatcgccagagggccgcaagtacgcctccggcaggcgtcctgaggggacaggacagctccagtcgccacccaccatcctttccaggcttaggttctagagctgccactccgatgtggtaggtggcgggtggcaggggtgatggaggacctagcaatcaccttggcgagcttgggagaggcgcaaggtcacctggggtgggggagattctaagagaaaaacgtctccctggtcactcaaaccacagattttggggagatcggggatagaagaccacgaacgccaccgtggggcgtgtcagccagcgagcgccccagcctcacctcgcctgtcttggtcccagccggccaccctgcgccgtgctcgttgtcatttgtcttaacacggagcgcggattctccggagaaggggagagcacagcgccgagccaaggctcgaggcccgcggcctctccacgccggagcccgaggactgggacggactagccggggccgcccggcccctggcgcggcggtccggggagcgcaggcggcaggcggtgatcccgggcggcccgagccctcggggccgagggctgtgggcccggtgcgaccgggacgccggggctgggccgggcggcgctgacggccgggctttcgccctgtgcgctacaggctccgactgcccgcatcccgccgtctgcgagggctgccagcggcccatctccgaccgcttcctgatgcgagtcaacgagtcgtcctggcacgaggagtgtttgcagtgcgcggcgtgtcagcaagccctcaccaccagctgctacttccgggatcggaaactgtactgcaaacaagactaccaacagtaagcgcttctcgtcctccttccccgccaccgcccggcactcgagcccggtcagccccctgccgggcccggcccgcgcccgctctgccgccggctctgtgcgcggctgggccgggcagctccaagggttccgagagctgcgcgtcttggggctggggcggaccagcccagcccagcgggcactgatggggtcctgggagcctccggacggcccccagttgccatccgttgtcccggaatcctgcgctgggccggccg

SEQ ID NO: 5330 - DNA, 3120 bp, Homo sapiens
  source 1..3120: mol_type = unassigned DNA
gcgggagagcttccttcgacgtccggacacgcggatggggcggctttcagcggcctccacccgcgcacccctccaggcccacctctcggcggttcgtgcagcatgttctttactgggagtgggatgacaccatgcataggctcctgggctccgcagccgagccgcgggcaccagcggcggttgatgaatttcggtgtcaccaggggtttagcccggatttgggaaccgcgcgctctaatacgcgcacacggtcctgccctttctaaagcgcagccctttcacccagcagctgatttatggaggaattcgatcctgggacgcgctaggctgaagcccggagtccagggccctgcagcagctttcgggcttctcagcgtttcggggacccttggtggctcgggggctctcttgggctggggtcggggtgccccgccaggtggggccttacgcggtccagaaagagccagtgattctccttggagccactgcaggctcccgctggagggagtaagactggcggggagagctggcattttcattccttgttgagcacagccctcgcccctccccaagccctcctgccgaccccctcgggctggccaaaagcagcaagttcgggaggtttgtttattgagagaacagaaaattaggggttgcgggggagaatctaagacccttttcccgcctgagaaacgtgcgaagtccctcagctcctggaggcaaccaggcggcccgaaagccgagttcccggcgcggatgctagggccgaccccagccccctccctcctgcgccccagcccgagggcggcgagtggcaggtttttttttatcttgtttttttttttttggatttggtttgcaggggggaaatgtggttgtatcaatccacaaatatttactcttaacagacttgtatctgtggagatttcgaacaaagacagtttagggggattacaaaaaccctaaaccccgtttttctcccggacttggtgctttaaatgccaattataggcgagccatatccaacagcaacggggaaaggcgagcaggctccggggagggaggtggggggagagtccggccattaaatgtaacttttcattatgaaaaggatttcgccggttttatcttctaataagattatgtcacgaacacaagtacctaggatggtgctgagtgacagggctctgtcgtttaatcagaggctgtgccgctcaaaccgcggggccctttgtcccacggagtgaacgacggaaacttgccatcctaatccccttattcatgtcaagcacagaaaagaagccgagcaccttacaaccgtgtcccctccaccccttccgaggacggcgggaagagggggctccggccctgtagccccctgacgcttttcgtttccgagcgcgcttgggcctcaggagccggagcgttgccgtgggggcgggggaaggggtggttttgcgggtgccttaattggcagcgtctggaaaatggggacagtgaccccacgactagaggatgaatggggggagggttagtgggatgtgtttgcctcctctgaccgagagcacgggtcctgctctgtcccctcttcccaggaaaggtggcactccgggtgcacacccaccacccccattaaagcgggattgaccagaagagagaggccgaatggagatgccaggctggggccctcggcggggcagatttcgttggatccctgggactaatgtcgcagcgctcgcactcctgcaggtctccagggttggccattcccggctgcatgctcggcccctttcttccgagggtgaattcctttgttccacccccacggaaaccctcttctccgccaggcccgtggcgcctttctcgccacctccgccgccgccgccgccaccctcgtcccaccgtttgcagggctttcctgcggcgctctggccgcagagacccagccctgtctgccgactggcccttcgacgtcgccgccgtgcctgagccccgctgcctgctcggacaagcagaactccggcaggcgcagcgggcgccgaggcttgggctttagccgtggcgctcgcctcggcgcagtggggagccgcgggcgtcggagaagcggccgcgctgttccgggtcactgcaccggctgaaaaaaccaaaagcaaaaccaacacccagaaacgaagcctgcgtgcccccgggggctccgttttgctcccctcatggacatgggggtggggagctcgtggggtttcagcccaaaggctccagtcagtggaaccggagggggacttcggaggaatttgtctctgatgtcccggctccctggcctcctattagaactcgtagaggatccgctctggagtccccgtgcgccctggcagaggtcggggacgccagagtgcacgcagtctcctgcgcgccgagcccaggctccgggcgcagggaggatcgggctgagagcagggtgtcacctcgtaaaagcgacaggcaaggactgttttatggggagggagaaggagcaggaagtgatgcttccatctctgacagcatagggaccgggagctccgatggaggaaaccctttccgggcaggacgagtagagggacaggacatggccggggaccatgggattcgctgccattaagtatgggacgggcaggcgagagcggggaaggggaccgatggagccagaagccctgagctcacctcccgcccgtcctctcctggagccccctctgcaatcccggctcagtcggcaaccggcccttccttccaggtcaggggtgggggagagactttctccctcgaaacacttgataccaactttgtttttttggcaagaaaaataagccttgtttggaaaggggtgggtggggggcgtcgagcgagcgagggaaggagcaaggaggcggcggcggagcaaactctgcggattaggtttcagcgcctccgccccacccccagccccgcggcggtgatttgtgtgcgggggtctgtgaccctgcaagcatcaaacggcccgcgggaaccggccgagttcagagggacagtgggccgaagggcggcctaagacaacgcagatggttcctatcagcccggccgggcccgcagcgtccgccggtccgtccg

SEQ ID NO: 5331 - DNA, 3120 bp, Homo sapiens; identical to SEQ ID NO: 5330
  source 1..3120: mol_type = unassigned DNA

SEQ ID NO: 5332 - DNA, 7861 bp, Homo sapiens
  source 1..7861: mol_type = unassigned DNA
ccgctctttcggaagccgtgcctctccccctctgcttccttcatctccgagtctttgtacccctgcgtctccgactcggcctttcatctgctccctccacctcggcatcgccttgcctcagtctcccccgacccctgtctcgccccctctgcttccagaagcctgcgcctctgtctctcccaccgcccggtctcctggtgtccccggcgtctctcccgtcgttcccgccgccttgatcagcctgggctgtggcgctggcatcgctggcctggggaccggggtgtgggcgatggaagggggttcgagaggcgcaggggaggggcttcccctcctccgcccctgggcgcctggggagactcgcgtgccagtcacctgccggtcggggcgccgacttcgcgcctacgcactccacgtgggcgccccggggcgcgcctttgtctctcccgagccttgaaagctaattacattgggaggggacaggggtggggtgggagagggggccgctgtccccattcactgagccgaggccgccactccgccggcagccccgcgcaggcctggccccgagtcacgtctgttgaaaccgtttttttcggcctcgcccccacccgccttggcagccagccgcgcctttgtacgcgccggcgggggcgccctggaaccctgaaccgtcttacggggaacgggggtggggggaggggagcggcgcgggccccacgcgaggaaggaatttcctgggccactgcgaaagattgaggctcagaaagccagagagagacgtgcgaggaggaagcggagagggtgtgcgaagctggagagggagtcggagcgccagcgaaagaggggagcgctggggaaggaggaagagaaggagagggggagaagagagacgcggatgctgggcgcgcgacggcagcgggcggaggaggggagcggccgggaacctgcgcgcaggggaagccaggacggagcgcagcaccggcaggggagggttgccgaggggctgtgccgaggagcccgggtgggggcggctggaccgcgggccgcgggactcacagacagtgcgaggcggcgcgggggcccctctccctatgcggggctggggcgcaggggctgggcggggcgggtgggcgtctgagcgcggcgcgggcgcattcttcgccttttcttcctcgggctcattccggccgatcgatacctgcgcgggacctgcccccgccgctaatatctttttaatgagttcgccaggcttaaagcgagcgcgatctgccctccagggtggattttcccccggcagatgtttcgggaggaggaggcgcgcggagctcccgggaggggggacaaatctctccctccgaggggcgagaacaggagactttcttctaaagttcaaaagaaagacgggctttcactcggcccccaaaaatgtatttctcggcggacaatgggcttctttctgcgcctctgagggccggcggggcgggcagggcggggacccgtgcgctttggccccgcctgaccgactcgcacccccctcccccgcacccaggcccgggccccagagcgagggcgcaggagccgcgaagccggccgcccttccgagcgtccccctgaagcgcactgtcgggacctggctctcccggagctaagccccggcgcaccggcgagaacgaaagcgtcgtgcggggccctgggctgtcccacacgcccccgttctcataggtgcctcagccgggccgaagggacgcgcgctggtgcctcaaggggaggacgaacggacctccgggcttgggccgcggcctccttcccctcggcgctccgccctgagcggggcaacaactagaaattagccaaccccgggcggctgccgggccctgagactgtcttgcccgccccggcccagccacccctccgggtcgcccctgctcttctcctccacttccccttcaatgtccctccgtggggccgtcggcctgccgcggcggccctctctccactcccgtgggctcaggggaagagggcacccgggcggcgaggatgacctccgaagagccgcggcaaattgattcgttccgcccggagccggggccgcgtgaatgggggcccgggcggcggcggcagcggagaagaggataaagatgttctccctgaaagggggagggggcgcggagcgggaagcggggccattcactcctggcccggcccctcgggaagccgcgccgaagaaagggggccgaggcctattcaagtcctacgagccgcccacaatggaccgatatactgagggcctctctattaacgcccatgaatattaaagagatcgccaagtggcggccagcgggcgaggggggcgacggagcctgagagctccggcccggccgaggggagggggcttttgcgcgagcacattccgcgcctgggccccgcggaaaatgacaaaataacacgggtcatccgctgggaaagcccggaatgtttcccctcgaaatctcctcccggggagatgtgagcacagggtcttgctccctatttcaatgcaccttgagactgggcgctacctacgggctcctttttccccgggcgggggtccaggtgggttttgccgctagactagaagcacaaaatgtgagcgcggtggagatttgggcgcaccagctgggaggacgttctgcgctccgcttctgcccggctcccagtactgctctccgggcttgcgggtccggaggagaggaatgggactccctggccgcagtccgagcccgtggtcactgcgccagcggaatccaagcctctaactctaagccggggttcaggacccaaacgctgcaccccagcacggaggatgcacagacctgagggcttcccgcagtgggacgtggccctggagagggcaaaatcctcggggttgtcgtggggtaaagtgatcttacccaaagagagaccaagcaaagaaacctcagttcacaaagtccaactcaaaccattgcacagacagggacaccgaggcccagagaggaaaggggcagtccacaggacacacagcagtccttatccccctttggtgtcctggaggaactgaggtcgctttcggggcttgggagctgccgcagcgcttggctcctggcagcgctccccgacgtcgtctccctcgctcctagcactttgtcctctccacctaggtcttcccagaagccaagaagtaggccccggtgaggctcccctgcaggagccatcggactccatacgccccctcagactcgagctctggccagggagccgatgcgacccacaagctgcgtcgaaaaatgagtggagggttcggcgaccctaacccacctccctcctcagcagcgctgccctctgctggcgccctgcccaacggtcctgccttctgccaggtgtgcccttccttgggctccagcctcgggcggacccggacgcagggtctgaaggccagctaccgccgccttcctccctttgcgtcccaacggggacgggggatgccggagactactggcaggaactggggaccaggggtctggagtctggacgccaggtgtgagaccctcttagccaaggcgcgtccgggtggtggaggggcgtctatgccaacaggcgtttggacagggtctcgctcatgggaggtcagctcgctgttcttccacccaagtcctccgcgctgaggagaaggtctagggagtccacacagtccagcggagactaatccgtgagcctgacccacgccgagagggtccaggcacctctgttagcggcatctgaaattgtaggctggtgatgggagccagaagtgcggcaggtggggtgagctccctcacccagcatgtcagggcctggggtccgaggcttgaggctgacactggggagccgcgaagcctgcaggaagcggggccttccgctgggctcagcagctacctgcttcgggagaggggatcgctgggctccgaggtgcctcgaaaccgccgcaaagcaagtctgctcctgggatgatgggcaggaggaatagaggagaggaagggaaagaagagagaggcagaggagaaagaaagaactaggaggcaagaaggaaggggcgccgcaacgccaccggcttcccgaggttgcagctcagcaaggagccggaaagccgggccgcaagccgaacccgcactgaggcctctcgcggagctgcctgcagtttctgagggacttcgctctcaggcacgcctgctcccacctaggaagggtctcgggacccctttcaatccccctatatcccgtaggaaattcttttcccagagacaggctgccagggcgattcctgtccgcccatctcgacccccgacctggccccgcaagggccgggagcctggccttccatgaagctgtctcaggccgggaccagccccagccccgacggccgctgcggccccgcctcggcagccccgtgagcccgcggaggagtttcgcacccgaccgtgcacagcgaccgagttggcgcggcccgtatgaagcgaagcgccggcttcagcagcgcagtctgagcaggggatccgcgtggcaactagggctgcgcgcgagctcggggcgactgtggcggcccggggagtgcagggccggagagggaagaggacgcgggctctggccggggagggagagcggtgcagggctgggccggccagccggggcagcaaagtaaaggtgaacgccgggctgggccaggccggtgaacatagatcaggcctgaggggagcgcggggcccgaagccaggcgtcccctcttgtctagcctggtccctggagtcctagagagcctcgccgcaccccctccccttctccgtcccctcctctcctcagagccggctgagcctccctccctgccctgcgcttcccacggggagagaaggaaaaacaggaggggggaggaaggaccaggaaggggagagaggagtggaggggtactgtttggagcggtccgcgcgcccccgcccctcgcgctctcgcgacgaaggctcctcgagcccagccgggtacaacaagtctgtcctccgacgtcagggggtcattaataaccaattaggagggtcactgcggctcctataaaggcgctgagattttgccaaggggaagacggccccggccgagtgtgcgagaggctagcgcgcgcctgagccccttgctgccgcttccctgcaaccacccgcctctcacccaccctgcaccccccgcacccgcctccgcctccacccgcgtctctccaccctccgcgccgcctttgccatctctacagatttcaccatctctcttcccctctccccctcgttcgctttcctcccagtcgccccctcacctcccgctccctcctgcgtcctcctcctctccgtcctccccctgctctggttccttctccatcgcagcgctctcctctcgccccttgggctcccctctcgcccgcccacctcccccgtcggcccggccgtcccccggcgccggggagctccgggccgcccatgatgggctccgtgctcccggctgaggccctggtgctcaagaccgggctgaaggcgccgggactggcgctggccgaggttatcacctccgacatcctgcacagcttcctgtacggccgctggcgcaacgtgctcggggagcagctcttcgaggacaagagccaccacgccagccccaagacagccttcaccgccgaggtgctggcgcagtccttctccggcggtgagtccagccgtcggagcccggcgcaatccctcctcccggcgacccccattcccgtcctggcgatgcgcgagacgcggctgggatacccggcctcgctgctactcgcgccaacctgggctctcccggcgctcggtgcacctcagtttccccatgggccaaaccaggacgcgagccaccaagcagctccgcagcccacccggctcaaggaccgaccccggcgaccccgtcgctcggccccgacgcccccgccggcccctcccttcccctcctgcgcttgagctggcgggttcccggcatttacagccttactaggcgtgtaatagcagttgactcaaaaagaaggggttttaaattcatttagttaacttgggcttgacccacgaaagttcccacttaaaccaagaactttaaaaggcagccggggctggggagggggtggagggagggcgggcggggagaaaaagccgcggggagagcgagggagagaaagagagagcgagaaaagtttcttttctttaagatgtctcaagttcttattcctcattcatcaacccgcaaacaatatctttccctggctctggcatctctgcgcgtcgccctcttttccccctttacgatttctgttcctctcttaatttaccgtgaagactaattccacttccattcacgctatgtcaaccatctaatcccccttttttgtaaggggaattcctcggccccttttaaacaagtcccctccgcattgagctacaatttactgctacagcattcttccagggctaatgaatttagaattagcaatttctttcgaatggagccgaatgaatgcgatcactttaacagcgtgacaaattgcccgccgcgccgcaatggacaccgtttaacccccccctttcagccggcccgctcgccgggtattttcccaggtagcttagaggggaaccttgtaagacatggaggccgcccttgtgcgcctcgccgcttccagccctgccgcagatgcccgacaggggaaccctcggggagctgggggccgccgcggctcctccccgcccagagagatgacatcggggtttgtctgagcccgggcgccgccctccctggcaccccagggcctgggagcagagagggactcgggcgcgcccggggtcacacagcgagcgcagagcctggccagctgctgccggtgcttctttggcacctccaacacctgccagcccgaggtctgtccccagcgctgatcacggcccggctcctctgccagtgcccagagcctggacacacagtgggctcccggaagccgactaggcgaaagagtctccggttggccttcacctccttgcaggacctggcctcagtttccctgtgcataaaaccgctcgctgccgttggctcattaattcttaaacttatccggggcagaggatggaagaagttgcgaatgctttgagaattcgcggagagactaaaaacccacttctaaaaatgatccccaacgcaccactcgctttccagggcacggagggtctccaggttgcaaacagaggagaggtcgttgagcctccgcacatccgacttcctccacacccgggtggcttctctggatttggggccgacttgggtttggctggtctgggcaggaccgaagccggggtcccggcggggaaggaagggccgggcctcggctgcctcgggctctgaccggttttcctggccccgccgccgcagaagtgcagaagctgtccagcctggtgctgcctgcggaggtgatcatcgctcagagctccatccctggcgagggcctcggcatcttctccaagacgtggatcaaggcgggaaccgagatgggccccttcaccggccgcgtgatcgccccggagcacgtggacatctgcaagaacaacaacctcatgtgggaggtacgcgcgggctggggcagaggggcgcaagggccggcgaggggcgctggtcgcgggtaggactcgggcgtccggccgtcgccgcttccacccgggctgagagcggcggacactcctggcctggacgccccctgagccgggactctaagccgcccgagcctggagctcaccccgcctctaggctcctcccaacccgtgccgaaaatccg

SEQ ID NO: 5333 - DNA, 1434 bp, Homo sapiens
  source 1..1434: mol_type = unassigned DNA
ccgggtgtgcgccctcccagggccctcactgcgcaccgcgggccacggcagaccaccccagcccccgccttgctgtgcaggtgtcaggagtgccggttggctcccttcctcccaagcaaggccttagggcaccgcggctgccctgggatcgcaggggcgcctttagctctccaccgatgccccgacgcccccctggcgctggaggccctcgcgagtctggctgcttttcggagcctgccctgcctgctgggtttcaggcgacggcccaggctggctgggaccctcgaatcaccgcggaaaagggctccagtaggcaggacggcgccgtctctctgccggcaacctttgccccaaagcggaccctctgcggggatcggagagggatgccccggcgtgaggatgggagaagccccgggacgggagggccgcgggccgtgcccccagctggagtccccgcgccgccgccgggtattttatgatctgggggtggtggtgtgtccgtctcctcatgtcaccctgatcccaactcctgggcggactggagtttgcagacctcgctgccagcagccagggggcggcggggagccgagcgagaggaaaaatccacccatttcctgggcggattgcgtcggtcccgcccggccgagccccgcctcccggccgcggcccccgcgcgcagcccgcgcagcgctcagagccggacggcgcttcccggtggcggcggaggagcccggagggacgcagccgggcaaggcagggcgcagggcgggcggcgcgaggcgcagggcgcggcgggcagaggccacctggccaccttccctggcgcccggggaaggcgcggcgatggccggggcgcgcggggcggcggcggcggcgggcgggcggcggcgggccgagggggcgcggggacacagccaggcgcccctgcccgccgcggtgcccgccgcctgaaggccgcctgggcgcgggagccggtgccagctcggagcgggcgctggaggcagctcgaggcgcgatgtcggtgccgctgctcaagatcggggtcgtgctgagcaccatggccatgatcactaactggatgtcccagacgctgccctcgctggtgggcctcaacaccaccaagctctcggcggccggcggcgggacgctggaccgcagcaccggcgtaagtgcgcccgccggccgccttggcgcggctcctcctcctcctcctcctccccctcctcggtccggagccccgggctgggcgggcgccgcgcgggacccgagtcgcccagggaggcggcggggagcagggcgggcaagggcaggcgtcgcgggccggcgcagcggtggcgaccctgctccccgctcccccagcctgggccactccatctccgcccgcgcgcccctggggcggcgtttccttcgtctgggcccctcgccgcggggccg

SEQ ID NO: 5334 - DNA, 5053 bp, Homo sapiens
  source 1..5053: mol_type = unassigned DNA
ccgcgggctccctgggacccctgcgaccccgccgacgcgcgctcgtccccccccgagctccgcgatccctccgcctaccggggaaggagacctcagcgtcgctgtcctgcccctcctgaacgctgtccttgtccgacttggagccgccgcgggagcgcttcatgttgcggaaatactgcccccagcgctgccggccggcgtccttcttcagcctcttctccttggcccggcggttctggaaccaaacctgggggcggggcggggtgagcggccgcccggctctgcgggggcccccaaggccgcgggcgggagggaagcaggggcgagcgctgacctgcaccacgcgcatgtccaggcccgtctcggacgagagctgctcgcgcacgtggcgcgccggcttgggcgaggtgttgtaagcgctcttcagcgtctccagctgcttggcggtgatggtcgtgcgcggccgcttggccgtggcctcggcctctgcgcggcgggcgagcggtgaggcgcggcagcccctccggccccggccggacccccagccctcccaccccggccggcgcggggacgtcggggcctcaggtgcccacccccatcccgccccacaggcttctcggaaggcgcgggcgctgggagcgattggcaaaaacgggcagcacccgggctggggtggagggggcgccggcggagggcgggttctgccgcgggggcgggggcggcgccttccctaaaatcgcacctccacggcgcccccgccttcagccttggctcccttctccaagcaccctgatttccccgcgggctcccctttattctaagggtgtgggtatggcccagccttcgcggccaagaatttagggcgataattccgaccaggggcgaaaagccgcacacttcggaccgaacgaagcggttcgggacgcgggtctgtccgtgactccgccgttcccggcctcggcttcctgctgcctacaccgccctagcccaggcccccttagtgagcgcttggggagagaatttccccggacgcccccctgggcgtggcctcagccccatttttttcagaccaggaaaggtgggagcgtcgtcccctcggctgacctcgctgcttggcggtttcgtagtccgccttgcacacgagccggctgtcctccatgaggtagaactcgtcgcccgtggccagctgccgcttgcacacgacgcaggcaaagcagtgcaggtggtacacgaagtcctgggcgcggcgcaccacctgcgtgggcgggatgcccagctggcacgcggcgcacttggtcccgaagcgcctgcgggacgcacagggccgggctcagcgcggaagcgcgaggctcatttcgccccgagcgggttggagagaggcaagcggctgcctgggaaggcggccccggaggaaggctctgtccggccctgcagggtggtcgccagcctggccgccggggcagagctgcccactcccactgagaagggaacctcaatctcagaaagacctcggggagcccagccgccattgcctgcaggacccatgctggatctgggaaggtgaatccggagggagaggacccatctggggccagtccctcacaccccacagctggagccatgaaggccactgggccagagccgctgggtgccagcattaggaactaaaacatcaccaatttcggaggaactaagtccagtagaatcctacaaataggggtgtatcttctctaatgactgcttctgtgatttaggtaataaattgcttttttttccaaataatacttgctgatgtcccagccaggcccagccacccagggagcacccatggagaggccccacccttaatttggccaggccacagggtgccctgcctgggtgacaggagtgggctgggattgcgagagacgcaggcttcgagggcctggccttggtgattgtgaggggaggagtccctggggcaggcgtgccctccgctcccacactgaggtgaggtttcggggctcacttgaaaaagtcgtccttgcagtaaacgctctcccctcggctgaagcagcgctcggccagtggcgtgtggcagtcgctgcacttgagacacttgctgtgccagtggcggtccagagccttgaggatgaagcggtccaggatgtgctggtcacagccagcgcacagcgggatctctgtgggcacgaggaagttctgggtcacctcgtagaccaggaggcagtgaagccaccttcccaccccaacgcgagccagtctcccctccggcccacaggactcagggctgccgaggggtcctcctttccctacacaccctcttccccagccagcttaagtggccccgcaagttccgggagtgtgcaggcaccgcatcctatgtcaggagctaaggggaaactgacatcggtctaaaaatgtgtgtgagcaagaaagcagcccaggccatttcacgaggctgaatactcaattacaaaatgttgccagtgccaagaagggtgcatgtggagctcaaatgaaaaccccaccccagggggatctgctctctgaagcccggcaggaaacatagggaaacgggtcttcaccatcacctggagctggggcaccccatcgggtctccttcatgttaagcgtcatggccactctttctagggactcctcgcaaatgtggctgccctgcctggtggccctgtctgcaggcctccggggtaaatatcaatgccttccccatcattgggcagccgcaaaattacttatgagtggactggacaagccgatccactgcctttgtgtcaggcgtgggtgcccccaacaccgtcagagttactcaaacgtctggcttcccgctgcttctgccccccacaccccacttcggtactgcaggccccctggaggaaccacactggggaggtccaagggtgccctgtgggagcctcgagtctgtgagcgggttttccaggtgtcaagggctgaggactccctcttcacttagaaaaagtctctggaagagaggagtgcccgctgaagggaccgggatttactgacatattgcacccgcctccctggctgtggaccccgccggctccagcccatctcccagtgggtgagagacaccaggaaggggctccctcgacctccggcggaaaaaactgggctgcgcctccccacgcagtggcgggaaaccggcgatgaatgcgccccgcatccggcaaaaccgcagctccgggtgcggagcgtcgaggacccgctgcgcgcccggggtccccatcgtgggcagcgatcgcaggcgaggacccggctcggagcggggcggcccgacaggccgacacagcgcggattcagcaccgcggaccggacagcgcctcggccgcagctcgccgccggcgcccgcgtcgggcaaaagccgccccagcccaccccgcgccgcgcccgcgaccccagccttacgctgcatggcgactccagccctggcgggggctcctgtgtcagggatggcggggtcggcggagcctggacgccagcccgcccgctccggccagctctcccgagcgcgggcgcgcagtcctccttcctccctccctctctccgccccccagcccccgcggccaacccctcccaggaaccgtcgaaaaataaataaataagtagggaaccgcgagcccccacagcctggatgtaacccccttcccgccggccggtccctctcactccccactggctccggggcctccttccccatcctgcggctccagctggcccgggagtcgaggagaactgcccaggttccctaagaaccaaagtgctgggagctagagtggtgccaccaggaagctggggggcctggagaagagaggctttttcctacagacgggccctgagcggggataaaccgagcgggtgtctgtgggcgcagacgctgaaacctgacttcggggagaccgacggtcggagttcagctcgaccttggcccctgcatctgactctgttccgctggaacgtggaaagagtccggctggggcggccttcttggggaccctcctgtcccgtggtcactgccccgccactgctccctgcgcctcctccagcccagggagctggctccgggctgcagaggtctcctaagcccaccctggacccccgagagctccctggccggagcagcgcagtgccacaacctcactcactccctgacaacccaggccaggggccctgcaacaaatacaggctgaggcgcccaggcgcggacgttccggggtcctcgcgcccactcccgcccagatcctctagctcctgccagcctccgcggccaggcccggaaaggcctgaggatctcctggtctccccggtgcagccactcggcccgggcacccacctcggcgcaggtccgccctccgcgccagcagtgctagcagcaggtcgcctcccgccgactcccgggccgggcccagctccccgcgcgcctccatgggtcccgccgcccggcgtcgccactctccagtcccgaactttcccgggcccagcgacgccaccccgcaatagccccgaaccggcgtccaagcgactccgggtgctgctgggcgctgcgcccgcgggccgccctggggcccggagcctctggccgagcggagggcggagcggccggggggcggggccgcggggcggggcggggccgggggtcgcggagaccagcccgggccactgcggactctgagcgcctttgcgccgggacctgcggtgcccagaggccgccccgcgtgcccggcccgagggcgggcaccggtaagggagggcccaggtcagggcttcccgccagcgttcgtcccggccccgcagcttcctgcgccggagcggcccagaggcagaggcctgagctggagcacacgccaggagggctaaggttcccgggagaggggtcgagaaggcagcagggtcctcccgccgctgaggtttggcctcgggagcagcagatggtcggcgggagctcaacccgaaacgcagaaggggtgagtgtggcgccgagggctgcgtaccggaaccgcaaggtgccggaccg

SEQ ID NO: 5335 - DNA, 6343 bp, Homo sapiens
  source 1..6343: mol_type = unassigned DNA
tcgccttccactgtgcgcgatcggaggggtcgctctgcagtgggcgctgtgacgggggcgcagtcactgacgtctcctggggcaacacctataaataaggcccaaatgcggcccgtccttccaactgcggacaccagagggcgcagccccaggaccacgcccccactcccctaccccacccggaaaggggtccacccgagccgaccccgccgtcactagtcgggggaggggaggccctggagcttcacgcgggagctcccgccgcgggaaccacaaccacggctaagcctttctggcccgcccgccccatcgcagggagaggacggggggacgggcaggacgggcgcctggacagctgggttcctcccgcaggtgcttctgaccccggcatggaggaagcgcccgcgttctcggcccaggcccgcagccagggctgctccgcccgctgcgccccaggtaagccgggccagcgtgggggagtagcggggcctgggctgcggagggggccgccctgacccgcgtctccccccagggcaaaagccccgcaaggcagtgtgagctggagccgccagcctggggacctcttttaagatgacccgtacggaccctccggacctgctggtgtcgaccgtgtaccaggacatcaaggtggcgaccccgggacccgcgtccaagtgctcgccatgtgagcgatccgtggcccggcctgctgagcccgcgcctttcaacaagcgccactgccgcagcttcgacttcctggaggcgctggacgggccggccatggagaccctgccggagccaccgccgccggagtccgctgtgccgcgcgcccggacccgcgaagccgagccacgccgccgcgcccgctccaagagtgcgccccgcgcgcccccgggcctgacgcccgcgcccgcctcgccgccggtgttgccccgccgagggcgggaggcccagcgtgcggcgcgggccgaggcatcgccgcgccgggagcccgcgtacccggcgctccgcgcccttgccaacgagctgcatcccatcaagttgcagccgcagcggggcggccccggccgcgtcgcgcccctgtgcgccgccgcgggccgctgcgcaccgcccgagccacccgcgggtcccgccccccacgtgcgctgccgcctggacatcaagccagacgacgcagtgctccagcacgccacccggggctcgcggtcctgcgggcccaccgaggccgcgcactgggcccgccccgccccgcagttccacggcctcacggtgcccgggccccgccacatggcgctgtcgcgcaccccgacgcccagcgactcatactgtgcggatccccgggcgttctactgcgacgggcccctgcctgggccccgggactacgccgagcgccgcagtctgcccttcaccaccccgccgggccccacccagttcttctatacagaggagccccaaggcttccggggcagctttgcagccagtcccggcccaaccttcgacgcctactaccccaggccctatccgtccgaggagctctcggggcccagtccaaggcgcatgggcggctactacgcaggagaggtgcgcaccttcccaatccaggaaccgccctcccgctcctactatggggaggctccacgagcctacggcctgccctacgggccccgctatgtccccgaggagccccgggcccactccaccgcccgccccttttacacggaggacttcggaaggtaccgcgagcgtgacgtcctggctcggacgtacccgcacccgcgcagcagcccggcctgggcggactggggcccgcgaccgtaccgcaccctgcaagtggtgccgccctctgaccccgacccgttgctcgcctcctggcacggcggcaccggcaccagtccgccccggctggccaccgacagccgccactactcgcgctcctgggacaacattctggccccggggccgcgccgagaagacccgttgggccgcggccgcagctacgagaacctgctggggcgcgaggtgcgggagccgcgaggcgtgtcccccgaaggccggcgcccgcccgtcgtcgtgaacctgtccacctctcccagacgctacgccgcactgtccctgtccgagacgtcgctgacggagaagggccgcgcgggcgagggcctgggccgcaactggtacgtgacgcccgagatcaccatcactgacaatgacctgcgcgccaccgagcgcccgagcgccagggcctgggagttgcccgggggccgcacgcggccacctccccacgcggcccccgacggccccacctctggccgccagcggagcctagagcagctggacgagctcatcacggacctggtcatcgactcgcgacccaccgccggccaggcctcagagcccgcggccgactgcctgggcccccaactgcgccgactgctggactcgcggcccgcgggctccggggcccccgcgctggcgccgccacgctcgccccccgcctcggccggcagcgccgaggagcccgcggccccgggagaggcggccgacgcgtcccccgaacccagcgccgacgaggacgacctgatgacctgctccaatgcgcgctgccggcgcaccgagaccatgttcaacgcctgcctctacttcaagtcctgccacagctgctacacctactactgctcgcgcctgtgccgccgcgaggactgggacgcccacaaggcgcgctgcgtgtacggccgcgtgggcagcgtgtgccgccacgtactgcagttttgccgcgacagcggcccggtgcaccgcgctttctcgcgcatcgcgcgtgtcggcttcctgtcgcgcggccgcggcgtgctcttcctgggcttcccaagtccaggctcggccgacaacttcctgcgctttggcctggaggggctgctgctatcccccacctacctatcgctgcgtgagctggccacacacgcggcgcccctgggcagctacgcgcgcgagctggcggccgctgggcgcctctacgaaccggcagagtgcttcctgctcagcgtgtccgtggccgtgggacccggcaccgcgccaccggggacaccggccctgcccgcgcccgcgccacgcagccacgggccaacagtgcgcaagttcgccaaggtagcgctggcggccggcagccccgcgcggccgcccccggcgcggagccgcgagcccgacatggagacgctgatcctgacgccaccgccgggcacggcgggcctggatcaggacggcgaggcgggccggcgcgcgcgcgaggtggccttcatccacatccagcgcgagctgcggctgcgcggcgtcttcctgcgccacgagttcccgcgcgtctacgagcagctttgcgagttcgtcgaggccaacaggcgcttcacgcccaccaccatctaccccacggaccggcgcaccggccgccccttcatgtgcatgatcatggccgcctccgagccgcgcgcgctcgactgggtggccagcgccaacctgctggacgacatcatgtgaggcgccgggcccaccaggcctagcccaggcgctggcccgaaccctgccctgcccactcaggccccgcccggcccacccagggccgcccccgagccccgccagggccccaccccgacttcttctaggccccgcctctaattccccagccttccaagctccgctcagttcggcctccagctccgcccaggcccccaccccccggcccttcgtccccgtagtgttcctcacaggcccttcgccttcccacccccagcaacccctctccctcctccgggcctcctccctctcccagctcgccctcgaggatccccagaagaagtcggtcctcgccctcggtgctccccgctgggaggcggggtgggcctgaggaccgccgagctctgccttcactcggaggggtcactactgcacagaccccacccgtagagatccggtccccgtcggtccgcggggctctcgctggagcctccccgactccggtttcccctcgtccagaagcccgacgtaaccaaagcccagtctgtcactttaaacacgccccgccccgcctcccgcggctgtgttgcctcctcgctggagaacaccctggtcgacctctgtgcgtccgtgtgcgcgagcgcgtcccgccgaggcggtgggcagggcggacggtgcgcagtgcgttcccgctggtcggagccagcacactaaccacgccacgcgccctgccgtcccttcgcctccagccgctgcagtctgggccctgcaggagctgggaaaaaccgcagggaggtcttcaggccgatatgcaagtctcccagccgaaggggcaggggacctgaacaggggaagcagagcacctgggcctggccagagctgacacctggctaggagaggaaggaccaagggacggggcgttcccaggtgggagcctggagggcaaagcgtggtgcgagcaggtgagggagagagctagttggtaagcgtggaagcccacccgagggggcttgacctgtcccgagaggtccccgcacacccgctctggccgcacgccgtactgcgggcgtggaggcgcaagcccggcggcccggcctccacctgtcccccaagtgcaccctggtccgcgcccagagctctctggagggtggggtatgcgggagaggggtggaggccaaacgcaagggccctcctggagtccccagccctacttcggagccaggggagggggcaccaagtgagagaaattgggcacccccgcctccgctcctgctttcgcacccggcacgcccatctcgtccccgcgcgtctgcaccggccaggcgtcccgcttgcccacccgccgccgcgccccgcgccccctaccccagggcctctgcattcggccccacccctgagggccggccgggaacgcccctggaccggaataatttccagggggcaagagctttcgaaccaagtaaaatagaacttgaatgtagcggctgccgttgcctccttgtaccggtagcggggttggggacggaagccttcggtcggtggagaggagaaagggagaggccttcgggcggtggacggggaagagagggagtccttcgggcggtggagggggtggagagcgaggccttcgggcggtggagagcggggaggggggaggccttcgggcggtgggagggggagagagggaggcctttgggcggtgggggccacggggagggtggtcttcggactacgtgcgggacaggaggtcagggctggcaagtccctcaggcctccctcgttgccccagcctcgcgggccgcctaactgccccgttccaagggtgccaccggaccccgctggagaggaacttctccgttggctggatttcatcaccacccattcccgattccacgtttcctttaagcggggctggcggagccgcaaggcggcaaggaactggattgcgattggtcagcacgtgcctcggtcggcggtacaattggctgaggcgctgggccttgggaagcattccccgacgggattggtcgtcgctctcgcagagcccgcctcccgcagtacaagcggcccccgggtcgggtgggaggaggggactccgggaggaggaacatggcggtggcggacctcgctctcattcctgatgtggacatcgactccgacggcgtcttcaagtatgtgctgatccgagtccactcggctccccgctccggggctccggctgcagagagcaaggagatcgtgcgcggctacaagtgggctgagtaccatggtgagggcgggacctgcgggcatgccaggggcacgcctggcgaggcgggggcggggctggcgggacggagacggggctgacgaggcaggggcggggctggcggggcgggggcggggctgcgggccgtagcggactgcgctctgctccgagtcctgcccctgctaggtttgacccaggctgaggtcctgggcgggaagggcgtgacacggcctgacaccctccccagcagtctcccagttcccgcgccctccccggttccaccctccttcgctcattcatccctgtcccagcctcaaggggcttcgtctctcctggggaaggggctgttcagagctgggatttcagaccccttcggctgggagttcctcccgcggcctccaagggcggccagggcacgtcctgaggccgccctcccatcccagcggacatctacgacaaagtgtcgggcgacatgcagaagcaaggctgcgactgtgagtgtctgggcggcgggcgcatctcccaccagagtcaggacaagaagattcacgtgtacggctattccatggtgagccgcagccccgtcccgccctgccg

SEQ ID NO: 5336 - DNA, 1089 bp, Homo sapiens
  source 1..1089: mol_type = unassigned DNA
gcgggaaacgccgtctcccctggcgtctgagatctggggtcccctccccacctggtctcctcgctcccgccccagccccgtgcgccccaggagggcaccgccgagcgccgggtccccgcagggttcgggagactccgcggaccggaggagggataggacccccgagctttgggggcgggaagggagggtggaaggaggaggggagcggggttggggaaagttggagcttcggtatcttttctccgggccaggccgtcctcggggccctgcgctgcgtctccaagtgctgggaagactccgcggggaaaggtctgaggacgcggccggctggcacaggtgtggcggcttcagagggccggggagaacccatggcttcgaggctgtggactagaaatgtccctgattagaagctgagaacctttggccagggaggtggggcggcggggaggggtcgtcaagccggtccagagcgcgcccacctgcgccacaagggagaagaggtgccccccgcccccctccgcccaccgccgccacgatgcgccgcggacctcggcgacccagcccgggtagaagcgcgcgctcccctcctccagcctcgtgcgccggcccctgccccgccagccccgctatggtcccccatccacccccgcgggagcgcccctgtccccccatcctgcacttcccccagagtcgcgcgccagtttcccgccccgtggaagcgcccctctcccgacttcggctgatccccgctcgccgccctccccgcgggtgcgcgcccggcccctccctcgcccggggcgggtctgcgtgggcggtgctccgggtcggcgggcggagctccggttccccagccctgcgccccggtggagcccgagccggagccggcagaggggcgcgggcgcggacgcggcgcctggcggggccctgggaggctcggacggggtcctggcgttgagctcggccggcccggagcgcggacccagccgcaggggcggcgatgggcaccgagggacccccgcccccggccgcctcccgcggacgccagggctgcctgctggtacctgcgcgggtgagtgcggcccctcagcg

SEQ ID NO: 5337 - DNA, 1020 bp, Homo sapiens
  source 1..1020: mol_type = unassigned DNA
gcgggcgtgaggccccgccctcgccgctctctgcccgcccccagacccgcggcccgcctggccgcctcacctggccgatggcgttggtggtgagcacaggaaggccattatagtcccaatccttgaggcaatggttgaagtccggcggggcgaagccgctgcacgaggggtcggtactggtggcgacacggctggcggcgctggctgctagggcagcgctggcgacgctgacgccgctggcattgggaggctgctcccagccagaggcattaggggggaaggccccgtagtggcaatgcagcgggggcgccagcgtgaagatggggtccgaggccatgcccagagccacgaagagcaccggcaggcagcagaggccgagctgcagctgctggccgccgcccagcgcccccacctgggcgagcagcgcctcaaagctgagggggcctgggggcacggccagcgacaggctgctgcccagtccgtcgccgcccgcgtctccctccccctcccgctcgcgctcccgctcaccctgcagctgctccgtgggcaccgcatctccgagggtcccgacctgctgttggggggcagggggtggcaggagaagggtgaagcggaggaaaccgcagagcaagggcagggggcaggtgggagggagggctaggaaggcagtcaggggcgagggatgcgcaggaggaaaatgccagacgctccgcgggggcgggggtgctgggagaggatggcgtcgccacctggggctcgggcacttactccgttggaggtgggggtgatctctacagtgttgtcgattttgccgccgcccccgccattgggctcgggggtcccggtggccacccggggagccagcttgccgaccgcaggggccctgccggcccgcgccgaaaggatgcgctgtcctctggctcagttgcgcgccggctgcccggacacagacagctcgaagagatcccgctctgcagctctgcagccgcgggcgcctccttggtctctgcgatctctgcg

SEQ ID NO: 5338 - DNA, 6343 bp, Homo sapiens; identical to SEQ ID NO: 5335
  source 1..6343: mol_type = unassigned DNA

SEQ ID NO: 5339 - DNA, 1109 bp, Homo sapiens
  source 1..1109: mol_type = unassigned DNA
gcgaagtcacagtcgcacagccaggggttcccgtccagacgcagggagcgcagcgcgggcagcgcggccagggcggccacgctgaggctgcgcaggttgttgtcgttgagctccagcacctgcagcgactccagggtctcgaaggcgtcctcgtgcacgcccaccaggttgttgttagccaggctaagcttcaccagcctcccggccgagcggaaggcgccggcgcccagctgggtcaagttgttgtagctgaggtcgaggaacacgagcttggccgagccgctgaacgtgccctcctccagcgagcgcagcgagttgttcctgaagtccaggtagaccaggtcgccgtagaagatgaagaagtcctcggggatccgctggatgcggttgccggccaccagcagcttgcgcacgtccagggggaaagggtctggcacgctgggcagcccgcggtcgcggcagtccacggtgtgcgggtcggtgcaggcgcagcccgcggggcacgcgtgcccgggcgcgagcagcagcagaaggctgcagagcccgagcgccgcggcggcgcaggctggggctcgggggcgcatggccggggggcccgcgccggccgcggcgagaaggaagcggctctcggagcgagccctggcgcgggacggcgcggtgaggcactggctgccgggcgcggggagccagagggcggcccgggcggggagggcgtgcgcccgggcgtgcgggggcgatggagcgcggcgcggacggactggggagccgggacagcagggatggagaggggaggggcggggagggaggggcgagggactcaccaaagggtttacccggacaggaaattaacccgctagaaaaatctcttgggagaggcgggagcggcaggggtggccgagtggccgtcgccaaaacgcggccccaccctggcagctgatttccgagatctggcagtaagacgccgcgcgcaccgggcgggctgcactcgacgtctaagttcagctaccaagcccaggagcggtttccctaaggcgtgtcccgggcgtgcgccctgccccctcgcgcccgcctggtgccaaagcacgctccctgcacgccaccctatgtcg

SEQ ID NO: 5340 - DNA, 1109 bp, Homo sapiens; identical to SEQ ID NO: 5339
  source 1..1109: mol_type = unassigned DNA

SEQ ID NO: 5341 - DNA, 1384 bp, Homo sapiens
  source 1..1384: mol_type = unassigned DNA
gcgggagcaccagcggcccacgccgaggaagataggcgctccctcctggggtgggcagcgcaggtctggcctgcgggtggggggtggagagtgagaggcacgcggggcaccagctcagctcccctctggggatttcgtactcgcagtttaaggaaccggtggagcacgaactccactcctgagctggcgcaagcgtctcccttccatggagatccaccccggctcccctctgaggccccctttccaagcaccctctcttccgagcacccagcacctccccaaccttagcacggctcggggcaccagttctccagggcgggggctgccccaccgctcaagggaggggacagagggccggcctcggtccaggcgacccctgcccctcgccaggggcgccaccttggccccctcccgactgccgtccgccgcctccgcccccccggggggtgtgtctccgaagtacgggggcgcgggaggccaagggtgcccccagcctccgaccgagaccccctcccgagccggcggcgaatggtaggctccatttaaagagtgcctggtggcgcgcggtgtccttcttggagcagctctcggcgcccgcccgccggggtctcggcgatcgctgctcctcctcctccttctcctcctcttttttctcctccgcctcctccccccgccgcctcgccaccgccgcggctagggctggaggcgccgctgtcattcctgtgccggaggaaccggcgctgccggtgcctgggggtcggggcgcgggcgaagccgggccgcggaggacacaacaggtagagccgggggtgcccggccgcgcgccccccgcgcatcatgcagctctttgtcacctctctcgcccccaggccaaaatcctgagcatgatggaagacaataagcagctcgcgctccgcatcgatggggcggtccagtcggccagccaggaggtgaccaacctgcgagccgaactcacggccaccaaccggagactggcggaactgagcggcggcggcggccccggcccgggcccgggagccgcggccagcgcctcggcggcgggggactcggcggcgacgaacatggagaacccccagcttggagcgcaaggtaggatcgccccggcgcccagggcggaggaaggcgagcagagcacgcccggcctcggaggtggccggggacccggggtcccccacacccggggcgaaatcgctttgcattctggcttgtaaccctttccgcccggcggtggccaccgctgctctccggctgggagttgcaggctgctgtcattcacgaaaacccgagcgcagtgtgcacggggtcacacggtcacaccggccccggccagcctgagcgaggcgcagccggcgggtcccttccg

SEQ ID NO: 5342 - DNA, 1384 bp, Homo sapiens; identical to SEQ ID NO: 5341
  source 1..1384: mol_type = unassigned DNA

SEQ ID NO: 5343 - DNA, 835 bp, Homo sapiens
  source 1..835: mol_type = unassigned DNA
ccgtgaggccgtgtgtgagcccttgcgtgggccgtgagtgcggcagggagcgcggtgtccgggggccgcctgtcggtgtgtctgtgcgtgcttgtgcgctagcctttgcctctgcgagtgcgtatttttaggaccgagtctgtctatatgagcctgtgtctgtgtgtgtgcgctcccggccctgcgtgtgtctgtgagcgtctgccggggcgcgtgtgtgctcggaaccccgcggtggtgtgcgggtgtgtccgtgtgtctgtgcacgtgcaggcgagcgttcccatctgtgtgtgtgcatctgagtctgggctatgtgtgactcagggaccagtctatgagcctgcctgtgcctttgagccgatacctgtgtgtgactcagggacgagtctatgagccgatacctgtgtgtgcttgggtgtctgtgtcgtggtgtgtccctgcaagcgtttgtgcctgcaggtgctggagtgtgtagctgtgggaatgagtgcgtgtgagtgtgcggaaggggcaccgcgcgagggagcgccggtgcggaaggctaagcgagcccgcgccctccacggacggtgccgccaccccctccctccgccccgcgctatgtgcccctgtgtgcccgcgccgccggggccgtctctgggctccgggagggggctgagcgagcggccctttcctcccagggaccccgggcccgccgccagccctgggcacacccgccccttcctccagcggccccgctcgctgacccacgggcactcgatgggcactcgggaggcaatggccggagaggatgggcagttagcgggagggactgagtggcgccggcttcacg

SEQ ID NO: 5344 - DNA, 2248 bp, Homo sapiens
  source 1..2248: mol_type = unassigned DNA
ccggctcccgggcggccgcccaggaggagacccacccgctgggtttctgaccgcctcctaggaaaatctcaagtacggaaaccaagcccgacaccggttccggcacctctttcacgccgctggcagcccaaggtccgccctgaagaagagctgtagaggaggaaggtggccctggctcggcggagtccggctcgcctggtgccaggcgctggtgctggcgccgagtgaacccaggcggcccaggtgtccggcctggtggcgggcgcagggcctgcggtgatggaggctccgtcttagcccggccaggcccagccctgccggtcgtcggcccgggacatgcgcggcgctcaggcctgcagggtgccttgggcggccacaacaaagttaaagaccggagtaagagtctccggcgagaagagacgcggagaagccggagccccggaaagccgcgcgcagccccgccagccgccgccagctgcggaggaattcgggctaactttaaaaaccgctggcgtccctgggccgcctgcccgggccgcactgggcggcctccatcgtcccttccctctacctgcactgccccaggcgggagagaggccttggccccgagggaccagctgcagcgggcagcggggtcctgctcccccaacccccgccccatggcacggggctgaaccggtaccaccgaggccaagggcgaccaccaggagagaagaccggctgccctcgtcatgcgaatctgtgccctgcgacctcgctgcggctgctcgagctatgccagaggtggggacgaagggcccgcggggagtgaggtgggcagaggagagaagttggcgccttccccagggtccccactctgcggagaagcccgatcgcagaactcggtcggctgcggttcatgctggcagtcaccgcgaaatgcgccctcgactcgggatcgcactggaaaccttcgccacactgtgccaggtctgacctcccaggagcgcgccaagggcccctcgcccactgcggcccggcggcctcctccccaataagtaaggcccgtgaccccgactctggaactttgtcctcacagggaggagctcctggtggtcaccgatcggctcagcagctcggagagaggttaggaaaatctctccggaacgcgttgggaggccccctcattcccgccccctcccgggcgcacggagacccccggctccagggagcgcttaccgatccggatgacgtggggcatcccgcgcgagtccgggatccagaaggcgcacacgaggagcccggcccagtattcccaaaccagactccggaggcgccgccagggagcggtcatcgttgggcgccgccgagcgtgcccggggcgcggccgtggcgggctccctggggcggcagctctaggcgcgggcgcgcagcagccccgaaggcgccgcctggcccagccgcccggctcccgagcgccgctgcaagtggggggcgccccgcggcgccgcgcacatcttactggggggccgccccgccggcgcccgccccgcctggctgccgcccacgggctgcccgcgagcgaggctcctgggctccgcccggactccgctcggactcggctccggctccgactcgcgtcggctcggctcccgcgcgggctcccacctgccccggctgccgggctctggcgggcgggctgcacgcgtctccggccgctcctcctccagccgccgccgatgctatcgcccgggctcgcacaaagccccggagtggagttgcacgcgcgcacactctccctcccagccccctcccctgcgccctgcctcccgcctcccgcgccgcccgccgcccgcgctccctccgcgcactcccccgcgcacacacacttcacactcacacttgccgaggcgcacactcgcgcgctcacacctgcgcggggggcggggaaggggaccctggccccattgtagggggacgcccggagaacgaggactctcctcgcttcccagacgtccccacccgccccgccggccccagtcccttctactgcgagggcacggagcccgggagccaggcgtggagcgcgagagctggcaccgcgagctgggagacggcggcagcccagcggccggaccagctggaggagacgcgcccgccgggagcagcgagaccgggagcccgccgtctgcggagcctggcctcgcggctcccacgcggcgggcgctggctggacggcggtggcagcgggagactgacccgggaaccg

SEQ ID NO: 5345 - DNA, 3541 bp, Homo sapiens
  source 1..3541: mol_type = unassigned DNA
ccgcggggagcaggggccgcgctatgcggcggtcggtctgcagcagggcagaagccccttcccgtctgggtgtgtgggagcgcagacccctccggcgtggccgggaaccaagccggggctcggatgaaacgaaacgaaaaatgaacactcgaattttttttgttagttttttttttttttttttgcttttttttggggggagggtagggtagggaaatataaggggaaaaataaattaggctagattaaagctttggctatttcctgcttttatacacagacgcggctctcgcgacctcccctccggggccccgataaatacagtatactgcgatttaaattaagggcgcgggcggagttagaaggaccccaggagccgagaggctccacgaataaataaaaaccgtaaaaaaccaagcccggagaaaggggaaagcggggtggggcgcatccttataggagagaagaggcgtgtagcgaataaagtgacagccccccaccctggacccgcaggctcaggagtccacgcggggagaggggatggagaactctcctcgcttcgtcctctctcccggggaatccctaaccccgcactgcgttacctgtcgctttggggaggccgctgccgggatccggccccgaacagcccgggggggcaggggcgggggtcgtcgaggggatgggggcagagagcaggcggcgggcaggatgcccggggtgagttggcgagttccggatcttcgctcctctctcccggggctcgggcgacgcagcctaccgggctgtcttcgccgctcaccggagagggtcgtccgggtgtttggttttgttcgaaagtttctgggcttttttttttttttgtaaaatccaaagcaaccgaacaaaaagagtccaggccgcgcgggcgggctgcgcgcccgcgccctgcagcgcgccggcgggggcccggcccgcggggtcactgcactgagccgggcagtgtgtggtggtggtggtggtgcagcgccgccggcgggggcggtgggggcgcggagggtggcgatgcgccgcccccgccaggccctagctccccaggcgcgtatacatcgtccatgggcgggtggcccgcgccggccgcaggggtcatgcgcttctccttctgccgccggttgcagaaccagacgcgcaccacctccttctccagctgcaggctgtctgccaagccggtgatctcgtgcgccgagggcttggggcacttgagaaagtggctctcgagcgcgcctttgacccccacctcgatggacgtgcgcttcttgcgcttgcggccctgcgccgcgatcttgtccaggttggtggggctgccgctggacgagtcggtctcctccagccacttgttgagcagcggcttgagcttgcacatgttcttgaagctcagctgcagggcctcgaagcggcagatggtggtctgcgagaacacgttaccgtagagcgtgcccagcgccagccccacgtcggcctgcgtaaagcccagcttgatgcgccgctgcttgaactgcttggcgaactgctccaggtcgtccgagctgggcgcatcctcgtccgagtgctcgcccaccgatgagccgccgccgcccgcgcccgggtgcaggtgcgccgccgccgcgtgcaggccgcccgcgtgtgcatgtccgtgtgcgtgtccgtgggcgcccagatgcggcggcggcgacggctccagctgcgcctcgtggccatcctcgtgcagcgcgtggtgcaggcccggccccgcgccgccaccgcccgccgccagcatcccggccaggccgccgccgccgccccccgggtaggccgcctgcgcgtacagcccgagcggctggggctggtggcccccgctggccccgggcgagggcgacatggccgggcccaagtggtgcgctgtgctgccctgcgcccatgccgcgcccgcgtgggccgccccctggtgcaccaggcgcgcgtggaaacctccgccgccgccgccgtcgtcggctcggccggtgccgccgccgcctgccttgccgtgttctaggtgcgggccgccggcccaatcgccgccgccgcctcctcccgtgggtagccactgggggtgcgctaggcccacggggtggcccgcgcccgcgcccagccactcgtggtgcatcagcttctgcacttcgcggtacgcggcccctgcatgcaatcgctccgcggccgccgccgccgccgccgccgccgcggcgtccgggtgcataagcggcccggtgcccccggctccgccaccggggccccgcggcaggtactgcgcggtggtggccatgccgccccgcgccctgcgccgcgccgccgccgccgctccgctccgtctgcgggccccgccgcctcgctccgccggcttaaagccccgacccgctcggcgctccggagccccaccccgcccgccgcccattggctgcccgcggagctgcctcccgcctcccctgcccggcccccgccccgcgcgcccgcccgccaccctgcccggccgcccagagctctccattgggcgtcgctcccggggtcccgcgcgccggccgtgctgattggccgctggggcttcattcacggcccccctaccgtccgcgtacacactcacgccccgggggcgcggccgccacgtggggagtggcgcgggggtggccctgggaccgcaccccctctcgtcctggctgtgtgggccccgctttcccccagcgctggagactccgagcccggccggtcccacattccacgcgagctgaattcccgcccgcatcccgcccgggcagcagggattgccggctccgggaggcgctcgggctccgagaagcggctcagccccgcgcccctccctcctcagtaccgctgccggcggaccaggattcccgcgggtcctggcggctgcgagcgcgaggcggcgcggattcgcggctcggttccggcgcgactgctcaccgcgcccgcctcgcctcccgcggctgccagcgtgcactgggcgctcctcggcgcgtctgcccggcccgtctcggctttccttctccttcctctagtcccagcgtcacaactccgccgacctcctctgccctgagagcgcgtccggtgcgggcggagtcggacggactctggcttcacgcctcgcgcgggcacaccttctcccgggcactgaggcccaggtgagtaccgcgcgggcagctggggctgggacggcgggcggcagcggttctacagtcctacgcgagcccctggtacccggccgcgctccggggttccagaaggagaagatctcgaggtggagactgtggctccggggaaaacgctgctggcaagggcgctagttgggggtggacgttgggcccaggggtatctgacctgcgccgctgcagccttctcgctccttctcccagcttgaacggctcatcggctgtggtcgtggtgggatcacgccccgggagaggagaaggatgggctcagggaaggggctcgggctctccagaaatccggcgtgcaggccgggagctgtccagcctcg

SEQ ID NO: 5346 - DNA, 1513 bp, Homo sapiens
  source 1..1513: mol_type = unassigned DNA
gcggggcgggccggggcgtcgctgcgggacggcatccaagggcgcgcgctgcgtgctgtccccgcggcctcccgggcgccaccggctcggccaggccccgggagctgcccgccctaggccgcgggggcgccccgggctcgcaggatccgaaaattcccttcccgggccggggcgggtgagcaggcgggcgctgggctgcgctcgacgcctctccaggccgctcaggagagcctcgagggctgggagaagccgccggggcggttgggctggacgagcgagtttaggggccaaccgtctccacccgccggccgcgctgcagagcggtgctcccagggctggggtctgcggcgaccccgctgggaggaagggagagcgagaactgagacgcttgccccaagttgcctggagccaaaggcccccgagagcgtggccgtggggctgggtcgctggagtggccgcttcggcccagacactcgcacccccggcggtgcggcggttttcacgcgcgcactcactcagcgcgcccgggggtctgaggtcgccgctacggcgcctcgccccgggcagcagcaaccagcacgcaggcacccctggaacaggcgggactgccttcccgacgcgcggcctgcgcccaggcggcggaggggcccagcccccttccagtcctcggctccagggcgcagggccacgagctcccgctcccaccctcggcccctggcacccggcgccggctccgccgccctctctcacacgcacccttggcagggccccgcggggcgccccaaagcttgggggcagctcccaggtgtctctgggaagggaaagaaaggccacaaagcaaaagaaggagcaaagagaaggcgagggaggagcaggggcccgggtcctgtggactcgcctgggctgggagtggggacactgagagggctgcgaaggctccgggggtcgcgcgtggcccgcaggctcacccctggcccgcggctgcccttccctccccttcctgggctcctggcccctctcagtgctgttcctttctcctcccctcaggccctctcctctcccgcgcagggctccgtcctggggattaagagaaaggagggaggggaaaggggaggggaagggaaggggcggaggagaaagagggacgatccttccaaaggcgggtgttgagtttcagctcaggaccctcgggtccaactgcctgtggtaccccccacaccccccacccccgtcccgccctggccctgccccagtccccggcgccttcctcctccggactccgctgcatgcctcgcttgcggtggtccgatcggctttctccgggagctttcctctccccgccacgcccccgtctccccggccgtccccgcgcctctcggcctccctttcattagccccacatctgtctttcccatgggagggagcgcgcgccttccgcccagcggggcccttagcagagcctctccaatcctcggcgcctcccctacacagggttcgctgggccgttcttgcg

SEQ ID NO: 5347 - DNA, 3541 bp, Homo sapiens; identical to SEQ ID NO: 5345
  source 1..3541: mol_type = unassigned DNA

SEQ ID NO: 5348 - DNA, 558 bp, Homo sapiens
  source 1..558: mol_type = unassigned DNA
ccgagagcgcaggaccaccaagagaggccgggccacctcctccgccgtccgctgacttctaggggctgggccggcgcacagcaagggggttggaggtggggtcgccctctcccacgcggctgggtttccaggcggtgtcctgggccgagccgcttggagatcctagatcagcatgtgggtgggaaagggcgccccgtcctgggcccccccgcccctgcgcgcagagcagagacgcgcagacccgctcccactccgcttggctcccttggagcagccccggcggcggcagcgatgggctgggaggggccggcacgctggcctgcgcgggtccccagccgcctcccgccacccggaacccctctccttcaagcgttgaccgccgacccacagctccccttcaacccggggcgagcggggttcttaccatacacctcccctctccgctcggttccatccttctcccgttctcctctaggcttcacggtttgcaagcacccttgcaaataactcctagcccacccacaccgtctcgtccgcactttccgagagccaggcacg

SEQ ID NO: 5349 - DNA, 7244 bp, Homo sapiens
  source 1..7244: mol_type = unassigned DNA
acgcccagccagggcgcagagagagcgctgggcgaagaggggtcgatggcccgcgggaacagggctggggttcctgtttggggaccggccggctgccaggcccctcgccctactgcttctccggagcgccgttgaccataggcccgtacaggccgccgccgtaggtcggctccttgtgcaccgccgcagcagcggcggccgagcggtcacgcatgagatcgctaaaggcgtagtccatgggtgggcggaagccgagcgtgggcaccaagccggcagtggagtagggcgccatgaaggccagaccgcggctgtgcgccgccgccgcggagtaggccaggcgcagggggctgaggccgagcggcgcgcccagcgggtaggcgcccgcgtcggcaccgaagtgactggcgttgggctgcagcggcgagaaggccgagcggctgctcagcgagcccagcgccccaggcgccatggcgccggccagcaagggtctgtggtgcggaggtgcggcgggccccgcctgcagcggcgcaggcagcccaggccccccggcggcggcggcggcggcggcggcggcgtcgacgcggctgggccacgcgtcgtctgcagctgctgcagcacccacggcggccttatctgggggcgccgcagggcccaggccggccgccaggcccccacggtggtggttcagcacctgctcgatggcctgcaccacgtcgccgccgcagccctgcaacaccagctccaggacgcctcgccggtggcctgggaacacgcgtgtcaagatatccagcggcgtccgctgccgtggacccgagcctccgcccagccctggcgccggcgcggcctcaccctcttctttgtcagcctctgaaccggattcagagcccagagggctagcggagcccgggctgtcctcctcgccgccgccgccagggccagcgctgcctgggcagctgccacctgcctctttggaggcccgagctaggggcgaaccagaaaaggactcgccatcgccgttctccgagcctgagccgggccgcacctctggggacgacgtcccgggccccgagtctgcgccgtcgggtgataagggcttcaccggcggcggcagcgggctgcccgggcggcctgcctgcagcagcgtcttaggaaacaggtcaaacttctgcaacttggcctctgggaggggagaaaacgtgtcgtgaggagcggttagctagaagacagcagtcacagcacctcggccctttggatctcagtttcctctccctcagccccacagcccttattcactaggctccagtgcccctctttctttttgctctagcattccttccgctctgagcccctacagccctgaccccagggctccctctctttctgtactcctcagaaccccaactacctgtgccctgtaaactcgatgttcagtgctgctttccccacgtctgtgccccaacacctccacccttaactgcccttccagtcctgccctgccgtggagaagtggccaggtccagggttcaaacaagagacaacataacttctgcctaaccacgctgtacagaagagcccactgtatagaaaatgcctgccctggcagtgcagcctgtaaggaaaggcgccttggttatctaggaggtcccaagcttctctacaggcagaagtacagcccctgtttctaatccaccctttccaaaattgagacctgagaagttcttccctcccaagtttagagcggatccctcctttccctcaacggctctggcctaatttcttccctccccacaaaaagccacgggggtccagaaaaagagggtggtgctaggcaggcagtaggaagcgaagaggaaaagacataggaaagcagacctgagaaaccagggagggtgcggaagaaactagaaggagggagggcgcagcaagcggttgtccagagggcgttaggaacgcgagaaggggaaaagaaactagggcgtctcagaacctagggcgtctcaaaacctagggtgtcagttaaagggggggggattccttaagggagttgggaaggagcagagggaaagggcctgtggagaagcgcagagcgaacgaagatgcgcaggtttccacctggggagaagacgaagcaaagaagcagggacctgcctgcgtttgggtagaggcgagtaaaaaaattaaagcgtgtacatttcggcccgatgcaggagaaaggggtaaagtgcaaatgctccagaagcgggagaaaggagagtttctgtacccacgctccatacccgaggctgggcgagcggtgaaccctagcagtcgcggcgactggacacgggggttctactctttctgaaccgagacaagcccctgggccccgtgccccagagctacgatcctgctgcccctacctgcggcctggccgcgctctcacctgagccccctgcgccagctgctccgcctccggtccccgcgggcgctcccgctccaggtcccccgccgtcggcggcgcacactgaaccgaagacctcgtaggcgggcctcggggggatgatgccgttggcggcggccagcgccagcccctcggcagtgccgtagagcagctgcagctcgcgcgcctcgttctcctcctgcgcctgctgcctgcgcagcgccacctgcgccgccatgacacgctggcgctccgcgatgagcgtgcacttggcgcacaggcagtccttccagcgacagtagcgtttgtggcccttgagggccgacaccacgccatggttgcgacagcgcgcgcacttgggggtccgcgggtacttctcggctgcccgcagcaacagtggcggcccccgcagcaagccgcctgccacgctcaccggtagcgatgcagcggccgccgcggctgccgccaccgacgccaccgacgccacaggcggccccgtcgctgttgccgccgccgccgtcgccgcgccgggcacgctgggcagctccgagcgcagctccatgacaggacctgacgggaaagaaggtgggagaggggagagacctggtgaggagcacaccgcgcgctaggccaaagcgccgccttgaggaacccaagctggagagggaaatttgggccgcggaggctgggctagaggggccagaattgctgggaggaggtgcagtcggaacctccttgtgagccctagcaccttcaccccagtctggccatggctgctcttagacctgatatacacgctaggggtaagattttgtctgaattagtgattccgctggaaaaaataaagagacatgtaaagtgtgaaagtcactgattcagatggctgtaatgagaatttggaaaagttaagatgataccccaaagcttagcctaattggggtgagacgggtgagagaaatgctcgtttgacgggactgggattagagcgacagttttggcccagaagttaggctgatgccaagggcaaaacaggaaaacccggagcaaaacggtcagtttggtggaagggtgaagaggagagagatgtgaaggcgcagatgtgaaggccggttgggccggagttttgtttctttttgtttgtttatttttaatgcagtttggggcagaagctttggagagaaaaatcaacaacagaaagaatagctttaggaagcagagtgaggacgaggaaacaacttgggcaaagttaggcccagtggctctgggacccgtaaaaatgtgagcgccaaaagttccacggtgagggcctccagagagtgagagacaaaatgtatgtggaatttagcttaggactgggaagtattaaagagaaaaattcggccaaagaaactttctgtataggcaaacccagcccaaagatgagcttcatgggcaaggaaaacagtgaaaagcagctgatctgggtgtccgggatccaggggccgcgcctgggagaggggaatgtgtaagaaaaaaccccacaggcaaatgctgggggaggggattgggtaaaacctgtggtgcagttttttagcttcgcagtctggagtagtagtcggggcggaagacgtatcctgcgaaaagttaggcatttcgggagggggatctttctcgaagaccacctcacactgccctcccctcccctccgggtttagggacagagtcgtcagacacgccctccccgtcttggggtcccaggggacccctctcgagcgcaggctcctgcgttctgatctcagagttggggtcctaggacacggatggcccagcaggccgcaccaagccaggggagtcgccttcgcaactggccataaacggacaccagagtccctcccacgccgcagccccataaggcccaagcaggcccagctccccgcttctgccgcggtctcctctgcttcccgcgttccccgtccctgccagagcccgcgacagagtccttgtgtctccgtccgagagtcccagacctcctctctatgagcgttgcctcctctcccagacccttcgggcgtccctaaggcccacggggcccaggcctcctcaacaggggccgcagaccaggtctccacccactgctctccctgcggccctcaactacctgccttgggctccgggatcctcctcctccgctggcgctgcacgcgcctcccggctccactggcgacgctggagctcttggccgcttccctttgcccccggccccttatctgaccacgtcaccctccttcagtcaccatgtccgaacttccggacccctcagaacgcagcgcagtccaaccctcccttcagaaatccgggtcggaggctcgtctgcgggccgcgtggttggaacccgcgacctgactctcgccgtgccgggtcccctcgcggtgcgcgccggacgctgcgcgcagccggggcccagttgcccggcgctgccagactctcaatgagccgctcgcccgctctattgttggtccttagggctccattagacagaattggacaacaatgtggcgcctgccattggccaggggaggcagacggcgctctgattggccgggcccgcgcccggggagccccgcattctgcagtgtccgaaagattcgaaactccaaaagctccactgcgtgcctctgggaggggagggggcgcgccaggaaaggagtggaaaaaagtgggcgaggaggagcgttgaaaatttcctgacaagtagtttccgtgcgcccgagagcgtgtgaattgctcctaattaccgtgtccggtgcgcctctctgcgtagacttgtgtaacctctcggcttctggggcgccggctcggctgcaccgctcttactggcctggggcgcttggcaaagccgagcttcccaagtggctctggagccctgaggcgggatggggggcaggtgacaattcaattactgcggtcggggtaggggcgggacaagggtgcgggggtggggaagggagggtgttcaaggcataaatgccaggacgatttttcctgccttcttcctgctatgtttcggcgcgctcccaaatccgacgagtttggggtagttgggggctgctttggttttttcctcctgtctccttaaagctcagttactttattttaaaagtcctgatacgatagtcatcctggagggtaagtgtggtttatgaagattttcgtgtttaaagagaagctcagcgaagagaaatgagattgcacttcctgtcggtgcccgccacgtccctcgcgccctgagcctttcctctccccgcccctcttttcgcgtccctcagccccttttgagctctcttttcctcacttttcagcatctcgatttcttttccgtggtggtgggattctttttgtcgttattgcaaatgaacaaatagcccccccccctttttttttcttttctaaacgaaagtaaaaagtggcctctgtgtctccgcagattctcttaaactcaggacgcgcatcggtctgtccgaccttcccggcaagagacaaagtcactgctgggaggccccctcggacagttttcagttttaactttcgccttattctcgtcttgtcttgatgtcacggccctgaggaacagctcgttctgcagaagaggtaacaggtttcagattttgtttcctttttgaaaggctgttgcctttcaaacatctggaattaatgccgcggccctcgggcgagtcgccctcggtttctgtagctctgattttatctctgtgtcttttcccctctaatttctaaagttctgtttttccctctaattctgtttttccctctaatttctaatgttctgtcactctcgtttttgttctctacttttctctctctccttcagaataaagaaaattcgtttaaataatgaggaaaatgagcgttcctgtcgttctccctccactcttgaccgtgcgtctctgcgttgctctttcgaacctccaggccggcgggaatctgggcgcgcagactcggcccgggtcgtcgcggcctcaggacgcagcccattccgcctggcacgactactgggccgcgtcttgtcagtctatcagcttctgagcccaggaatgggggtgggggaaggacggtgcgactaacgggcccccacccgaagaccgcagaacctggcgccccggaagagccctggaagatgcccaccgggaggctgaggctggagggaggagtgggtgggggtgattcgctggaggaccgggcggagagcttccagaaagttcaccaggccccggcgcgagggcgctccgacacggacaaggtctatgatagcgataaaaagctggttactcgctcccagaaaatgccacttgctggagtctgtgaatgggtttaggagagagaagggtgtcagcccccgcgagggtctcccgcgtgaagtgaggataagggagtgcttcagggataatatgtcctctaggagcgcaggacccagaccccaccttccaacacctggaggttccgaggccaagtatgtctagccccggctgcacctgggtaggtgagccatggggtcgggggaagagcgccgacaaccgccggattccgcgcaggggccgccaggcgcctgctcccagagctcctttggacaaagttttcgggaaattctattaaaccgaaaacgaaataaactatacaaatctgcctagcttttgagggggcggtggcccaggtatccttctcgcttgaggccaggtcaccgtgagatttccccactccggaccggggatcccgcagaagccaagggtgtagccacgaggactcgggaacccgaggcggcccagcagatgcg

SEQ ID NO: 5350 - DNA, 824 bp, Homo sapiens
  source 1..824: mol_type = unassigned DNA
acgcggactgagcgaggaaatgctcaagaccacaggactgaaccccccggaagtctcgacgctgcccagccagccagagtccagtcgtcgacgcggatgaagttgtttccccgggacaggaagggttaaatggctgcgcgtcaactcggcctcgactggggtgtcagggagcaagagccgcttgtctcgggggattccgcttggggggttcccaggggtcgccctggcgctccggccacaacttgggcggctctgtgcggcggccctcgcctgcgcctttgcgcgccacccaaaactttgcgcacactgcagccgccgccttcccgctcttcgcggtgagacgcgcgccgccaagtgccgcaggcagccctccacagccgccgcggcagccgctgcctggcttctggctccagacttttcccccactgcctccagttcccacccaggaggctccctcgcggccgcgagagctcggcgcccgacccacagtaggcagtgcgggcacagtgttgcagaccaccacctcgccaggtccgggcagcgcccactagacggacaggcgcccgcggccgcccctaccccggcgcgcccacctcgagcctctcacgccgcggcgggcgggcgcaacatattctcctacctccagccgccgaggaccacactctccgctcagccctctcgactcatcctccggctgcagtagagggcgagcgggctccgcttttgttccctggggctggcaggtccgtgtggggccagggcgcgcgggagacgccgcggagctgggtatcccggagaggggatgctcactcctagcggctccg

SEQ ID NO: 5351 - DNA, 824 bp, Homo sapiens; identical to SEQ ID NO: 5350
  source 1..824: mol_type = unassigned DNA

SEQ ID NO: 5352 - DNA, 1415 bp, Homo sapiens
  source 1..1415: mol_type = unassigned DNA
ccgcgctgccagaagccgacgctagcgagggaggtgtgaagagttggccagaatgaccaactcctcctccacatccacctcctccaccaccggtggctcgctgctgctgctctgcgaggaagaggagtcgtgggcgggccggcgcatcccggtgtcactcctgtattcgggcctggccatcgggggcacgctggccaacggcatggtcatctatctcgtgtcgtccttccgaaagctgcagaccaccagcaacgccttcatcgtgaacggctgcgccgccgacctcagcgtctgcgccctctggatgccgcaggaggcggtgctcgggctcctgcccaccggctctgcggagccccccgcagactgggacggcgctgggggcagctaccgcctgctacggggtgggctgctgggcctcggactcacggtgtccctcctctcccactgcctcgtggccctgaaccgctacctgctcatcacccgggcgcccgccacctaccaggcgctgtaccagaggcgccacacggcgggcatgctggcgctgtcctgggcgctcgccctgggcctcgtgctgctgctcccgccctgggcaccgcggcccggcgccgcgccaccgcgagtccactacccggcgctgctggccgccgcggcgctgctggcgcagacagctctgctgctgcactgctacctgggcatcgtgcgccgcgtgcgtgtcagcgtcaagcgggtcagcgtgctcaacttccacctgctgcaccagttgcccggctgcgccgccgccgccgccgccttcccgggcgcccagcacgcgccgggccccggtggcgccgcgcacccggcgcaggcccagcccctgccgcccgcgctgcacccgcggcgggcacagcggcgtctcagcggcctgtcggtgctgctgctctgctgcgtcttcctgctggccacgcagccactggtgtgggtgagcctggccagcggcttctcgctgccggtgccctggggagtgcaggcggccagctggctcctgtgctgcgccctgtccgcgctcaatccgctgctctacacgtggaggaacgaggagttccgccgctccgtgcgctcagtcctgccgggcgtcggcgacgcggcggccgctgccgttgccgccacagccgtgcccgcagtgtcccaggcgcaactgggcacccgcgccgcgggccagcactggtaacctagccggggcccgagggaagcggagatccccggcttccgacgtccttgggcaccgtcgcctccttccctcctagggcatcccctgcctgaacgaagacttccgccgcgaagcccgatagatcgggggaaaatggggccttcgaccccagcgggctacctgaaccaaggcgtctctttaagtggggcgcccgaagtcattttggacg

SEQ ID NO: 5353 - DNA, 1415 bp, Homo sapiens; identical to SEQ ID NO: 5352
  source 1..1415: mol_type = unassigned DNA

SEQ ID NO: 5354 - DNA, 3039 bp, Homo sapiens
  source 1..3039: mol_type = unassigned DNA
ccgcgggaccagccttggctttcacatttcgctgcagccttgtcccgcgccgcactgtttcctccggccactgtggggtcactaagcgacctgcagaactcgctgaggcccaggctcctgcagctcccgccgaagactcaaagccagagtggacataaacgccgtgggcaggaccccggtgaggcctcggtgcccttcttgggggttctcagcgttggcccagaagcctcagcccgggtctaagaacttgggactctcctcgactttggcgatcggccgggtcatccggctcagggcctcagcggcagcgggcaaaactctagtaggagtctcttgccgagggcgtgtttcgacgtcagagccaaactcgggacagactagccaagcgcggacggcgcgagagtggctggcagcgccagcacgcagcctgggttcagagcaaggctgggcgctctcagcaaagggcggcctggggctgcgcgggcggcggactgcaggcgggagaagagcgaggtgcgccaggctctggggcgcgcaactgcccagcctcgtgaaagatcgcgccgcagatggggcgcagctgcgcgctcactcgtgtggactggaaacgctccgagccggttattttaaaaaccgggaaataaggcgggttccctcttcgcccgccacttcccaccaagtaggctgtgcggccctgggggctgactgtcctcaagcagccaggctccaccgcgcgccgcgctgcgccgaggtccgctctgccgcagggacgctggcagcccgttgaacaccggcaagagcgccagaggctagcggccgccaggatctctaccaggctctgctcgcacccgcctgcctccctttcgtttggcctgtcctccgttcaactgaaatcgttaattttcttacccccttgttctcattttgatatattctacgctttaaacatgctccgttttcttttgtttagtctgctccctccctctttgtcctttcccccttctctagttatccgtttcgttcgatcttgctcctgctttttttattcgttcgttcctcatttattcattttagttcatcccagctcgccgactgccatttaccctctcgttctcgccgcgctctccgttgttttgttcaatttcccttccccttttcttggttgtcgctcgctttctttggttttctttctcggtatttcgttgtcaaggccacccttgccgtcggatcccggggtgctgggtttctcccggccgctcgttccgcaccagcgctctctgcagttcgcgcggcaccggtgtggtccgggggcccgagctgtcggtgccggatgcggcgcgcctagcagggacgcgggcctgggggggtggctcctgcccgacgcggagcgctgagccaggccgggtacctgtctctggcggtgctcaccgcactgcgcggcctctgccgtctggctgggatcagaggagccaggccaactgcttctcattaagtcccaactgtggtttttatcaggaaagcctctttcaaagggcacagacacgaagctccgcggactcgttcatttcctccgttgacccacacacacctccccgccctcccctacacattcccaccgccccggctgggcgaaagccggagatgcccggccactccgtggaggcccgcgaggcgccagccgggcggcggcagggggttgaggcggatcttggaggatccagttctgggcctaggctgcgggatatggcagcgcagataaggtgggtgcagtgcggaagccgagacgccttacaggtcatagggtgcggcggacggccgcagagctgccgatcagcctgccaggcccctgccttcaggcgcattctcggatgccggcgcggtccagccggccttagcacagggcaccggcccgtgagcccgcggcgccagggggttaggctgcccagggctgctcctgactgcccagcggtgatgatccagcgcggggaagccaagactgccagaagggcggctatcatagtgcataacggcagggaggccagcttagtatgagaaataagaatacagttattccgtcttgaggacagccctggcattgcacgaccagtcgcggccagactgtgccagtctgccgcacaggcagcacccttcctgtgaaggctaggcccggggaggagagacgggccaagaccaggccgcagtccccagccgaccccgatttgaccactctaggttgaggcccagcctcagggccctcaaagggcgccagacacaaaagccgcgcttcttcgtcaggtctcagtgtggctccacagccctcggccgggtctgggcttcagggtaggtggcagttccagtccaacttcggcagagcatgctctctccttcccaggtccaactgctttcgggccccgactggactccgggccgtcgccactgcaccttccctcgacctcccgccttccattcccgccgccgaggaacggtggttcaccctcccgccccacactggcctttgcctggcccgggccagcgccaacccggcttccgtggaagccgtggcgaaaggcgagaggggcaaaaagttgagaaataggcgagcgggagagataagcaggaaggcccgggtgggcccgggtaaggaagaagaagagagggtcgggctgcgcgctacgccccgcgccgcgcgttaccttccgcggggccctcgtagaagtggccgccgttgagggccgggccgggcccgaggtcctgcaggtacttggcgggcggcttggccggctctgggaggtagggctccaggggcccgcaggccggaaagcgggtcagccgcgggccgcggggcggcgcggggtgcaggtgaggcgcagcggcgggggttccctgcgggcccggaggctcgtcccccgaggccacataggggccgggtgcaggccccacgcggaaaggcgcgcagtgctcggggtccatgccggctcagggcgcacaggcctccggggctccggggctcgcgctgcccgcgccgcctgtgagcgcccg

SEQ ID NO: 5355 - DNA, 1277 bp, Homo sapiens
  source 1..1277: mol_type = unassigned DNA
ccgccccacgcccaccctctccgcctacgtcggccatcagagcctcgctcgctgcccgagagcctcgcattgacgccggcccgcgcgtgagtcaagcctgcgtcacggcgccccgccgccagggtggcctttcggaaagcgagggaacagtgcgcgcagcgctccgcccagctccgttctgctccgcagagccggcgctgccagggcgcagggagggcggcactcggccccagtcttcgcaatcccgcgcgctctctccgccgtgggacctgggtccccgcgccgctcccctgagccccgagcgcgcggcgggcgggagccaggttgggactggtggtgaggcagggagtgaggagcgagcggagtcgcgtgcgccggcgcgcagctccgggtcgccccagccccagccgggggcctgtggcccgggggaggagctgtgcgtccgcgacccgtcggggatcgcagctgctcggccggagtgcacgggccgagtctgcgcgactacccacgcgtgacaggtgagtcgctggccgcgccccgcctggctttaccgggccggccactgcaactttccctgttctggccccgccccagccagggagggctgaggaccaaggtgtgaggcggcgctgcccccgcatccgcccgaccctgcgctcgtcccgggctcctctcgccgctccagccgccgttgcctggcgacggagccccggggcccgctctccttcgcgcatcggggtccccagcggcgtacgcacgggttggacaccgggcttcagcttctggtgctcagaagggcccaagaactccggaggaaattgggcttagctgcggaggcaagcgcccgcggagaaccggagggggcctgtccggcccatccgcggcttgaaactgcgcgcccagggcgcagttccactgggagcctcttacgcagctggagaccccagccccagccgctcggcctcaggcctgtgaccttgacagtaacattggcaagcgaagcagaactgtcacgcccgagatgaatatttaattctcagtcctggggctggtcctcgctggattcggagctagcagagagcccttcctccctcgtgggaagcgcatctggggaacggaatggctgagacaggggacgtgcgtgtggtgcccatctggagggggcgccgtcctggcgggtcgagaggcctctgctgcatttatgcctgtgtgcgccgtgctctgaagcgatgctggatgctcgcagtactatgggtgggccgctccccaggggcgcg

SEQ ID NO: 5356 - DNA, 2394 bp, Homo sapiens
  source 1..2394: mol_type = unassigned DNA
gcggcccggcctgggctgctccggtgcagcgcgccccgcacctggcctcgccggctcatctccggagaaactccttctgccctgtcgtggtccacagggttgacttttcggtattcgaaacgccagcagctctgggagcccagcggagagtcggagtcactctggggccagtgacgcctcccgctgacaagaatcccaaagttgcctcagcttcctcctctccttttcttcccgcgcccaaccctgacatcaccacccctccatcccccaggtatcttcctaaagccgtgtcgggactgcaacccgcccttcgatccagctggggccgggccccacttagccagtcaaggggcgagccagcgatgcgaacaccggtctggggggcacgactcccgcctacgttccccgcaggcgcgcaggggacccaaccccacacattttattctcgaactacgaggaaaaatactctattttttaaaaaaataacttgcttcctatacaaatcgctatttaaaaatatacaaataaggcccaagcataaaatctaactctggggctggcggtggagggaaggtgagggagggggctctggcacacgtccctcgtgtgtgcttgcgcgacggctgatgagggcgcgccagggaccctggcgcccaaggagatggggctgcagggaggcggacggagagcgttccaggcgttcggctccggccctgctccaatcgcagagcgcgctccaaagtcgagggtagccccaggtgccgccctgcggcctcaccagttccaggagaccagggcgggggatgctaagtgctggtaggcggggaagaggccaagcgccgagccgggaccgaaggcagggtagcccggcagagggcaggcggcggctggaggggcgccgcacttctcctgggccgcggcggttcccacctcgccaccgccgccgccgccgcacggctgcccgtcgcgaacaagcaccggcaccaccacgcgacgcagcaggccgggcgcggcgtgcagctcggcggatgctgccaggtcaggcgactccgccgcccctggagcgcgagcgcgcttcagcttgtagcgatgattctggaaccagatcttgacctgcgtgggcgtgaggcgaagcaggctcgccagctgctcgcgctcgggcgcagacaggtaccgctgctgccggaagcgccgctccaactccagcgtctgcgccttggagaatagcacccgccgcttcttccttttctcggcgtccgagcccggagacgcgggcctagcggacggccgctgcgacgagtctggcgggctggtctccaggctgctctcgtccgaggctagggacagcaaaggagacacgggtgggtgagacgccggaccctacgagggcctgctgcccttctggcgcgggcgtggaggcactggccagagggcacgcccactagcccgagactttcgggatgaggccatttcctgagtccacatctggacatccacctctccgaatgcggtgacctcattcataccacagcggtcatcagcgggcctgagatcgtgccccgaaaaaacccaccccggggccctcttaacatgtccgcaccggtagttgcgctggccgaccagtttatcacaagctgggtcaccagcgccggcctcctccaggtcgactgcactgcagtgtgccgaggtttgcggagccctgagtgggaacggggtgggggtaaactcgccaacactggccatcccagacggaggcctggagatcgtggccgtgttttcaggcatggagagggggcggggggtggggtgggggcggcaggtggcggcgcgttttaaatttcaattattccgacctctagaaatcgtcagacacagaaaccccaaatctcggagcaccagtgccaggcagggatctgctcttaggatgtgccgaccgggatgaatgcgttaggggttcgaggacagggctcccgtttccaagactgaggaaatctagactctgggctgggatttcggctttccggcccctcgtgggctgggcccttgattctgctgccccacgcctcctacctcccaccccgcaccgcaatccaccacgcacttacaagggtagtggccgcgctccgaatccagccaggcggcgcaggggtcgggctggggggcgcgtggttctggctcccgcctcggcaggtgttgcgcgtcctgctcgggtaaatctagaaggctgcgcacggtgaagctcaggcgtccagaggtggccatggccgaggaggggaaggaggcgggggcagggcaggctgggaacggaggggcggccgggacgccgctcctacggatgggcgtgggaggcgctcgccatgcgctggcagccgggatattagcgcatttacagcg

SEQ ID NO: 5357 - DNA, 1627 bp, Homo sapiens
  source 1..1627: mol_type = unassigned DNA
tcgtggggccacggccacgctgccctgcgtcctgggcaccacgcctcccagctacaaggtgcgctggagcaaggtggagcctggggagctccgggaaacgctgatcctcatcaccaacggactgcacgcccgggggtatgggcccctgggagggcgcgccaggatgcggagggggcatcgactagacgcctccctggtcatcgcgggcgtgcgcctggaggacgagggccggtaccgctgcgagctcatcaacggcatcgaggacgagagcgtggcgctgaccttgagcttggagggtgaggcccttccgctcccgccccattcctgtgtagcagcgggtccgcctcgcctgggtctcccagggctccttcccagtatctcctccgcacccctggggaccccagctccctctcccaggccgcgccgcccttcctccccctccgctcccatccgctggccctccccaggatccccgccaccccctaggtgtggtgtttccgtaccaacccagccggggccggtaccagttcaattactacgaggcgaagcaggcgtgcgaggagcaggacggacgcctggccacctactcccagctctaccagggtgagcggccgaacccagcacttcccaagccccgcggagctgtctcaggggcccgagagagggcgccaggcgagctcagtctggctcctgcctatgacgcctcttatccccgacctccgccgtctcccgccagcttggaccgagggtctggactggtgtaacgcgggctggctgctcgagggctccgtgcgctaccctgtgctcaccgcacgcgccccgtgcggcggccgaggccggcccgggatccgcagctacggaccccgcgaccggatgcgcgaccgctacgacgccttctgcttcacctccgcgctggcgggtgaggcgcgggacgaaggcagggtcttggggaggggtctgaaaaatgtgggggacgaggagtggacctcagcttgagatcagggcagggtctccgggtccctccaaggcaccgcccccccatcagcccgcccgcccgcccaggctccagctcacctctccaaaccctccctgcacttttgcctcgatcccccaactcctcttacccaagctcgatccagcacctctgcggtcccgcaccccaactccgcctcctgggtgtcagccgcccctctccgcccaccctgccctcggtcggtgacccgctgtggtccccaggccaagtgttcttcgtgcccgggcggctgacgctgtctgaagcccacgcggcgtgccggcgacgcggcgccgtggtggccaaggttgggcacctctacgccgcctggaagttttcggggctagaccagtgcgacggcggctggctggctgacggcagtgtgcgcttcccaatcaccacgccgaggccgcgctgcggggggctcccggatcccggagtgcgcagtttcggcttccccaggccccaacaggcagcctatgggacctactgctacgccgagaattaggcgcccaccgtgtcccctccagcgcgcgcgaagaagcttgggagtcgtggcgggggtctctcgccacccctttccggagagcctcccctccctccagacccggagcg

SEQ ID NO: 5358 - DNA, 271 bp, Homo sapiens
  source 1..271: mol_type = unassigned DNA
ccgctcggtggctgccgcggcctcctccgcgctgctctccacgcctggcttattatgcacgaggcaggcaatttgccttcctccccggggacccatctcggagacaagaaggtagtttgttctctgtaatggcttctgctggagtgcggcggggcccaggcgcgagcgggggcacgggcggggagttggcagcgaaggatgcgcccggcgccccccggcggccgcccggagcccgaggtcggcgcgggaggagcgctgactccgcgggccg

SEQ ID NO: 5359 - DNA, 884 bp, Homo sapiens
  source 1..884: mol_type = unassigned DNA
acgccggttgtgaaacctactgaagtgagcggcggcgccaggattcctgggaccccgacctctttgcagctcgcacagctaagggcgagggcgcccttcggcagaagcagcaaaccgccggcaagcccagcgaggagggctgccggggtctgggcttgggaattggctggcacccagcggaaagggacgtgagctgagcggcgggggagaagagtgcgcaggtcagagggcggcgcgcagcggcgctccgcgaggtccccacgccgggcgatatggggtgcctgctgtttctgctgctctgggcgctcctccaggcttggggaagcgctgaaggtgggtggaacgagggcgcttgagtgcactcgcgggagggcggagagagggagctgggtagggacggggagggcaacgcctgatggggactggtgagacccgggacgcactggcgcgatctaggtagaaaactcgctgctccctggctccggggagaggcagcgcggcacagagttcgctggcatcagccgcctcctgaagctcatctcctcttgtttctttcttccttctctttatgctggctgctctcccggccacttgctacacgcctccaatcttcattctctcccagtcccgcaaaggcttttccccctccgctgcctccagatctcgtccttcgccaatagcagctggacgcgcaccgacggcttggcgtggctgggggagctgcagacgcacagctggagcaacgactcggacaccgtccgctctctgaagccttggtcccagggcacgttcagcgaccagcagtgggagacgctgcagcatatatttcgggtttatcgaagcagcttcaccagggacgtgaaggaattcgccaaaatgctacg

SEQ ID NO: 5360 - DNA, 1007 bp, Homo sapiens
  source 1..1007: mol_type = unassigned DNA
gcgacggtgtccgtgcgtttcttcactagtgcatgtgcgaggagggctggaggcatgagcgaaagagggaaggcaatctcggtctccaaaaaatccaggggactctccctttcagcacaagcgctcacacgtgcgctcgcgcggacacacacacacacactcacactcacacacaaataaatccccagcacctgcctcggaaagccctctctcgcaggctggcccgaaggcgcggctccgccagcggagagcctttggatttaccgtggcattacttttaattaactctgcggcgcggcgcggggagcgcagggtgggccctaatcccgggcccgcctgacgtcacctgggaacgcgcggcggcgcggggcggcgcggacccgggacgacctcgccgcgacctggcctcgcctccgcccgcgcggggctttgctccgcgggaattaaaggaaggagaaatgttagtacacttttaattggaaaccgagttcttctttcagagcggcttgtttactcaggattgggcattagaactcaggggaggctctaattgaagtgacggctttggagattatggggaacatatggccctaccgccgggctctttatctgcattttctcataaaactgccgtccgtgtgtgtttctgcgcctggcctcttgcatttctaaggggcctttgaagacagggccgaatgcgcgcgggggcttcaggcactttgcgctccacggcgggtcccgcagcccggcccgagccggccctggaagcttcgccctggactagactggcaccgacgccgcccccagcctgagcgctgagagggaaaacgagagctagaaaggaaagaaatcggactggtgactgcctggcaggggtgtaattcaaactgttgtgagcagacggcaggagggagttgccaaggtaacgggtgattcccacccgccgccctttcgctaaggctggggagagggaagcctccgcgtgctgggttagggccaagcccgcg

SEQ ID NO: 5361 - DNA, 2191 bp, Homo sapiens
  source 1..2191: mol_type = unassigned DNA
ccggacgcgaccgcccgtagcctgcggcccctggcggttgaggagccgcggcgatccttggtcttcaccgcagcagccaagcccggcgcgcaccaaccggcgctgctgaaagttggagagctcccagctcgccgatagaattcggcggtgggcgccaggggaatcccttccagtgccgcaattaggaaagttttaaaaagtaaggaccctagacagacaagagatccatcctttcctttagcataagaaacaccccgcgccgcgccagccgaacgctgctcgcacaaggctatccgcccttcttggccgggacgcactcggtgccttccagctccccaccagaactggtccagggggcgcggaaacagagaggcaactgtgtccggcttgtggttccagacggaaacgcctccgggctccctggcccgggggacaagggttcgaaacttcaacagtcgcgagggcaaggacagaactaccaactcccgctcggatgcccgggacctgctcttccaagcccgctccggtttctccaaaggacgcgcggcacagcccatgcgcccccggcactccactccactcctctatggtttcccccaaactcttcccggggagccccacaaagcacagacggcgccctgaaactcgccaggcactcgccagccatccccacctccgcctctcgaaccctccttgtcgcgttcttcccgccccgcacctttctcctcgcgtttctgggaagtcagaagcaaaccacgagaaaatgccttcgcaaggagcctccctacacccgccctgtcactgaaacaaaagcgtagggaggagggaggtgggagaggaggcgggaggaaggtttagaaagacgatggggacagcagtaggaaggagctggggaggggggtcaaggtggcaagcagagctgggggcccagagtccgctcccgtgccgcgcggcgagtcgcttacatgcccaggtcgctgtaggtgttgaagaactccatctgattgcacgcctgaatccagcccaccacccaggtctcgtggcgggggatggggggcatgaccacgcgggcggaggctttgaagtagggggtcttgtagcgcaggacgatgggcgaggtctcctcgatgcgcgtggggcactggtcgatggtggcgcacacatcgtacaccacgatgttctcgcgccggatccgcgccttgcaggtgatgctttggatacagcccatcctgcagcccggtgccggcacggcgcggcgtggggcagcgcgggggcccgcgcgggcagccgggggcgcccgtcacgccggcatggcgacgcgccgctcgctcccggtcagactcagctcgcacctaggagcggggagccgccgggcatccttggggaagccccctcctcttgcagccgcgcggggtccccgctgccccgacgtccgcccacgcccgccccctcgctccggcagggcgcgcggagggtgcactcctaggaggcggcgggtgccctcgccggctccagcgcccgggcggagggcagggaggggagcggcgctgcgaggaatggtgcccaccccgggccggagccccccgcccctcgccggagaggaggaggcggcagcggcggcggcatggagccgggggagggcggcggtggcagcgcccggtctgtctgcctccgcggcggcagcagcagcagccgccgccgccgccgccgctgcatgaacctctgcaccacggctgccccccgcgtgcagcgcacccagcggcgggcgagcgggcggcccaagaggcaggcggaggcagcagcggcggcggcggcgaccggagctcccgccggccccgccccgtagccggaccacaccgacactcctcggcccggctgcctcggcccggggggcgccaggaggctgtggcccggggtggagagccccaacggctggagcagcacaggacgtgctccgcggaggaaactggctgtacgccatgagttttgtccctattcggctgccgtccgggtggggggggggtaatgtgtaagggtgggggtgtttaaagggccgctagcgccggggtggggccccgcacgtggggctgaggcggggcggggccctggtaggtggtgccctggggtgggggtgggggactagggcgggcccaagcgccaccgggtgggtgaggccgagcagggcgcggcg

SEQ ID NO: 5362 - DNA, 859 bp, Homo sapiens
  source 1..859: mol_type = unassigned DNA
acgcagaggccgtggcatctggccgcagctgggctgcagtgcgtgcgcgcctggcctggtggtccgatgggaagcccggggcggggcagccgcggggcgggggcggggcgtcgcggagataggccacgcccctgcccgcccgcgcaggcgcgctgcgggtcgttagctgtcagagccaagcggcgggctggcggcgggctccgacgtctgcgccaggacctggctggctgagcccggcgcagcagcagcagccagggcagcgcggcccctactccctgtcaggtcgtagaggcgagcagggaccagctggtcgccggcccctcgggcaagatggggaaccgggagatggaggagctgatcccgctggtgaaccgtctgcaggacgcgttttcggcgctgggacagagctgcctgctggagctgccgcagatcgccgtggtgggcggccagagcgccggcaagagctcggtgctcgagaacttcgtgggcaggtaagcgcgcagggcgcggagtaaggatgcggcagtggggcgaccccgctgcgggccgttggaacgtggacgggcagcgggagccagagggtggatggaccaggcgctgcggtggaatggggggcagagtggaatggggggcagagtggcggtgtccgtggggcgggcggggtcctccagctctgggcatcctccgtcccctgccaccccccgcctggtggccctcctgcctgcctttcatcgtgcgatacaaagccatttcctccctgtcctccagtcggggagtcgggggaggggtccgccccgggctcgacccccaccccctcggtgcgcgccagccccgggcagcctccctgcgtagcgcgccg

SEQ ID NO: 5363 - DNA, 791 bp, Homo sapiens
  source 1..791: mol_type = unassigned DNA
ccggggcacccgtgtgcgcgcgaggatttcttttgcagagaatgaaaccaccgttcctttccgtccgtggtctactccggggtccccatcccacgtaagtgctgtggaaccccggggtgatgagccccgggggaagccagcatctcttgccctccagtgccggcgcccggcagagccccgggactcctagtttttgccgccgctgaggacgcggcgcgggctgctggccgcgtcgccgagggagggcccggacagccctgcagcgcgtctcagcggagccctgggggccgcgccgctcctccaaacatgattcagaaccgcccgtcagccttggctccagcgcctggcgcgagcgaaccgggcttggctgtctcggccccgtctgaaccctgcgggccgcgggccagggcgcgccgggatccgctgcgccaggaccctgcagacccggccgcggccgggccgagtgcctcccgccggggccttacgcccacggtccacgcttgcaacaccagggctgtacggcgggtccgcagctgggtctgcgcctgggactcggggctccctgcgctcctcgtgccgcaccccttgccttaaccccaagcggacgggtcctggggcttcaccggccaggccggagccccagccccacaactccccccctcccaccgcactgccccctctgcgctgtggcgggagttggggactggggccggagaaaggagacgcgccggtcctcaagtctcttgagccatttcggttccgggcgcgccccccagggctgcagtcgcgcg

SEQ ID NO: 5364 - DNA, 586 bp, Homo sapiens
  source 1..586: mol_type = unassigned DNA
gcgaagaggagggagttccgaaaggagggaaacgagccggcaaggggcgacaggagcgagccgggaagggagagcagcggagggctgcagagctgcgggcgcccggaccgtgccacacaccccccgcggggcacggagggcattgcggggggagacacacaaagacatgcgaagaggggctgaacgaggctcgcgcacaaagacgccggggcgcacggcagctggggctgcacccaccgcccccgcgccgcgccgtgccggggccgggccagcgagcagcccggggctgagcgcgtggcggcggcggcggcggcggcggcggcgggcaggcgcgggacccgggtcgcccgcgctctccgggtgacccgggcccggcagcaggcgcgcgcgggggcggcggcgcccaagcccaacttggcctccgcctcgccctctgcccagcccgccggtgtcccctccttcccgcgatttcgtttcttctcacgctcccccccccgccccctcccgcgtccagccccgctctccccaccttgtaaaacaaagccggggaaaatgcctgcccgtgcagctcggagcgcgcagcccg

SEQ ID NO: 5365 - DNA, 1678 bp, Homo sapiens
  source 1..1678: mol_type = unassigned DNA
ccgataggcgaaactgcaagaaccgggaggggcggctgcggcgtttaggcgcgaggcacacaccatacccttccgcagcttcccacctcctccagacgcacgtgtttaaagagtccctgctccaaccggtcccgccccacctccgctcggcctccagccctgcttgtactgctggcttcaagtttcctccgagaggcgggcgtgcacagctgcagtggcggcggcagcggccaccaagcgcccggcggcgcttcgccacccacctttcctcagcccccggcgctgcagtctccgcccgccggggagggcgcgctcagcggaacaggagtcgagggtggggcgccgagaggagggaatcccgggtcgcaccgctacagttctcgcagtggcaaaggcggcggcggcggcggcggcagcggcagcagcaggtggagcgagctacagcgtttggcctgaaacccactgctgcagccacccgggctggagttggcccgttgggtggagccagtgctcgccccggtccgacccccggtttccgggacacttgggttgcggaggccggctggccggagtcacggttggggacgggcgcgcctcggagcgcacggctgcgctggaagccgcgtctggggcgcaggaccaacgggacctacctcctcccggctacctaaagactccttctctcgggaaagagcgctgcccggctctgggatttgggaggagctcggaggccgctcgggcacctcgctggacactatccgtttgcgccccggtggcgcgggagggtccggagcggagcgctcgtctctcctcagcggtttagtggagaaaagcagagagctcttcctggggcgaatgggacctcctccctcggtcctccgtggagtcgtcgcatcgcttgtcgtgttggtctcgaggggctcacagcttggcactaatttgcaggtgttcgctgctgatttggtttcttcttcgatttgcggacggttccctccagcgactctcgacacacgttttcctgtcttcgccggagggccgggtctggggtcgccggagcctgcgggaatccagcgcttattcgctgaccctcgagtcgcttcgctagctgtgcgccctcctgggcactagcctggagaggagcgtgcagacgcggctccttggagggagtgcggtcctctagggaggcatcgggctcctaggggcttcttggcgtgtgtggtgggattggggtccgccggccatggccttcactttcgctgcgttctgctacatgctgtctctggtgctgtgcgctgcgctcatcttcttcgccatctggcacgtgagtaacacgctttggtctctcttctttcgccccaatttcgctaaatttccccgatttcaccccactttttccaccttgcgggcgtgggcgaaccggaaggttggaccttctgccgctccactgtcccggggcaggaggcagttcgctgcatcccgccgggcgcgccttcggtgccctggctggaggcgaggggccgctggtgcccaggtaggacaccctctgcagggcccgactgggcgtcccgggtcccgggcgccggggagtggcggctacaaccacaactaaccccttcctctcccgccccgtcctctcctgccggcgggaggcgaaggagaagcgccgccgtcggtcccg

SEQ ID NO: 5366 - DNA, 1600 bp, Homo sapiens
  source 1..1600: mol_type = unassigned DNA
ccgacgacattgtcactggaaaagtgctggccacggcctccgccttaccctctccacccacgggttcggagcccccaggagcagtcagaccgatcaccgctcctgcagcctcatttgtttccggagagacacccacaagccagcccacggagagtctggactcgcccgccccagcacccacgcctcccccgcgcccggttccagcgccgcccccgacatccacccgcgggcagccccttaccgccggtatcctcgaagcgcgggggcgggcggtcccgcagcgctgcgctccagcccgcgccggcctcgtcctcctccggctcctgtgcgtccggggcgcggggcggtggcggggcggcccctgggggtcccgggggctcgcgctcgtcgtccgaggaggcggccgaggaggagcgcgaggcggccgaggtgctgtagaaggggttcccgccgctgtccgggccggactcgccgaacacgtcgtccgagatgtgcaggctctcgtagcgcgcgcgggcagcctcgagcagcgccggcgccctcctccgcgcgcccccgccgccctcggccatggccccggccgccgcccgcgcgcccgcccccacagtgcctcccagccgcacacgccgggccctgggcccgcgccgcggcccgccgccccccaccagcgcagcccgcagcacagcgcccgccgccccgtgcccggccggcccgccgtcttggccgcctcgggcccagcgcccggggaagcgccctcggagctcgggcgccgcaggctgcgggccgcggcgggaggcgagccgcgcgcggggctggcaggggcgacccagagcgggcgggacgcagaggctgcggccgagaccaggcgccgccgccgccaccgccgccaccaccgccaccaccgccgccgctgcgtctcctcggcgcccgccgcctccctgcccgccctctccacggcctccggcgctcggctgccgaccttcccgggcgcgagccgccagaggcgggccctgccgcccctcacctcccgcccgccggccaatggggagcccggcccggacagccgcgggggagctgggcgggcccggcgcggggaacgcccccaccctcctccgcggggcggggcggggcgcgcggccggggctggcggttagggggagggccgccggcggcagtgccggtctcctcctacagggacgcgcagcccgggaccgccacgcgcagcgcgggagggggagggcgggaccggggaacaggaggggagggggacccgggtgcttccagcggtccgggcccgcggacggagtgcgggccgatcccgctcactgtccccttccgcagtccgcgtgcagctccagggagctgtccgccccggtggttctgaaccaggcgccgccgaaacgctccaggtaggcggcgggcccgaggtcaccacacccgcggcggcggctgctgccgaggtttcctgggggtcactgccagctgcgccgcatgctcccataaatacaggggctgtccagcttctgggaatctcgctctaattaggagcccgcctcgccggtccactgttggtcgctggtcagatgctaactccgtctcg

SEQ ID NO: 5367 - DNA, 2394 bp, Homo sapiens; identical to SEQ ID NO: 5356
  source 1..2394: mol_type = unassigned DNA

SEQ ID NO: 5368 - DNA, 1160 bp, Homo sapiens
  source 1..1160: mol_type = unassigned DNA
gcgcgtccggtgccccaaggcttccaggcggagcgcgggcgcgaggtgcgggctccggggcggagcgcacgcccgggaggcgggaagtgggcagcagcgcccccgcctggcccctgtgcgccccgacccgacgcctccccgcccgaccaggtgcctcgagagcgcacagctgggagggctctcccggtcgcggcgagactcacgcctgcggtgtgctagggcggcggcgacggtgacgggcgtggggcgcggcgctgcctcggctgccgggtcgttgcggcgagcgcgcgggccggcctggagtcaccgggctgaaccgccgcgcctgcatcgtgccgcacgccgcggaggcgctcgggtacagaccgcgcgggcgcgcacaaagcggcccggggcggccggcgcggcgcagaccctcggtgggcagcgcactccagtcttcccaggctagcggctgcagggagctccggcccgcggcccctccgcctcaagtctgggagctgccggtcccactctgtctttgcctatggggattcgagagtttcccagcggcgcacccaggggcaagagcattgccgtgtgagtagcgccccgggcgtgggtgagcgagccggcgggcgggaggccggagcgccggggtagccctttgcagctgggacactgggcagtctgaggctcggggaagggcggcgcgcgcggtggagctgctcgggaagtttcagtcattctttccctcgccactcgccccaacccgcactgccccgagacgcccaggatagggcactggggacagctgcccggggaagtgggtgagtggcggcgggaagggaggagcgcgggctctgccgcggcgctcgcccccggagggccccggccgcgctcttgctctcgccctgggatctgctcctcacgaatcccctcctctctgtccatgctccccctgcccacccacctgcccgtggcgcctgcgaccgcagtggcatgaggaggtcaccggacgtcagcccccggagactgtccgacatcagcccccagctccggcagctcaagtacttggtggtggacgaggcgattaaggaggatctgaaatggtcgcgctccgtggaggatctcaccagcgggccggtggggctcacgtccatcgaggagcggatcctgcg

SEQ ID NO: 5369 - DNA, 588 bp, Homo sapiens
  source 1..588: mol_type = unassigned DNA
gcggggctgggcgtcccggggaggagggcggagcaggtgagctgcggggtgggagcagggagtgcacttgtacgtgacgttggagtttgcagcaacctccaagtaggaggctgtgcgcgcgtgtgtgtggagtggctgcgcggccggggaggatgtgcgctgcagggcggccgccgcagtgagcaacgcggcaaccggagcccggcgggcagccggggaggccgggactgagaggggcgagccgctggtgctccccggcggcagagggccgcgtcggccacgggcccgggagagacgcgctccagccggccccaggatgtaggcgatcggcggcagcgctcctgcaggcggccggctcatcatgaagaagcactcggcccgggtggccccgctcagcgcctgcaacagtccggtcctgacccttaccaaagtggaaggtaatgcgcggccgcctcgccccgggggtccctgcaccctagccggggaatgctgccaccctgaggggggctgtctggctgcggggcgccggggctgggggtactgctcccccaggacgcggctccgcagtgcagagcgccgccgcctgcg

SEQ ID NO: 5370 - DNA, 878 bp, Homo sapiens
  source 1..878: mol_type = unassigned DNA
gcgacccgcgactgcagccgtttcttaaggccagtccttcgctcgcagtctgtcccgggcggcagtcgtgtcagccccccgctaggacccgcccagggggacgtgggtaccgggcaggacgcgcgctctgggcgctggggacgcccgggacactcggggccccgccttgcgtcccagccccgggtcgcggcaccccggctcccgccccgcgcctctggagggaggtaccgagggacgcgcagcgaaggggctttgctaattgccaaagcaggaagtgagctcgtggaagaagcgaaggaggagaagaagaagggaggggaaggcggaggagggcaggggcgcgcagagccacggtttgctccaggcgcgtcggaaccgcaggacttttcatccccgtggtcccacggtcctcccgcgccccggaggcctgccagccccgctcggacgctcgtttgcccctaacccgccgccatggcttcaccggacgaccctctgcgcgcaggtaaagggacacagcgccgcgcccgctcctggagcgagcaccgcggggcgggagctcgggaggcgctcgcagcagccgcagggctatcgaggccgggcctcggcgacccccgagggaggcccgggaaccacccccgacccaggcgccagacccggagtcgcacggggctcccagtccagccccgcgagcggctgctgaccgcccctcccgcgctcgccagggcccctgccccgcgtcagccaccgcgcgccttccccctgcccatgccgcagcccccgtggcttttgttctggactcgggatgccaggttgagacacgtcctgcaaacctctggcagaaatgggcgcaagggggtggatttcgttttcgcctcccg

SEQ ID NO: 5371 - DNA, 561 bp, Homo sapiens
  source 1..561: mol_type = unassigned DNA
gcgcgggtccacgctggtcgctagcggcgccaactttactcattcgttaatttgctagtttttggactgagtaaaacagcccccaaagacgcgggcaaacgccgctctaaagcccactaccatgcaacgccaggttgctcggagccacgctggtggcacttccccttcgtgctcactctgcacaggcacctccagaaccccgtgcaaatgaaccctaccgggagacgcaggtgggcaggtcgggtcggcagggaccaagagcctgaaagggaacctgccctcccctccccgcagcccggtcattaaggcaagaaactgcaggcagagaagcccccgaatccgacctaggacgtcggcgcctgccaggatcccctcgcctgccccccgcgccccgcgcgcgctcatgccaccaccacggggagggtgcatgcggcaggtgcctggccgaggcccccgggagcgagtcgcccttacgtgctccagcttgtctttcctccgaagccagacgctggcgctgtagtcctgctgcttgacgctgctgtagaagttcgcgcccactcg

SEQ ID NO: 5372 - DNA, 1235 bp, Homo sapiens
  source 1..1235: mol_type = unassigned DNA
gcgatcgcagggcttcgcctatcccttcctccgggacagtttggatgggagtagctggcgcgagggctcgttcccccgtttttgggtaattcctttggcactgggagacgagatggcctccggagggtggaaggcagtgccagcccggccggccactggggactgcggggcccggagacgcgcggggtccccggggagctcctcgccgccctcgccccacttcgtccgggtccctcaaacatgtcgcagcgtggctgctcactgtcccctctgggcaagaggaggccccagacatttccacgggatctgaactcccgagcgccctgcacggagcagccatcccgccagcaccccaaagtgaagctgctcacaacggacaagcccggagaccccatgagaggccggggtggagaagccgggggtgaaggggggcaggggccggcgcgccacgcggtccttacctttccgcttggacctccgcctcctcctcctcttggacttgcatttgagttgactgctcagccctccagaccctctgccgctccccaggaccgaggccatggccgagacccaggcgcggagcccagagccgcctccctcctgcacctgcacctgcctccttcccggcagccgccgccgccgctgctgcgaagcttgaggttgcaaacccgggagcggctcacttttcaggactgagcaggaaagcgcgctccgtctctctgtctctcgaattgttctctatgacttgctcccactgggctgggggcctcggctgggcgcctggagcgagctgctccctggtcagggagggcggggaagggcgcgcggcgtcctgagtgctccgagcttcccgcgggctctgcctcctgctctgggctcccagcgcagggaggctacttttgcgcctctgctagttgtttggcaccagccactttgaagccaatcacgcagggagcttgtctatttgctgcagcagcgtctaattagatccaatcacaactgctttctggctctgacatcagcagcagcaccagccgcaccgccgcctggccgcttgcaaactcagctcccgtttggacggtgaagctcccaggaccggcggctggagggaggctgctcccggggaacaaggacgcggcgcgggtgcgtctgggagagaccgggggagcctccaggagggaccctgcccgggaggacgaggcctcctgccgcagcctcgcggacagctcagctcg

SEQ ID NO: 5373 - DNA, 5964 bp, Homo sapiens
  source 1..5964: mol_type = unassigned DNA
gcggcaaccgagccagatccaagaggggtcggcctcgtctaaattggtttcccaccaatggcctcggatcagccgcggctgtgctgcgggagccctcaggacgcggctggggttggtgcgcggggccccggaaccccaaacccggctcggttcggcaaggttcagggagacaaggtagagaaggctggggtgagcgagaagtcgggcggccgatcgtcagggccacgagcctcgccttgccttcttggaatcccacccaactttaaaggcccaaagatcctgaaaattccgaaagcgaaactgcgagctggtctccagaagtttgagaacggtctcccaggctttccagcgtcgtcccgggattctcggacaccacaaacgccatcaaccacgagcaccggtgtccgtggctattgccccgaatggtccccatccgcgtccccgggaactccctcggcttttcgcgcatccaggtccccagccccagctactggtgcgccccgagcccctaggtgccagagcggtggtcggccgggctcctgcccagtctcggctcctccctcctccccaccagaaggaaaaacttgggcccttcgagaaccctgtggaatgttctttgtaatcaactgtacatccgcttccacggcacggcctcgtgcaaaatcgcgggtttcggggccttggagcaaattgcgcttgtcagcggcgacgtcaggaggacaaggggaggggttcgcggctgaaactgcagcttcgcagcacagagccattttaggctgctccccacctcgcggggcccatgggaaagccggccccgggagggcgcgcccaaacgcaggctggaggagccacggacgcgtcctggccggcgtgtcgccatcgttcagcctcgctgcccaggtgggaggggtcacctgccgcggggtctccaagccagtgccgcttgctcccggcccccacccactgacagcacggcgtccgagtgaccctgtctagcctcgttctgcgctcctgcaaaccacgttgctgcgctaactacaaacctggccaacatgtctttgtaaccctatcatttaaaaacgcttccaggcacctggccgctgccagatcaggttcgcgggcccggaggaggtcctcccacctgcccccgccagccccggggaccgtgcgcggcctccgtgtggcccccgcccacgaggtccctcgggcaggaaccgccgcgcgacctctgttcagcggccgcgtcctggccacgggcgacccctgtcgggaaccctgttcccggctaagctgcgttcccgcattccggtggctctcacccgagctcgcgtttgctggctttccctctggctcctctgcctgaccccgattttgtctccgaactccactcccagatcctccccgccctggaacgccgacctttcccccgcacttcgccgcccactcacatcccccggcgactgcccggcctccatgcccgccaagacaagaagatgcccctctccgatgcgccgagagggttcctaagccgagcaagggacaatttcttccccaaacgctgtccccatcccccaccttccctagagcgcgaaacccaaaagtaaggaaggcaacccctcgcctcgaccctacgtgcttgtctcccagagccgcgcgctcccgcccttctgccccaccccaccaccaccaccaccactttggtcttctccaagcttcggtcccggtcccccacctcccaccccagagcggcgtggaggaaagcaggagcccactattaagtgcagcgcgccccctgcacacacgaaatccggctggcgtctgcagcccgattgcacccaatacccgggacagttagtccttttaataagcacctcctcgccccacctactcggggatctacccgcgcaggatccagcacacacaaggcgagagctagctcgtctcctagaaagacaaaataaatcactccctctgccctcatgtactttacaccacgtgtccgcagtttgtcacgtcaaatcatggcagggtctggttccaagacgcacacacacattcggggtggttctctttgacacacacacccaaaaaaactgcgcacacgcaggcctgcacactaatccacaggcacacacgacagttgcgtttcggtgccctggtccgggccaggggcacttctccatccctttcccccctagcaatggacttgacacacagactctaaccacggaaaaaaaaaaccggacagcccattccttctttttttccccacttaattcgctaaagcgcttcctggggtagccaaagagagtcgaaactaaggggtggaaacttcagctgggttttttcccacctcaaaacctttattttcagtttttaaaagccaccttagcccgccatattgaaactggcacggtttctaaagactccttccccgcagttgtggcgcttccaagaaaacacgagtacggatcaggctctggatgagtgtccggccaccgagaatcagccacttcccaccctccaggatcccccagctccctccagccccttcccaccgcccctggtcaaaatcaataaatacatctcgcagttcctacagttgcattttggcggatttctgcaaaacatacacacacatacacatacccacgcacgcatattaaaaaataaactccagaaccagctcaagtcagcaattttgaaagggggtcgaataagaggagacaaccggaaagcccctaagtgacaggatattactttaaagagaaaataatgaacaaaaagaccatcctcgctggagcacgctccaaaactactactgccaattttatttcagttgctcaggcaaatgtttccaagggagcgattccgaatgtctgcacgatttttacccccatgccggtctccgattccccgtcctcaccatctttttctcccacccaaaccaaaagaaaggggagaccccagcgcggaggagacgcgggagcgcggggtaggtagcagcggcggctgcgtcgctaaaatgagtgcagaaacgaggaaggtgggcggcgggaggggacaggctgcgcccggggaaggaggacactttgcaactccggacggactcccgcacggctcggcttttccgagcccggagacgcaggcgaaggggacccgggaagcaaaaatgacaacctggagcgcacagaggagtttgaagcttcgctcaagtgcagtcgctttcttctcctgcccttctctttcgctcccctgcaccctccccagccttcccccacccgccacctccaaccccagctccctcaggcttccttcctttttttttttttccttttttttcctaggctggaaaaagcccctgaccagcgcactcaacctgcgggccgaagggctgctctccggccagcctgggcgccggggacagcagccggcgcggcgtcctacctggtgaagttcgtcctgccctcggcgtggacccaggccccggtcgccgcccgggagggcaccggcctcgctcgcttgctcgctcgcccgcccttgcccgctcgctccccgcccgccgcctccctcgcgcgcccgctccggtcctccggctcccactacagctcattccaatatggcatcctctctgtgcgcatgctcggcgctcttttttttttttttttttttttttttttaagattttgtgtgtgtgtgtatgtgtgtgcgtgcgcgtgcagcgaactccttcaacgaccttttccagcgcttgcaaaatttcttaagccaattagcctgcgggacgtgatcggctccttccccagccagctccgcgccattccctgcgcctaagcaggcgggcacccccaggaccctgggaccttccacgcccacgcggcctcctccccaccgcgctccccttcctcctttttgtgagctccctccatacatgatctgcagaaagttcccatcgcgggcgtttccgcacacccctccgcaaggacaactgggcaaactcccgtttccctggctgcggttcgtgagctgggtttccaatggctcagtcgaccgtgtgcacaaacttgcgctttatccgccggggatcgctgggagcggagataaattcaatccccagggcaatcttggccccgcccgccccaccccatcctgtgcttaaatagagcctttcttgaagctgcgaacatttccaggccccttgggcagggctggaggggccgaggagagctattcgagggaaaggtgccccgaggggcaggaaattaagttggggctgcccgggcgagctgccaggtagccgtgctcgccacggcgtctcatggggcacctagctagtggcgggcctcatagggcgggaaaagaatcgtcgctcacaccccagcaaaacgtggccctcgacggtccgttggagagccccggcggccgtgagccccgggcagggctggacgtctgcggagccctcgggcactttgtcccgggcgcctggggaggaacgcggagctcccagggccttaggtgcaacggctgcgcagagcccaaacgaaatgtccccagtgcggaaaagccggtgacgccctggtagcaagaccaagagcttccgaagaacgctgcgcccttaactagggggcctcgcagagatgcctgtgtgggcctgcattgtatatttctgcgaaatagcgaatggacacgtttgctcagggtttttatggttgccaaagggggtaaaattacccagtcccccaaatctgtgtcccatgaatccctctcatagtacccctctccagggggccaagaggtcctccaggtccccgtgggttcgcagctccacccgcccttcctcgccctgcatccctaaggagaggtgtccgctctgaagggctaggggccagccatggagtgaggggaccggggctgaccacgcgcggcacagacagaggtcctcaggcgggccctctcctggacggtggggccggagctgatctagaagaaatacggagggacgtgccgagaagccgctctccttcgccgcgaccctggagagcgcctctccacccaaaggatctgccgagctgagagatccagggcgggcgtccgcagccgtgaggccccctgcgccgccagtatgggaagatcctgcctccttacaccttggagaacgctgggcgacgactaaagcgccttccgccggcctgtcactccatgtgacacaggagccacgtgagacccagaagagtccagcgactcgccgcgcggcgcactttaaactctagcctgagtctgcgacccctccagctctccagtccccagctgttggggacatcaagccggagccctgggctctctgccctgtgggtcgctgaaagcagagactcctcaaaccaaccgaaccgggcgcattaaccctctcgcctgcaccccgctgcctcccggttgagccccgaggcggctccaggtagaacctgctggactgactgcggcgtccagaaatctggagtgtgggctccagacactctccacggtttggccccgggtctcaacacccaagtcgcctcttctggctccttcaccacacagcggggcctgtggaaagggaggggccgagagacccgtcggcgcaccactgtcctcgaggggtccccaccctgtgcactgctgaagcgcagggcgcgccgcggcaggaatggccccgagtgcggatcccctgccctgagcctcccactcttggcccgcgctgcgcctacccagtggccctggccccgcagggcgacagcggctgctccctcccatttgcgtcccagaccgcgcggcctcgcttagctcccgggagccgacaggcgcttgccctggtgccagcgcagggcttcccgggggcttggggtaggggtaggggtgcgggggggaaggggagaacgtaatttccttctgcaggagtcgtggagacgtgagctgcaaccagccaccgcg

SEQ ID NO: 5374 - DNA, 5964 bp, Homo sapiens; identical to SEQ ID NO: 5373
  source 1..5964: mol_type = unassigned DNA

SEQ ID NO: 5375 - DNA, 5964 bp, Homo sapiens; identical to SEQ ID NO: 5373
  source 1..5964: mol_type = unassigned DNA

SEQ ID NO: 5376 - DNA, 703 bp, Homo sapiens
  source 1..703: mol_type = unassigned DNA
acgcgaaataaacgactccaggcccccagtaaagaagcagcggcgcgtcccttttccccggcccagcgtgaaaacacggaaggcgaagggctgccgtcagtcgcctccctgccaccgcgaccgggaaacaaagacacattaccttttattttttgcgcttccaagggatccgaggaacttctggctgcaagcggctggtaccccggaacgggcgtcccattcgcccgggcgaaggcccttggcctactaggcggccttggcgcccgcagctggcgagcccccgccccgtccccgccgccgcccccgccgcgggccctcggcgtcagcccatagcccgctcgcgcctctcgcgccgagcctggcccggcgccagtgagccccgccgccggcccgcccctcgcccgcgcccggcccgccgcatggtgcgcccagcgcgccccgagccagtccccggcgcgctgctaggtcgggtgctaggcggccaccgcgcgccaccgccgccgccaccgcccgccgcccgatcctggacaacaatgcgcgcccccgcccccccagaaagccagggacgcccccagtcgccgccagagctggctcggcttcccagcccctctccgtggcacccgcaggcgagacaaagttcgctcccggtgaggctgcgcgcgtccaaagcgtgcgggatgcccagcacggaggtccccaagcg

SEQ ID NO: 5377 - DNA, 1315 bp, Homo sapiens
  source 1..1315: mol_type = unassigned DNA
ccgcgccctcttcaaacacacgcacactcttacactcactcgcgccgtcccagcctgcctactcccaacgagtccaagccggtgcagccgcgccccatgcccggctcgcagctcccgagccccagtccgcccgcgctgggcgccgctgtacctgttagtggcgcgcggtaccgcggtcgccgggctccggagcgtcctcagcgctgcgggggtgccgtgggtggcctccctgctttcctccaccagaatcctgcacagccggggagaaaacttaagttgctacaccccgccgggagctgttggctgaaaggctgggagtcgcgctccttgcctggcagggagatctcgcactccccggctcccaggccaggtccccagccccagagttggaagagccttagggcgggaaggaagagacagcaaggaccagaatggggagcatgagatcctgatgcggaacccgacggcaggtcccgctccacagctgcctcgcccacagcgatgcgcgctagagcccccgcagccctgaccggtccctctgctccccagccgccgtccaccggtcggagggtcgcctccctgcgaccccctcccccactccactctcaggccgtcgccgcccgtgggctgctccccgccgcggccaaaagtctccgcgcccgaggggaagcgatgggcggcttgggggtccgggggcgccaggcggggcgcgcggcgcggggcgcggccggcgggtgggtgggttacctggcgcggccgggcgcgtctgccgggcaccagagcaggcgcagcagcagcagcagcagcaggctggcgagcagggcgagcagtgcgccccccggccgcatcctgagccacaggcgccgccgccaccgctgctgccggggcgaagcacagcccgggcggccccgactcgcggctcccgccgccgccgccaccgccgccgtggccgcagccccgcgcacccacagcgttcacaggcggcagcgaggggcgcccgcagcccacccggcagagtctccgcggcgggcggagaagaagccgcgttcgggctcgccccgggctcccggccccggcccgcggagcgccgcgatcggctggcagatgacgattcgccgagctcgccgcctgtcctcccggaggcgctcggagctgctgcgggctccggtcgccgctgccactgctgctgccgccgccgccgcgcggggtcacctgaaggttggggcgcggaagctcaactccgtgctgattgggctccaagttttctgcgccctcgcctcgtcccgagtgcccgcgaatcccccggacgcccacg

SEQ ID NO: 5378 - DNA, 1316 bp, Homo sapiens
  source 1..1316: mol_type = unassigned DNA
gcggccgtcggtttctagccttgggatcattctggccccgacacggagtgacaggggatccccacgcgtccccgcatccagggcgcccctttagctgcggcggaggcacagagaggccttggcggcgctgtggcttcggtcggcaccgggtcccgcgcagccgggccctccaccctgagtggagctgccttctaagcacccagcccctgccaatcactgtgcccaacaccaagttcccggggcgccctgccctgcgccaccgcgcgctcgctcgcccgcccgcccaactcacctgctgaagaccaggcagcccaggtggttgatcttgtggtcggagcggtggcggctgtagtcctcccacaggtccctgaaggccgtgatggccaggatgaagagcaccggcgccagtgccaggccgggctggaaggcgttcaccgccggcacgaagttgagcagcgcgatgaagacaaagtacacgttggccgggcggtggaactgctcgaacaggttcttgggcaggaaggacagcagcgtgtacttggtagtcttgagccggttgtcggccaggtgctgggcacacccgcgccgccgtcgccgctcgcccttggccgcgccagccgcagggtcctcggcgcccgggggcggcagcaggttggagcgcaccgtgcgcgtcctgccctctcggcgcctccgccgtcccggaggcccgggctcctcggtccccgccggctcccgctccatggccgcgtgtcgccgcgcccggctcctccgccgctcacgcccgcccgcgccggcctcttaggttatcatcactcgcggcccgggcgcggcggtgcgagctccccgcctgcgggacgcacggagaccgcggtcagcgcgccgcctggccggcccagcgcgcccagcccgcgcccagccccgtccactcccgtccagccccgccgcccggccgcagtccccagggcgcaagctgggcgggtgccgcacagagcccccttgtcctcgccgcccgcccccggcccgggtcgtttccgccgcggtggccacggccccgccctcgttccgcgcccggactgggccacgccggatagcgggaaacaaaaaaagcccgagctggaaacttcagagaggtttagtttcgtttcccagaagcatcagttcggtcccaaaacgctgcaaacgcgcgctgcctgcagtaggagagaggaaaccgcgaagcgcgagaaaaggcgcccccgtccccaagcagcccgcgcgcccttccaggggccagacctgctccatcctggacggcgaaacgacctcgggagaccccg

SEQ ID NO: 5379 - DNA, 1110 bp, Homo sapiens
  source 1..1110: mol_type = unassigned DNA
gcgccgggcctggcttctgtggcttcgcaaacttttcagcctgtgtgccacggcgacgcgcagcggctgagtcggagcccacgcggcgcgcgcctcccgcgaggaacttttcggcttgtaggctgcttgtcactctcgctttccgacgcgcctccccctggctcgcgctcccggagttccctcccctcctggcgaggacctttcccggcgcccgcggctccgatccccgccgcgctgcgcccgctctcccggccccggctgccccgctgagggctcccctctcccaggcaccgcagccgcgcccccgcgtcccgcctcccgagcggctcgcttcgcccgatgccccggccccgtcccgcgcactgagcgcctggcagcagggcgccgagtcccggggcgctgcggggcgctgcgccgagaacggccgggcctgagccctgggcggcccccagagccgatcagagcgcggggaggcgggggcgaggaggaggggacccgccgccgggggctggctgcttcgctccgagccgacttttcgccaatggtccaaagggacatgtccaagtcgcctcccacagcggcggcggcggtggcgcaggagatccagatggaactgctagagaacgtggctcccgcgggggcgctcggagccgccgcacaggtagcgagagcgcggcgccttctccttcctttgtgagccgccgggcagggcaccgacctcgggttctcccggcgcctccactgcagggatctctagcctcgcacctcctcccctcgtcgcctgcccaccctctgctcctctcctggcgccggggaccctgcccctttgcgccttttcctggctctgcctcggcttccatttttctctgcttccgaaaagccagtggggaagggcgggggagacctgccagtcctcccagacttctcccgggttgctccagctggccctcctcgccccttcccgggagaggcacatggagagacatgaatcaggggagtggactggacctgctgaagatcgtgagtccgggtgggcgggagggggcccgcttcccgcagcgctttctacgatgccgactctcctggccacgctccgagccggggtgggcg

SEQ ID NO: 5380 - DNA, 1655 bp, Homo sapiens
  source 1..1655: mol_type = unassigned DNA
tcgctttcgcccccgctgacactttgcaaagccgcggcggcagcggcggggaccacgctgcggtgcaccaccttccgccaccctcccgcgctgggctggggtcgagggggcttcgcagagtcggtaaccgaaccggctctggtttgctttctccactccctagccactaccagaaccagcctccgcgaaggggcgagctgtggttaaccctttcgtgcccagggagaccccgccagggtcggggcggggcgcgatcgccccccgcagtcgggcgcgaaggcggcccgggagccaggtgggtgtggggcgcagttggcggagctgcccagggcgtgcgagcaggctgcgaggatggcgccccggcggcgcggaggtaccgccccgcgctcccccgatagctccccggcctgtcccctctccccgcgctctggggcagccggctgcctggggcgcacggggctggagtggccctctccctccccttcgctaggctcccccggcttaatctgttggccgcgactcctcagccagccccgaggaaagtgcagccattggacaggtctgtgcgggctgccggtttcagggaggaaggtgggagaagcctggaggagcgaaggggagggcggagggaggagggaggagggtgcggcggcagatctggcaaattgcgagctgccttccctcctcaaagtgtggagaaggagcgcgggggagcgtggcgacggcagcgcctcctccgccaccaaactcctggggctccgcgggggcttggggccacctcctcctgagcccggaggaaccctctcccgataggttccagcgtgactccctcccactccacccttttcctttcttcttcctcttttttttttttttttttaaacacatttttttcctggcttcggacctcagactgctgcagccctaaccttcccagggctcagctctttggagctgcccattcctccggctgcgagaaaggacgcgcgccctgcgtcgggcgaagaaaagaagcaaaacttgtcgggagggtttcgtcatcaacctccttcccgcaaacctaaacctcctgccggggccatccctagacagaggaaagttcctgcagagccgaccagccctagtggatctggggcaggcagcggcgctggctgtggaattagatctgttttgaacccagtggagcgcatcgctggggctcggaagtcaccgtccgcgggcaccgggttggcgctgcccgagtggaaccgacagtttgcgagcctcggctgcaagtggcctctcctccccgcggttgttgttcagtgtcgggtgagggctgcgagtgtggcaagttgcaaagagagcctcagaggtccgaagagcgctgcgctcctactcgcgttcgcttcttcctcttctcggttccctactgtgaaatcgcagcgacatttacaaaggcctccgggtcctaccgagaccgatccgcagcgtttggcccggtcgtgcctattgcatcgggagcccccgagcaccggcgaaggactggcgggtggggtagggaggtggcggcggcggcatggcgaggttcccgaaggccgacctggccgctgcaggagttatgttactttgccacttcttcacggaccagtttcagttcgccgatgggaaacccg

SEQ ID NO: 5381 - DNA, 1655 bp, Homo sapiens; identical to SEQ ID NO: 5380
  source 1..1655: mol_type = unassigned DNA

SEQ ID NO: 5382 - DNA, 304 bp, Homo sapiens
  source 1..304: mol_type = unassigned DNA
gcgggcgctggaaggggggcggggtaaatgcggccggcgcagaggtggggagcaggtgggaaaggtggaggcgggctcgcctctggagacctacccctgctcccattgtcctccgcctgccagcttcacagacaggcctgaacgcgcagagagttccttggagtgccctgattttgtccccgagagggcccccaacctccgcatcctcttagtggctgtcctggcaggtgcgcgtcctgcggggagttgcgccccgggggctatcgccgagcgggagctgcctcctggaaccctgcccaccgcg

SEQ ID NO: 5383 - DNA, 1666 bp, Homo sapiens
  source 1..1666: mol_type = unassigned DNA
gcgcaccccctcccgaccgctagcagcacaagtggcgacattcccatggagcggccgcgccgcagcttgccgcattcagcgcggacggcctggccgcgcgcttccccgcccggacgaccgggcgcgcctgacactaatagctcgcggctcaggtacgagcgggcgccgcatttgactcaattcaattcacaaccggccgcgcttgcaggtgtcgccttttgaaaccgccattcaggcggccgctgttcacttctcgctgcgccgcgggttctgtagaagcgcaagaatggggctgattattccggtgcccacatgccgcccccacacgcccccacccccgtccggcgcaagacttcccttggccaaaagaggcgtttaattagttctggggccgcggagagccagcgtggccgacaaagcccggctccccaggtaacccgggttccctgcggacccgggagggggcgcgcggggccggagcaccggccttgggctgcgcgctccctccggcgacactgccgtccccctggcctccggcccggtcccccgcaggccaaaggctcatctgccgggcttgggtggcccgggccagcgccgcctgcggtccccgagtgcggctggctctaaggccggcgccctctccccggctttcagtgctcagagccaggccagcgggaaagaaggcagcatggtccgcaaaagacaggtggcagtggcagtcttgcatgatacttgtccttcttccctgttccccattttggggaaacactggaaacacttttctctttatgcgcattcgcgtctcagcaccgagtgctccaagccctgcgcgcagcgccgggcttggaaggcggcgaatggctgcctagccgccgcccctactagtgacactcggccgccagcccccgcccaggatgtgcacatctgctggcagcactggcccgggtggcagtcaccgggccacccactccacaggtacaaccgcacccaatccaacctggaactcggagggctgtgcgcgccgagctgggatcgcgccccagcgagccgggcctttggctgcgccagggcccaggccgagtcatcccgccgctcgcgtcgccgcgaggcgggacaccgtgtgatacctttgccgtgggctgggcgtcggccgcggggcggagagcgggtgtcccacctcgcctcatcatttgatttccgccagcgtctgaggacggcgcacccaattcgttccactcgctgcgctctgtgaaccagcggcgggcagggcgggggaggccgggctgggggagggcagggtggtcccaatcccccgcccccgccccgccggcctcgcggagcacaagtgttgggattcccacgggcaggcgtgctctgcggctggaggcccgagcgcccagggcccaggagacgtggcggacacagaggggtttgtaggcacggtgacctccgtgctcctgctctgaaagggcctgaaaggagcggtttatggtgcattaccagtcaagggctcaggtaccagcgccttgtgtcgggaacccgggcggccgcccgtgctgcaggtgtctgctatacaaacgccccgggagggggagggcaggccgccggattgggggccggggaggggcctccggcctggcctgctcctgccactcgcgcggtttcg

SEQ ID NO: 5384 - DNA, 5030 bp, Homo sapiens
  source 1..5030: mol_type = unassigned DNA
gcgccacgtggagagccacacgaactctaagcgttcccgctcttcagcccctcgcgggaaaacggatcagggtgttaatgggtcctgattacctgcactagcgtcatctgcgagccgagggccaagagtatcttctcggtcttggtggggtacgggttgtcacggtgcttgtaaagccactgcttgaggggtcgcgccatgtcttgcagggcctgccgcttgtgcctcaccttcccgccattctgccgggcgctgggacatggggagaggaggcggccctggtgagcgacgcgtttgcccgcccggacgctccacgccccggccaagcccgggccccgcatccaaactgcgcattcctgccttgcgcccctgctttgcgcgcgcccagagtgtttgggagaggcaggaagtgggagccacacagtttctggatggggagatcatttcgataggtttatcttgaatagggggataccttgaacccaataccccaaggttagaggtttagaagacgaaggtcaagtgatttgaagaatactgctattccagtcgcgtatctgggcagcggggctaactgctacccttccctcacccgctggcgccgcaccctcgagtggccctggcctggcaggcctggcagggtatgcggctggctctcgaaacttccctcggggatctcttgtctgctcccagaggctttccgtcgcttgtggtcaggggaaaggtcgccgactggacatagggaataaagcaaaggagcattgccgccccggctctctttaagctatttcctttgatcttttaggaaaagggggaaactttctaaaggagttggtggtttgtggaggaaagctgcagaacccaaaaacaccgtcgggccgtttcccgactaagggagggttaaaagtacggcaagctctgtcccatcatgtaaggtaaaaagacctcaggaaaagcacattcaaagggggaggaggcagaggcagccaggagcctggagcgtggcctggggcgctgcgctccctcacgggtccgggaggtgtcgcgcgcggccgccagcgagcccagccgctccccgaggcttgcgcgcctgcgccggagcctcctgggtttctgcctctttaaacactttgaaatgcaattccacccgaaacgactggtagtaacattttgacgaaaccgaatctctgttttactaagcagcgacgccgcagaacaagcagctgatgcaatcgttcaggtggaggcggctaggacggccgcccctccccggcggggcgcccggggagccgccggatcgggccaggcagagcctgccctccactcaccggcagtctgagcagctggcccacccgcaagctaccgccccccccagcatacccctcaccccgctaaactcaaacccggccccgcaggcccggggcctccccctccgggttcgccgcgggcccagccgagccgcgctcacgcccgggactccctggcgggaggcgaccttcccgactccttgggccaggcgagccgcggggctctggcgaggggctcgagtgaccgaagagaagtccgcggagcctgagcctggactccccgactgctcggcttcgcctgtttctctgcaccgagctcagtcctttttcctcgccctcagccgcgcaccggcacccacagtccggagaggggcaaataacccccaactccgaggtccaggcagcggagggccgaggggcagctcctggcgcccttagtctccaccaagctctttggagctgccccgacgaattgatccctcatgttttaagataggagccccttaacatgagaatgcgcgagccctggaggggcagacctgcactcccagggaactccgggccctttcccgtccacccgcccgcgttgccacgggaccccgtcacagctcaccacccccacccctccgggccgcaggcgggcagggcccccaggggagtgcgcatacccggtcctccggtgtctcaggccgaggttgtccttgaggggcgggccgtcgggaatgcccacctcggggcgggcgtgaggactgtccaggacaccgctgtagggccggccaccccgctcccgctccgaggcgcctccgtcctcaaacagcaccgcaccgctgagcttgttgaagacgatggtgttcatggtgtcggttggtagggacgcgcggcgcggccgcagagcctcggggctgggccgccgggagctccgcagcggggctcggcttctaggagaggaaggtgcatctcgttacttactggctgagagtgctcagacccctgcaggttcagggccttgaacttggccgggtcgccgggctgcggagccgaggggaggagcggcgccgccgcaactggcagggaccctgcggctctccccagttggctacacgcccccgcccctgcaggttccccggacaggtacctgccctcttccttgcctgggcgatcgatccccccaatcccttcactccccagaactacaaccgggaatcattcacccgcagaggcaaaggaaacgaattcccaaacgagcctctgggtttcagtttgaatctgggagaggcatactccggactgcggagcgcgaccggcgtgaggccgcgcgtggttcttcaatcacagcagaagactaaagcctctaggaaccccaactcggggcgtcaggaggggttggatggaagggaagatttggggtaatgtgccaaccgtatccacaagaccccccagctcatgagtcccaggccataccgggatttgggggattttcgtgttttctagatcgtggatggtttggttgaaacccccgcatcttctgtccgccaaggtcccccggggtgaggttgggttcaaggacaggaaaaagttaagtggcgtcaggacgaaagcaccacttctcccccttctctcccagaatcttcctatcatcccccaacgcgccccgggaagtgcatggtcctaaggtccaaggcgccaggacccaggtccccagagccctcaatcagtgccattctcttccgcagcgcgggtgtcagccgcgagctcgtagcccctcgacacccgcctctctctggggtctccggggaccctttcagaggctgtaaaggtgtcagaagcccaaggcaggaggcagcttggtcggcgcacctcccgggccactgctgccactgtcggggagagccagcagctcacctctggggtcgcggaggccctgagcctctgcctgccgcgcaccggcgtcaggagcaagtccgcgcggccgcggagccgcagagttacagccccaaggcgcgcggcggacttcgcccgccccatctcctcgcctcgcgcctcgggacagctcccgtttcctccgagcggcctcagcttcgctgccagcgccccctttgcccgtccagccgcggcatgggctgctactccactaacacacgcgcgcgcgcatacacacacacacacacacacacacacacacacaccctttgcctcgccaagcgcccacactcgccaacgcccccgccccgcccttcggccaccgcagcagaggccacgcgtgacatttaggaccacgcgtgaccaccgcgatcaaacgacggctacggtctgtgttcgtagggaagtgaagtcagacctctgctggatgtcgtgtgtcccctaggactgcgtcctcccgcgcagacaggtacgtgcctggggtgtgcacatagcctcggtgataagtgtcaaagagaattttcgtgcttgcagcccctgttctacagtcaagactcgcgttggtgttttcttttaaaatcatgcccttagggatgtgtgttcatgctgctttatttgtacaagacacccttccccggcccggccttctccgagccaccccagcgcgtcctcctagatgcgacgacgtgtttttcctagcgaagtcatcacgaggttagccacctcggacacttccccggcagccccaagcccacgcagagatcgcagacacagacacccggcgcgctgtaggtctgcaggcagcaggctcagaggcaagcgatggcaaaggtccgagcgctgtcctgtcgcaaggggtccgggggcgtgtgaaccacacttgctgaccctcccaggactcccgcgcgcggccacccgcgcctcttctcaaatcacttaccccgattcactccagactgtggccggggaggtcactccctgcagaagtgtccccctcccccaacgccggcgaataattttaaagcaaaggaggcgcggccaggtgggctcccaagctccgcgcagacccttgggccagccttggccgctacccgagcgcctctccaccagaccttggagggaagttgggggaagggcgggagagcaccggcgcccagggcgcaggggccagagcgagcctggcgttccgccgcagccggctgagactcggcgacgcgggggctgtacctgtggctgcggggccgacggccggctgcagggcggctggctctcccgcctcgagactaggcgcactcccatccccgccgcatgttctccacgcgggctccagcgcgctcaccaccgccaccgccgtcgtctcggctttatttacccagcccggcgcgcgccgcccgggaacaggaatagcgaggccttctcatgtttcctgactgccggtcccagccggcgaacatcctgcgggcgcggtatccacgttcccgggcgggtggagaggaagcgtccgcgcccgcccggccgcgggggctgctgttaacccctagcagaggagccgctgccggggagccccgggcccgccgagtcctccggagccgggcgcggctcccagatccgccggccttgcagtcgtggagcagacggggcttttcccttcgcactttaggagagaaattggagaagctgccgggagcgctcggctccggctccagaagctgagaggctgcggtgcaaatcccgtgtcttagctggcccgattgccggaaatttcactgcgcgtggctaggcgggagaggccactgtgacgcg

SEQ ID NO: 5385 - DNA, 2868 bp, Homo sapiens
  source 1..2868: mol_type = unassigned DNA
acggttctacgcgaggaagagggcggggagcgcggaccgggtgtgggaggccgaggtgacagcaggtgagggccgggtgcggatggggaagtgagacaagcaccgtgtgggtattactcattccgctctactaaggaggctgctggcaagcggaacttctagcctctctttcaatccagctgaagttcaatctcattgaagtcacttcccatcccggttcgcttggggggaaaccaggcgtccctggaagggaagggaagggagtccgggctgcgcgggtcaggtagcctctctccggtcgccgcgtgtcctcgccgtccccaaacctgcccttcccctcatcaagggaactccccggggagtccagaccgcgatccctttccttggccccggggtgcggggggcggacacgcgaggcgtgggactgatggtagccctgcctccaggaagcaggcaggcggggacctctgggcgctcggaggggcagctccgagggcacagggtacagggagaatcagccagatccctccctgccccgggcagccgcggcgggtgtggccagcgcggaggcaggacgccgccgagcctccaactttacctttccaactccgacagcccgtcgcctttctgaccgcgtccctacggtttcccggcatccgcctccctctccccaccacacctgaggaaaacttttccctcgcccctcaattcaaattcagcagtgcccacggttgccgcaaaccgcccggtccctagcaacaaggttccggccgtagagcgagagcctctaggtgtaaggaaggtgatgtcgtaaagccgggagtgtcgtaaaccaggtgcggtggggaggggggaggggtggaggcggaggggtgggggggaagggggagggagggggaggaggtgactcgagcatttagacacaagcgagaggatcatggcggatggccccaggtgtaagcgcagaaagcaggcgaacccgcggcgcaataacggtgagtggcggaggggaccggggagcggcggagtcagggggagctgggcagccggggcgcccccgggggtgaggggggcgagccgggctgggggcagccggggcagggacggcaaagtggagtgggaaagtagaaagtagtgctctctgcccccctccgctgccgccgctgccggagccgcgccgcggccgctcgctctccctgaaccgttatgtctcttacctggtctctctccgcctagcggctcccgccgcccctgccgcctccctggaccgttagccggcgccgacgccgccgcatccccggcgcagggcgggcggccgggacgcactggccacttttctggtcccgggtggagcggctgttgcttctttccgcacttttccccactcttgtgcccttcggcgcctccctctccccctcctcctggccccctcagcgcgattctccctcagcgcccaggcccccgggagccgcggaacaaacttgtgcccggcgctgaccgtgcaaagtggcttccgcgcgccgcggccccggccggcgccgtcgctgtcgctcgggccccgcgactcgggccgggctgtgggcgcgcggcaggcgggctgcggcggcggcgggacggggcggccgcgggttgcgtggggtttgtgcgcgcgtgtgcgcgggcgccggctgtgcgcgccgcgggcggacagggttcggccggcggcggtaaagttgggacccgcgggccgggcgcgctcgcgtaacggggattagaggcgcgggggcgcgggtccctaagcgcccctcctccctggcgcctcccgctgcccggcccagagccccggcctggggactccgcggcgagccccgcgagtggggtccacgtttggcggggcgcggcggggcggcgcggggaacaaggcaggaaaggtacccacttaacgccgccgggagccgcgcggatgggggcgagctgggcggcgggtgtgtttgcggagttgttacctgggcttagagaccgggaagcaccacagacagatccccctcccggggcagacgaggtctctgcgccgggatgggccggtgtgcgtgcgcctcgcgcttttctctttcggtttttggggaagttgttacctgggccggacgcacggagcgctgaagccggataatggggcttggatggcgctctgggtctcgggtggaaggagggtgggggagggggcggacggaccgacggacgcgcggggctgctacttgcaccgcagctgcagtgtttattgatttgtgctgctgtgccaagggaaacacacacccctctgcctggcgtgagagttaaaaaaaaagagagacagcccgagggatcgagacctgaacatgtggtggtggttgcacagtcgccttttccagtttggagagacgttgtaagttgattgtatttctggttatctcggggcgatgctatgctttctctccctctcgtgcagcagcgaaatgtctgctgattgttattgtctggacagttcctgtggcgagaggggcgagacttgtccgcccgggggcggcgggagcgcagggagagcagcccccgcctgcgccgccccggtacctgtttgtataataatgggcggcaacggccctgccgccggccgcagcccaggctatataaggaattacacgtacatttcggaccgaggggctcgctttggttcctgcgttatttttaaaacgacttttaagagaggggcaataaatgcgtctataatgggaccgctgcagcgtcgagaaaacgaggaaatacgtgtttaggagaaaactctctcgtgctcccccagccccaccccccgcgcctgggctccctttctccctcccctctgggatgcgaaacgcg

SEQ ID NO: 5386 - DNA, 2678 bp, Homo sapiens
  source 1..2678: mol_type = unassigned DNA
gcggctggacgcgcgcccaggtccgcgtcgctgcggaccgcggagctgtgcagaagcgcggcctggcgggtggcacaagcccgacagctgcgccgcgcagcccgcccgcgcctggccaagagccccgcgagggtgtggggagaggatcggcttcgcagggagcggaggctgcgcggctgcatcggacctcacagcctcaagtcgcggcatgaggcgaactttgcaaagcgcgctctcgccatgcaccgcccgacctccagcactgtgcgcagcaggacctcggagcccattcgcctgtggaaaccgagcccgcagcgggaaggcagtgggtggagggtgggcaggcaggggtctggggtccgcggctccccaccctcgcgccttcccgcgccagtcccgaacgctctcttggggcgttcctgcccagttgtcccggctgacctcgctctgcagccagcttgaggtcaggcggtcgctctctgcaggtcacaaaccctcggcgcaaaagtagggctttgaacgcgacaccgcaccagagcgcccagctaagcgagctgcctccacccccactgtgtcgggcggcgcaaactgcgggcgcaggcagaggagccgcggctctgcgccgggcgggagccgaagcccagagcctcgccagggcctccccgccgagcgcacttaccgtcgctgaggcagagcgcggtcagcacgaggaccagcacgaccacgaccttggcgttcatggcgcgggcgggcgggcgggcgggcggacgagcgcgggtcgggggccggacgccgagcgggcaatgcggctgacggagagtgaaagtgcggcggtgggaggcgcgcgccgggcgctttagaggggagagccaggcggggcggggcggggcgcgcggtgaggggcgggcccggagccgagtgctggccgtggccggggtctctgacgcgcgactccctcggcggcaccccccacccatccccttcgcccctcctccgctccctctgtgctcccgaggcgcagtgcgctccggcctttgaccttctcaggctccgctgggccccgcaccgctggcccggtctgcagtgaggtccgcagcctgagcgacgccggctggagggccgcttattgtccctgtgacagggccccactggagagactgaggaccttaggcgtaaagtggggcgcgcgtggaaagctgcgggacggggcctttcgatggcgggaactgaatgagaaccaatgaaaagcaaacaagttagtcccgggcggagggcctgctggcggtggcggcccaaggcagccgagggggtcctgctttctgtgcgtgggggctcaagctcgccacctgcccggcttgcggcgcagccgccggcagagctcgatctgcgggaatgagacccgtctttgcagtcagcgtggctcggactccaagcccacggcgccaccagccgagcctcagtttcctcgcctgtacaaacaaagcagaaggcgccggcggctctcagtaaaagcgaatgtagcctttgtacttccgacctctcaatggtgaaatgagctaatcacaggcccaccccgcggagtgggacgggagattcaatgagacccgccccacgccgcgaaattctctgcatcgtgtctgacaagcagacagtactcaataaatggtagctgtaagtaagtcctttaaacctaagtacttactgccttacccaagaaaagctccgtgcgacccaaagagctgagaactcccccaccccgacctccgactcctaggacagtactactggcgtctgccttctgggtccagaaaactcttcccacggagccgtccctcggcggtgcttagccctccggatacccccgagacatcccagatggccccagtccggtggcgaagggagggtgcaggtcggcacccaggagacgtgggggtgaggagagcgcccctttgggcctcgctttgtgaccgcaggctgccccagccacctctctgtgtccttcccagcacagcgtccagcgaagtggggtcagtcgccgcgtccatccaggggcctgccctggggacacgtccctgtccctggggagtcctggccgtcggggagtgggcggtcagcggctgcattaggcgggagcggtcaacaggaggctgcgagggctccggaactccgctggtgggagtaggtgtcttctgtgcattttttttccaaaaccactttggccgttagatggctgtgggccggcactccatccatccatccatccatccatccacccacccacccacccacccacccaccctgggcactgggcttggagccgggaaccccactgacttggccctgctcttaaagaactgaaggcagtgaggtccagtgaagaaggcagccgtcgggcgtccccaggcctttgctgggctgggccggggagcctggccgctcaccggccgcagcgctggggctccggcgccctctggtggcggcgcctccctccccgctcccagagctctggccagctccattcctgcgcagctgatgaaacccgggagggcgaaggggtccgcgggaaatctacacccgggtggaggggcgccctggagctcggagatccgaccctgcgggagccgcgcgcagcctcgcttgcccttaaatctggccaaagcaaacgccatcgcctctcg

SEQ ID NO: 5387 - DNA, 2756 bp, Homo sapiens
  source 1..2756: mol_type = unassigned DNA
gcgggagggcggcagcggccaggctaatattcgcgaccccgactggggcgcggcaacttctgccctcagtccccacaagctcccggccgcgattcgcggccgagaaattctgcggaggggccggtgggtcagagccaggccaggcagttgctgagccttcccctcccctcctggcgggagtgtgtgtgcaaggggccagggggcggagtcggagaaagggttgggggtgtccgtgtccagcgctcctccggacgcggctccacaatccagctgcgagaacagatggacgcagcggcggctcacctcgggggcttcctgctcgctgtgcgccgaggtccaggctgaagcggagatcgcaagcctctggctcccgcctctcccaaggggcctcgaggaaccggctgccgcgcccccttccccaagaggagaagagcgggcgctgaccccgcgagtcctagaaccgcgggcggggggcaggcagggggcggggggcagagggccagctaccggcgcggaacgcccatcccaggggctggttcaagacttccacaccgagagcccttcctgggcctccagccctggagcatctggagagcggacccctgcccggccacgccccgcccccggcccccgccccgccgacgtcgcattagcatgagcgacgtaagtggcccgggcaccactcgggggctgggactcgccgcgtcacagccccgagtggaagggaaaaaaaaagaggaggcggcggaggaggcaagagccgacgcgaggggaggggagcgcagcggcggggctaacgggcgggcaagcgggcgggcggcaacagcatgtccctcggccagcgcgggcggcctcttagcgcggcgggggctgctctgggcgcgccccgggcgaagtgcgcccagtctccggccccggcccctcggcgcgcccgacttcccggccgcccctgagcccagcagccgcgggtcccgggatcggctaagagtagctgcaacgcctcgccggacggagtcctttcctttcccgggacgctgggccatgagctccgcggccacctgaggcacaggggagtctgctcggccaggacagcctccccgaagtcccgtgccctcgcctctgcactgcgggacgccagcgctcggccctggcggaggcgtcctcggaagagcatcggggtgggggcatggaatccgcggaacctgcgggccaggcccgggcggcggccaccaagctgtcggaggctgtgggcgcggcgctgcaggagccccggcggcagaggcgcctggtgcttgttatcgtgtgcgtggcgctgttactggacaacatgctgtacatggtcatcgtgcccatagtgcccgactacatcgcccacatgcgcgggggcggcgagggccccacccggactcccgaggtgtgggagcccaccctgccgctgcccactccggccaatgccagcgcctacacggccaacacctcggcgtccccgacagctgcgtggccagcgggctcagcccttcggccccgctaccctacggagagcgaagacgtgaagatcggggtgctgtttgcttccaaggctatcctgcagctgctagtgaaccccttgagcgggcccttcatcgaccgcatgagctacgacgtgccgctgctgatcggcctgggcgtcatgttcgcctctacagtcctgttcgccttcgccgaggactacgccacgctgttcgcggcgcgcagcctgcagggcctgggctcagccttcgccgacacgtctggcatagccatgatcgccgataagtacccggaggagccggagcgcagtcgtgcactgggcgtggcgctggccttcattagcttcggaagcctagtggccccgcccttcgggggcatcctctatgagttcgccggcaagcgcgtgcccttcttggtgctagctgccgtgtcgctctttgacgcgctgttgctgctggcagtggccaaacccttctcggcggctgcacgggctcgggccaacctgccagtgggcactcccatccaccgcctcatgctagacccctacattgccgtggtggccggcgcgctcaccacctgtaacattcccctcgccttcctcgaacccaccattgccacgtggatgaagcatacgatggcggcttccgagtgggagatgggcatggcctggctgccggccttcgtgcctcatgtgctgggcgtctacctcaccgtgcgcctggcggcgcgctacccacacctgcagtggctgtacggcgcgcttgggctggctgtgatcggcgccagctcgtgcatcgtgcccgcctgccgctccttcgcgccgctagtggtctcactatgcggcctctgttttggcatagccctagtcgacacagcactgctgcccacgctcgccttcctggtggacgtgcgccatgtctcagtctatggcagcgtctacgccatcgccgacatctcctattcggtggcctacgcgctcgggcccatagtggcaggccacattgtgcactcgctgggctttgagcagctcagccttggcatgggactggccaacctgctctatgctcccgtcttgctgctgctccgcaacgtgggcctcctgacgcgctcccgttccgagcgcgatgtgctgcttgatgagccaccgcaaggtctgtacgatgcggtgcgcctgcgtgagcgtcctgtgtctggccaggacggcgagcctcgcagcccgcctggcccttttgatgcgtgcgaggacg

SEQ ID NO: 5388 - DNA, 990 bp, Homo sapiens; identical to SEQ ID NO: 5158
  source 1..990: mol_type = unassigned DNA

SEQ ID NO: 5389 - DNA, 829 bp, Homo sapiens
  source 1..829: mol_type = unassigned DNA
gcggtgcgacgaggtcaggcccgcgcccgccaagccctagggccgctgccgccgacggccatggaggacgagcagcccgacagcctggagggctgggcgccgctccgggagggcctcttcgccgatccccagaggcaccggttgcgcttcctggtggcttggaacggcgcggagggcaagtttgctgtgacttgtcacgaccgcaccgcgcagcagccgcagcggcgcgagggggcccggctggggctggagcacaagcccgaggccgccgtgtccccgcccagctgggccggccggctctcggccgcggggttccgcggcgcgcgccggcagccagcggcgctgtggccgcctctggaacactgcttcccacggctgccgccggagctggacgtgggcggcggcggggcctgaggtctggggctcgggcggtgggcgctgctctggccggcgcgcgtgggccccggcgaggcggcgctgcaggagctttgcgggcagctggagcgctacctgggcgcggcggcccacggctgtggcggcgccaccgtgcgcgacgctctcttcgcggctaagggccgcgcggccgactgcgagagcccgcgcgagtttcgggagcgggccctgcgcgcctgatgggtcgaggcggacgcgcggctgcgtcaggtaagcgaggccgggccgccggcgtttgaccgcgcttgggtggcctgggaccctgtgggaggcttccccggcgccgagagccctggctgacggctgatggggaggagccggcgggcggagaaggccacgggctccccagtaccctcacctgcgcgggatcgctgcg

SEQ ID NO: 5390 - DNA, 4119 bp, Homo sapiens
  source 1..4119: mol_type = unassigned DNA
ccgtgatggtgccaaaccgagaggagagcccgagaagggggtgggtgatttcccggctgctccccatccccggcgccttgtgcctttttctccctccctctcccgctgcgcttcagccgagggctgctggagcgaatgggggatgtagaggaaggagtccgtaggtttccgtgccctcccaatcttctccgcctttcccgacagccgcgcgtccccgcctcagcccaaggccagtggcccggcctcgaggaaggcgcgggggccgcgagagacgactttccacagcatcgccaaggaaaccggcgtcgccggtgcccccgcgggcctccctcggcagtccgggggctgcttcccgccgttgcgcgccctcctccaccacccactcgctgcctccgccggccggagcccccgccttactaaccccctcaacttcgcgggcggcgggcaggtgggggcgcgcctccaggccgcaagaagggagcgctccgagattttcccggggtcggctctgcccaggagggagctaccgacgctttcccctggcgcttctccgccgctcggctctccaggcgcgcagctctccccgagagccccgaactttaccgtcactttgcccctgccccgggagaggggaggtcgaagtgctgccggccagagggcctacgcaagcctcgaaacccggggggacgcctcttccacccccatccctgcgctcgcccggggctgggcgcgccggggcgcacgcacgccggtttgctggcgacctggcgcatctgcccgcgcgccctggtctcagctgtcgcaggttcctcctgcacccacttccagtcttcaaagccagtgcagtcagcaccgtccacctggagccccaatcctctcctgcgattcccgcacacccactgcaccccatccaccacctccgggccgcgcaggtccgggcctgcgaagacacgcggcttacctccggccactccgttcatctggtcaaaggggcctcccagttcggcattgggaaagatggtcaccgacgtggcggcgaggtcctccaccgggtagatgttgtcagacagctggtgcacaaaaccactgagagttactgggattttgtctacggccttggcggtcatcatttgctcctcgcacaacctggagacccaactccctcgctacctggagtgtcagaaaagccgttttggagaggggttggactgagcctgggatggtatctccttttgccctccacacttaaaaacaaccaccacacacaccaagaaaaaaaaatcaacagaaataaaagtagcaaacaagttgctgttttttaagaaataagaaaaatgtctatttgccactgactctctcctgtctgtgttccggctgctgggaagccaggagttgctggtgtagtgttattataacagtcagtgagtcccctcgccgagctattaatcaattgctcctcgctcagttagacggaaagtgttgctctaagtatttatgggcaggtcttcaatacccgtgacgtcgctgcccatatatggactgaggaacagggctgggccaggcggcttttgccgtcacatggctgatttgcatacacgggctcggccgcgcggactccgccgggctcgcgacttccagctcgcaggcggcggggatcgctggggtcccgggcgcgcggccctagctgcagcctgggtccggggcgcagggatcgcgggggagagggcgcgccatggacccagtcacagccacagcaggagagcgagctgctccaggctgcggctcagcctcccggggcggggaggaattccggttctctgggactttccaaaaaaggcgaagatccggtgccggcggctccgcctccctagcccttgtttgggagccattccggaaaattaaacttcggaaagaaaccgagcggagccgagacactacagtcaaacccctactcactttcttggcagctcaaaaccgcaagcaaaaggaggcagcgaagaaaaaaaaagctacatgcattcacggaagctgactgcttttttctgaattacttggtggaaagaagtggctggtgataagagtgaatgcgtattgcttttttggaaagtctgttctatttatacaggagcgaaaacggaacaggtttgggttgtttgtttgtttaagtattttgggcaccttgggactgggagggtaaaccctaggaggagcagaattactgtggggagcttcgagagaaatcctcagccggagacaccctccttcctctgcccgcgcgctccccgccccccttcagctgctgcgcggagcgggcgcccttcccggcgcgtctgggcggtcggctgcgtgggggcgtccagatggaagcttggacactcaccctgcccctccagacacacatacacacacactcacactcgctccacttccgctacacactcccgcccccgctgccctcttcacacacccgctcacacaccttacactacacacctccctgttgactgcgtccgcgcgccgtcgttgccagcagtgtcccggcggcagagcgggctccgggctcgctggacaggaggttctatgaagacactggcctaaccttcactaccggtccctgcagccacagaatccccctgacccccatagcccaggatccaggaccgcgccctgcccgcacccgagccagaatacacgtactagaataaatattttctctccctccccaaaaaacacctcggtgagcccagcgcggtcctcagtgacggccgaaagcatctctaatcactttcaagacgccatccccatcccccaacccactcgttttactttgcgagaccccggtagaaacccttctgtttcgttcccaaagcaatttttaaaaacttttccaaagtccaaatagcagcaggttctggcttgctgggcgcaaagcttctacctcccagtgcgccccagcccgcaatggatagccgggcctgtccggggccccacaggaggctggtcccgggtgcccaagtccagcgcaccgccgcctgcatgactcattcatggtcgtttgtgcaggttgcgaactgccccagagccctttcccgctccaaagccgcggaggccagggataacgcgcagggtcagcctcgcaggcctgtcctgtccctttttcaccccgggcccggagcggccctagcttagtgtgggccggggcgggcgggagccacggcgccacgccgtggaggaagcgcggcgctgcaggcgggtcttcagccgctcacctgcctcgaccgctgcagccgtgcgccagctctcgccgggcccagcgcaccgcggtcagggccctgaggctgccgggagcggtctctccctctgctcttccactgaagcgctgcttctccccctccctccaaaacagccggtatccagcggccggccatctctctgacttaagtcacccagagcacatttgggaaagtttctcgctcgcgctgtgcgcttttttccaattggggatgaaaaggacatggaaagaaatcgcagcaaggttagcaccctagtagataccccaccccagcaaaaatgtgcaaagtcctatttctcaagaaagaaagaaagaaaagaaaagcaagaaaagatagctgcgttcttaccacgtgcgccagcccactccgcctgcgctctggcgggtcccgcggcccccgcgctgaccatgggcaagacgacgcctcggaagggagtccgactcgcatctcgggccctgagtccgaaagaacgggggaaagccgaattatgcaaatgcggatccctgcgatggggctcgggttacggcccccgccggccccttaggtgaggcacccaccggcagcaagcgcgggcgaggcgactgctcgcgcttcgctcctctctgcgcacgtgggcggaccggcaggcgggcgagttgcccgggccgccccgcgactggcgctgctgccaaacccgccggcggtcgccgcgcgccaccccgagggggagctcctggacgcccgagtgcccggccagcagggcgcggagggcaggaccggggctgggggcggggcggggtgcctgagcgagggaaaaccgcgaggtcttcggctgccacctttcccg

SEQ ID NO: 5391 - DNA, 1575 bp, Homo sapiens
  source 1..1575: mol_type = unassigned DNA
acgcgtccatggaaggtggtgcccgcctcaccgcctccgtggaaggccaaacgagccctcggtgtgaatccggagaaagagagggaagtgcagcgccagctccactccacacccccttcctgcctataaataaccccaagtgtcacttcaaagaggacggggagcgcggcagaggggctcccgggccggcgggctggggccgccggacctgctcaccacgccccccaccctgggcgagtttgcataaataaacaaatccaagccgtcggccccgcgggaggtggaggaggagtgacgaggaggaggaggaggagggaggggggagggagagattagtttgggaagtagcacggattgctcatccgatccgtgccgccgcagggagtgtgtcaagttacagaggcgccggaatcggcccctgcgctcctcgccagccgccacgacccacctctgcccatggggccctccgtgtgcgccccttcgcccggggactgaaactgactggcccgggagacacgaggcgcccagaaggactgacagcgcggcaccaactgctctgcagacacttgaagggaaagactgggcggagagaaggagagccggtcagattcccctaactttcctggacttggaacgttcttcgaaataacttttttctcacctaggtgtaccccaattaccgctggttgtgctttttcggcacttcctctcctactgctaatttttccgtcctctttgccgggagcagcggaaagggacgttttccagcgatacaagccctttccccctgccccgcagtttggatagagccttttggcagcggctgtcgcctttatttattctatttatttatttattggttctcaagacgcgagaggatggtagcggagcgcacccacaaagcggcagccaccggtgcccgcggccctggggagttgggcgcgcccgggacggtggctctggtggcggcgcgggcggagcgcggcgcacggctgccgagtccagggtcgtgcgggctgctgacgctggccctctgctcgctggcactcagcctgctcgcccactttcggacggccgagctgcaggcccgggtgctgcgcctggaagcggagcgcggggagcagcaaatggagacggctattttgggacgagtcaatcaactgctggacgaggtctgtgctctttgttgctggcttttatccctccccgcggcgccccctcgcgcagcctccagactgttcagccggtgtccgcgggcgctcgctctctgcgagccccaggttcgcgcgagttgcctgcgggaggggtcggggacacggacagacgctgccctaccagggattcggaggacctggtgggcaagagcatgacccagcgactcccgcctcgggcaagcgcccccggcttccagcgctgggagcgccctgggcacgccgggcaggtggaggaaggctgggcgcgcggaggctcgcggaggcgggcaagctccactcctccctttcgggacccggccagggtggtgtgacagccgccccgcgcccgcgcagcggcaagcgcgcccagaggcccaggccg

SEQ ID NO: 5392 - DNA, 2401 bp, Homo sapiens; identical to SEQ ID NO: 5168
  source 1..2401: mol_type = unassigned DNA

SEQ ID NO: 5393 - DNA, 1579 bp, Homo sapiens
  source 1..1579: mol_type = unassigned DNA
ccgaagtcggggagcgggagcgtacgtgcgcgtgttcaccctgtcctgggcccctcgctcggggaatcccgggggtgccagggcacccagggtcagggaagtaagatgccgggccgcctaccttctccaccccgtagcccgttccgaaaatcctttaaaccgagatttaatctggatgcctagccccgccctcccctcccctcccctcccctccccccggccgaggccccctccagttcagctccctcctccaccccctccccgccgtggaccctcattagcatgcccacttgggaggattcgctggggggcgggagacacccgaagtcatccaccgccagcgccttcccggcggcctcctcgggcgacagcgctccgggagccccactcgcacaagtgttgcttccaattaattgcctgggcgggggaaggaaaggggcctcgtcgccgcccccgcccggaggctggagtgctgctcgtcgggtcgtgcgttcgctcggcagcggcgtgcaccagcaccacccctgcgtgcaagtttgaaatgtgagctgcctccgattcatactcgctcgcgctccctcgcagcgaagtggctgggctgacggtctgcgcgcgcgagtgagtgcgggcggcgggctggggggcggggtgcggacggcgaggctcgcggggcggggagggcgcgcgcgagccggggctccctggagacgccaaggcaggtctgctcgcctttcatcttcctcccgcgctcctcctcctcctccctcccctccccccgccgcggctggcctggcctcccccggagcccccagccccacgcgggcacacgcagggtgggtggtcacgcccgcagggtccgcgagcgcggcgcagagcgcgggccgtgggaagtttctccggcgcgccccgtgcgcccccgccccccgcgcgcccccggcccatccccgtccctggagagctgtcgcttgcgcccgggcgcgcggctggctgcctcctcggcggcggcggcggcggccccattagcggagcctccgcctatgattggcttcgcccgggaagctggagacgggcgatgaataattgatgtgtgcggtgcggtagccggacggcggcggcggtggcgggcagcagcgagcgggagcgcgggagccggagcgccctcggagcgggcagcgcggagcgagcgggcgccggacccgcccgggcccccgcgccgccgccgccgccggggcgcggagcggggatgcaggcggcgcccgctgcctgcgcgcagcctttgttcggcgctggctgaatcctacccggagtcgctcgccgcggccgccgccggccgggccccaagcccccgagggcgccagggcgggatcgcgaccggtgcaacttctaggtaagtgcggggtcggaggggtcggcgcctgggcgcccacgggccgggccctgggctccctccgggcgcgggggtgagtgtgcgtgcctgtgtgtgacagaggagggccggtgcattgtgggtagcgccgtgtgctgcatggtgtcagccccaggcttggccgcgagagtggcaccggcgtgcaccgggccg

SEQ ID NO: 5394 - DNA, 919 bp, Homo sapiens
  source 1..919: mol_type = unassigned DNA
ccggggcgctcagtgtggttttcccacccgggagtctggaagggtctcccgcagcccgcaggagacgcagcgctccccgctcagggggagcaggaggacagctggccgctttcgggagccccaggcgcgaagcggcctctctccgcctcaggtgagtcctgctcgacgcccaaggcccaacggtcagaaccgcctctgcccgccggacccagcgaagctaggggaacaaatcccaaaaacagttcgggcctttccggtgcgctcacccctacacacgcgcctgctcgccacccaggagcggcgtcccgttgccaggcaacgagagctcgcgcctcaggagccagtgtaggcgccgcaaagcggaaggggcgcgcggataggtgagcagagggcacgcggtgggcagcgaagggggaacgcgcagcagagaggagagggcgtgcaggagtaggagcaggcggcagagtagagggggcgcggcagagtagagggggcgcggcagagtggagggggcgtgcaggagtaggagcccgccgcagagtagagggggcgcggcagagaggagggggcgtgcaggcgcggggcgcccggcagagagaaggggtcgtgcggaagggggcgcgcgccaggggagggggccagagaggagggggcgttcaggagtcgggcctgcggcagagatgaggcggtgtgcaggagggagagcgcgcacgagggggcaacgggcagagaggagagggaatgaaagaaggggagcgtggcagagagaagcgggcgcgctccagggggcggggtccagggaggagggggagcgtaggatcggggcgggaggcagagaggagcgggcacgcgggacgggcgtgtgctcgtgaggggtcgaggaaaggcgtatgtggaggcgcgcggggtgggtgagccg

SEQ ID NO: 5395 - DNA, 944 bp, Homo sapiens
  source 1..944: mol_type = unassigned DNA
ccgtcggagcgcgcggggacggcggcggcggcgctacctggaggcgcggtggcgggcaggtgcccgaactgcacggcgatgcagaggtcgttgtccagggggaacttgtggcagtgcagcatctcaggccaggggaagccgtaggcctccatgagcggcgcgcagccggcgcgcacggcctcgcacagcgagcggcacgggtagatgggccggtcgagacagacgggcgcaaagagcgagcacaggaagacctgcgtatccgagtggcagcgcttggccagcagcggcagccagctgctcgcctgctgcttcacttcggccaggctctcgtgctccagcaggttgggcagccgcatgcgcttgtagcccaccgtgtggcagagcggcaggtcggcagggatgtcaaggcactgcggcggcttggagtaggagcggccgtgcagcggctcggcctgccagccatagtagtcgtactcctcgcagcgcgccggcgcccagtgcagcgcccccagcagcagcgccagcgcggccgtccgcacgcccccccccgccgccgccgcccgcatggctgcgccctctccaggtgcgcgccgcgcagccccccgacgctcggtgcccggcggcccaggtgttccggcgtgcgcccccggccctgactctacccagccgccgccgccgccgccgcggaggtcgcccaggtgggtggcagcctgcgctgcgggcgccccgactgatcctggcgcctcccacctcggggctccagcccgggcctcgccgtgcgccccagccaatctccggccgcctggccccagctccaaggcggggaggcagtgggggcggccctcagcccctcccgcaccctgcccgagcgtcccgcccagcgccaggtcttgcgcccctctcccggctcggctcccctgccgcagccctggcctcgcccagcg

SEQ ID NO: 5396 - DNA, 1096 bp, Homo sapiens
  source 1..1096: mol_type = unassigned DNA
tcggccacgcgctgggtccggggaagaggcgcggccgcggccgaggcggggacagggaggcggcagcccctcctgcgcagcgacggcgcgggcgggcggaggccggggcgccccagccccccgcccccgctccctccggccgtgacgtcagagccggacggggtaaactgagcggcggcggcggggcgctggggcggagactgcgacccggagccgcccggactgacggagcccactgcggtgcgggcgttggcgcgggcacggaggacccgggcaggcatcgcaagcgaccccgaggtaacacggccccggttccctgctcgcagggcgcggtgccggaggggagcgggcccgggggaggcagggaggcagggaggcccccagagctacgcgggcggggctgcggggaccccggggcagccggggcgcagggcgcagggcgcaaggtgcacggggccgagcgtgcagtttgggaggtggcacagttgggggcggcggggatcagggcagcgtcctgggggttctaggttgggtctccagattgggtccccgacggcgctcgcgggcgctctttccagggagcgcgggctctcgtggggacgcgctcgaggcaggtgagccgaggctggggcgcccgggggtgtccccggatgccggtgcgcgcggctccctgacccgcccttccgcggcctgggggacgggagaatggggggtccacggccgccttgggtcctcaccgcgcaccgcgcccgcagcggagccccggagccatggccctgagcgagctggcgctggtccgctggctgcaggagagccgccgctcgcggaagctcatcctgttcatcgtgttcctggcgctgctgctggacaacatgctgctcactgtcgtgggtacgtgcggacagggcacccctgccccggcaccccagccccagcgccccttccccggcactccacttacccctgcgcggtcccggagctccgccaaggcccgggaaagttggagaactcgctttgcaaaaaagacatcccctccaggctgccgcgccggggctaggaggagccgcgttgtgtggcttcgctttcctgatgctcg

SEQ ID NO: 5397 - DNA, 4048 bp, Homo sapiens
  source 1..4048: mol_type = unassigned DNA
acgctagagaccgtggggcgagagagggagagagttggaagcccactgctccggcggggtcggcagctcccggtctcaactcgcaaacgaacgagccgggtcaagaatcgcgaacgcaccgaccctgggacctcgaggctaagcgtggttgatggggtgggaggaccccgtacccctcactccaggatccctcctggcctaggaaaccgctgggagttttgctaagtgtggggattggtataaccgaacggcgcctttagcccgggaaccagcccctgcccgcttaccctcgcggtgctcttggggcgatcccagttctcccgacgcggggccgcgtaaggcagcagcggcggagcgctaggctagaggaatctgtctgtccttctgtcctaccagcttgggcgaggcaggctcgggattcagggggccgcagcggaggcggcgccggccagggactctgcagggaccggggtgccccggagggagtggtgctggtggaggaggaggcggtggctgagggggagtaggtggggaaagaggaggaggaagaagaggaggaggaggaagaagaggaggaggaggagaagaagaaactggaggaagaggaggaggcgaaggaggaggagaagccgcagcgggcgccgcaggagcgagtgagctgggagcgaggggcgaaggcgcggagaagcccggccgcccggtgggcggcagaaggctcagccgaggcggcggcgccgactccgttccactctcggcccggatccaggcctccgggttcccaggcgctcacctccctctgacgcactttaaagagtctccccccttccacctcagggcgagtaatagcgaccaatcatcaagccatttaccaggcttcggaggaagctgtttatgtgatccccgcactaattaggctcatgaactaacaaatcgtttgcacaacttgtgaagaagcgaacacttccatggattgtccttggacttagggcgccctgcccgccttttgcagaggagaaaaaacttttttttttttttgcctcccccgagaactttccccccttctcctccctgcctctaactccgatccccccacgccatctcgccaaaaaaaaaaaaaaaaaaaaaaaagaaaaaaaaagaaaaaaaaagaaaaaaaattaccccaatccacgcctgcaaattcttctggaaggattttcccccctctcttcaggttgggcgcgtttggtgcaagattctcgggatcctcggctttgcctctccctctccctcccccctcctttcctttttcctttcctttcctttctttcttcctttccttccccccacccccacccccaccccaaacaaacgagtccccaattctcgtccgtcctcgccgcgggcagcgggcggcggaggcagcgtgcggcggtcgccaggagctgggagcccagggcgcccgctcctcggcgcagcatgttccagccggcgcccaagcgctgcttcaccatcgagtcgctggtggccaaggacagtcccctgcccgcctcgcgctccgaggaccccatccgtcccgcggcactcagctacgctaactccagccccataaatccgttcctcaacggcttccactcggccgccgccgccgccgccggtaggggcgtctactccaacccggacttggtgttcgccgaggcggtctcgcacccgcccaaccccgccgtgccagtgcacccggtgccgccgccgcacgccctggccgcccaccccctaccctcctcgcactcgccacaccccctattcgcctcgcagcagcgggatccgtccaccttctacccctggctcatccaccgctaccgatatctgggtcatcgcttccaaggtacgtgccacgtcgcggaactgcagcgcgccgctcccgccgcatccttcactgcccccggcctgctccgggtgggcgcttggcaaggcctgggcggaggttcctccggctcgcgggccagcgcgccctgttgggaaactaggcggcgcggggccgggcgtggtgtcgatccccagtctccgaagctacgactggtttggagtgatggcctgcgggccgcttgaccctttgggaaggggtgcgaacggagaagttgtcccccagtgcgctcgaatcagagcaggctgggctgtgcgtgcccggcgccgcggagcccagagcccgcgggatccccaggctcctggtaccctcggcaatgcccccaaccgtcctggctccgaggggcgcggacaggactcggccgccaggcttgctttcgactgcgttcgaccctgttcaccacccactttgcgccccttcagtccagacccgcggcttcttagtcttccaccctcttctggaggcgagaggatcctcgcgccccgggagaaaagtatgggatttgttttttctttcctgcttttcggaggcctggggaggggcgggaacccgtgcgggaggaaagctccagggcttggcgctctcgccgcgacctgcttaattggggcgccgagcagccacagcgggaaggcaggttcggtctggtttttgtttttctttctttctttaaaaaaaaaaaaaaagaacctggtcaggaaactgtcttagagggaaatatctgttcgtgtgttttcatttcttgcgatattttttatttgtttgtttttctctgggtacggggtgggaggaggagagttaaaacttcagaaaaaggagtaattagtttacggattggagtcagtaaaagacctacctccggcggcagccgatcaatactccgcggcttgtccattcattaacccattgcgttcctgccggagcctagaatcgggtagatgtcacccccctccccatattttaaaaaatcaaaccaaaggaaaaaaaacccaaaaagccttttacccttaatcccgaactggatttgcctgcatcctgcctggactgtcggcttgtttttctttgtttgggttttcggtgaatcgatttcctatgctaatgagtgaacccaaaactctgaggctttgcttgaaaagtttagggctgcccttcctcattcgctatcagtcatgcttatggtcccctcaccagacccggagccgctgggatcttcctgcgttacagactgtcctggcggtgtctgcaagtcggtaaccccccgggtttcgatcccttcgctcgcgtttctcttctagttctcgggagccgggagccccggagcccagttcgcgagaggcagcagcggctgtagccaagcacacccgccggccagatttctgtcccgatcgggcttcaacgactcgccccgcctctatacttttccggaggggcaataaaacaaataatttaaaaataaatctccatgaaaactctggagagcagcccgccgcctttccaccgtgggtcaaagttccccgagaggttagaaagaagagaaagtagtttcttcgggttgtgggcgccaatcccctggccaggctctgcggctccctcccctgcctccagcgcccggcgaggaggtggcgaggcccgcggcgccagggcggctgcggagccggccgaggtcaggagcctggggactggctcctctgcgacagcggctggttgggtgccgcaccggtggagacccggcgttccgggccgggcagctgagcaggcgttcccttcgtgagcccttgggaggaccaccggcccccgcaggtcgagcggcgcggctatgcgaaggccctgagcacggtgccgggccagcccggctcgggagaagtgcgcggctccggtcagagcagccccccctaatgggatttctgctgtgctccccgcagggaacgacactagccccgagagtttccttttgcacaacgcgctggcccgaaagcccaagcggatccgaaccgccttctccccgtcccagcttctaaggctggaacacgcctttgagaagaatcactacgtggtgggcgccgaaaggaagcagctggcacacagcctcagcctcacggaaactcaggtgactgcggcccgggcgcgaggaacccatctaggcgtgcg

SEQ ID NO: 5398 - DNA, 3292 bp, Homo sapiens
  source 1..3292: mol_type = unassigned DNA
tcgctgccgtcgagacgcgcagcggatgccgctgcttgccgcggcggaggaagctacgccgctgcgccttcggttcaccttgcccccattaaagcgttagttagacagctccaaacgccagctggccggagagacttcctgggagaaagtgctgtcgtcggggtcacagactcggagttgatccgcgagccttgggcaccggcggccagagcagaggggtgcccttccgagagcagccgtcggtgccgagaagctgttgccccagcagccccaccgagtgacgcgcgggttttggccgggtcagcgcgcatacgcacacaggcacacccactcctggtcccgggggaaggctcactcttcggttttccagggctaaaggccaaggccacgcggatttctgagtccgaagacgcagtgcgaggacttacacctggattcccttactatcggctggatggtgggtggggaacccaaatccctctcttcttggcctcgcccttcctagcaggctttaggaaaaataccgaggtcgccggaccccaaagggtaggaaaatgatgagttctccgagggccgaggtcacgtcctgcctcttgggccggcgctgcgtggctctccagctgcgtgggggcggcgggcccctgtccagccccagggggcgggggagcggcagctgcgagcgcagataaccccgaggtgacccgggagggcctggtccgcccctcccccctcccgcaggcctggcggcgggaagcgggtccctgcgccgcaggggggagaggcaggcgcggtctccgggctcgcggccgttagtgcgcttcggccaagggcgccgcctgctccgcgtccctcgctcgcctcctgcgctcgcaggagcgctccgagtgcctctttagcgggagccaatatccttttgtgctaataggcttgtcctcatttgctgcctaattggactatataaagccaataacgggcgggctcttatagcccgaagccaaagcgccaaaatccgagggaaggcgaggagggggcggtggcggaggcggctgcggggccggggctcggctgagccttcgcctgcctaatcccatttgccattgtacgcgcccaatcgccgtatactccccgcatttaacttggatgacattttgatttcatcattagcatccggcgccggattgacgcagcctcgagccggggactgctcttgctgcctcctccgcgggagccgcagccgcagccgagccgcctcgatccctcggtgccgcggcagggccgctccccgcccctccgcacccctccctcatgcgagcccgcccgtctgggtcctcactccgccctcccgccgttggatttgcgcccggggcggcccccgactttgcgccccgtagttgagttccgtttatggtctgatttccggcctctcgcctgctcgccccgccgcccgcctgtcccgctccctccctcccggggacccggaggagaggggaccatgccggaacccgggccggacgctgccggcaccgccagcgcacagccccaaccgccgccgccccccccacccgctcccaaggagtccccgttctccatcaagaacctgctcaacggagaccaccaccggccgccccctaagcctcagccgcccccacggacgctcttcgcgccagcctcggctgccgccgccgccgccgctgccgctgccgcggcggccaagggggccctggagggcgccgcgggcttcgcgctctcgcaggtgggcgacctggctttccctcgctttgagatcccggcgcagaggtttgccctgcccgcgcactacctggagcgctccccagcctggtggtacccctacaccctgacccccgccggcggccacctcccgcgacctgaaggtaccgacctctctttgaactttcgttgtccccctgcgcgcccgccccgtccccgccccgcgctgcttccctccgcagttctgggaccccagcacccgcaaaccctctgctcggtcagtttttttcggcccctagcctgccctcgcgctgggttgcgctgcccgttaatccaatcccacttggtgagaaaagaagtggaattggagccccgggcacggtgcttcccgggaaaagtggcctcgggcgtgaatagggaggcttcggacggccggggcttgggacacggcctggaaggagggggtgattccaatgcgcctaagccgaaagggaaccgttctgccggcccctggcgaggaagctgagggaatggaaggaggtggccgcgctaccaccatctgcttgcctgtcctcgggaggagggggatcccaggactcggcgtcccttctctggcccagccgagaaggaggcagcccgcgggaatggtgaggcctcatggcctgggacctggaggccggcgcgggttgagcctgccgtccccaggcgccgggcctcgctcaaggctgtgtcggtgtgcatgtgtgtgcgtccgtctgtctgtctccccagcctcggagaaggccttgctgagagactcctcccccgcctccggcacagaccgcgactctccggagccactgctcaaggccgaccccgatcacaaggagctggactccaagagcccggacgagatcattctggaggagagcgactccgaggaaagcaaaaaggaaggcgaagcggcgccaggcgcggccggggcgagcgtaggggcggcggcggccactccgggcgcagaagactggaagaagggcgctgaaagtccagagaagaagccggcgtgccgcaagaagaagacgcgcacagtcttctcgcgcagccaggtcttccagctcgagtccaccttcgacatgaagcgctatctgagcagctcggagcgagccggcctggccgcgtccctgcacctcaccgagacgcaggtcaagatctggttccagaaccgccgcaacaagtggaagcggcagctggcggcggagctggaggcggccaacctgagccatgccgcggcgcagcgcatcgtgcgggtgcccatcctctaccacgagaactcggcggccgagggcgcggcggctgcagccgcgggggccccggtgccagtcagccagccgctgctcaccttcccgcaccccgtctactactcgcacccggtggtctcttccgtgccgctgctacggccggtctgaggccccagaggggtgggggagggagcgcccggcctccttgtccggaccccggaggagactgggccgggccgagggcgccgagaagtccagcggccttcaggaactggggcttgggcgcg

SEQ ID NO: 5399 - DNA, 3753 bp, Homo sapiens
  source 1..3753: mol_type = unassigned DNA
gcgcggagacccgtcgcctgcggaggcgtcgagccactccagctccgagtcccgcaccgcccctgcctctggagagaagggtccaaggggtccaaggagtcggagttgccgcagccgccaggaacccgggctagaatctgcagctgctttcagccctggctgcccctggttagacgccgctgatgcccgccaggccctcggcgcgctctgggggcgcaccggtgctgtgtgcctggccggagcgttttgaaattttccggggccgctcggcggcgctgcgattggccgcgttcgggtaacctctatgcaaatgaggccgcgccgcctccgcgccgccggagacccggcgagttggcgggcgaggaaggggcatttgcaccggggctgggcgggcgcacccagagccaggcgggcaggaacccctgcgcagccatccggtgcctgcatgtccctggcgcggaagggacgcctcaccagcctcggcgccccctccccctagatttcctccccgcccctccccactgcctgcctgctgcaccaccttccacccagatcacccagatcgtctctaaagggagttcttggtttccttcgatttcttatgaacccaggatgggcagcaaagaagatgcgggcaaggggtgtccggcggccggtggcgtctccagcttcaccatccagtccatcctgggcgggggcccctcggaggcaccgcgggagcccgtcggctggccagccaggaagcgcagcctgtccgtgtcctcggaggaggaggagccggacgacggctggaaggcgcccgcctgcttctgcccagaccagcacggccctaaggagcagggccccaagcaccatccccccatcccttttccttgcctgggtaaggatcgcacgtcgccagtgtggcagcgagcgagcgcgaggggagggaggctgagcgccccgccaagactcccgcgccgggccccctctggccagagctgcggcagccgggggttcgggaccgcggggagaggggcgcgcactgtggtgcctcctccgcccggtgggcccctgggagcaggcgaacacagacccgtgccggcttgggcttcctggggaaggttgagttgttgagagagtggaccacagcgagagggacacgcggccggccttacacccggctgtcctcaatcactgcacatctggtactttctttccggacacgaggtggagatctgcaagtcgggtctgggcagtctgtctccaccgtaatctctttctgagtcttcttcctcactcgctccgtatctctgcctttctctctctctcctccttggaatgattagcactccaagatgattgacaatggtgcatttcagagacggttcctctttacaacatttgacgaaggggagtcctgcgttagtccttagcgtgatttccaaacaaacggcctgtgaaatgatgccaccctataaagctcgaggaactcttccagctcaattaccaccaagcaaattcgccttttaaaaccatgctaatgtttccccctccagacctcctctccctgttgcccctggcccattcataaaggtgggagcacagagaccccatactccaagtagctgggtccctctcttgtcgcttttaaaggacggggtgctgggtttggggggccagtgagagggataagaggaggggattggtaaggtgggaccaaggctgcaggcgcttgccaaccgcttggtcccagggagagctggcggtctccgaggctccccaaccaactccatggcctttctgtctgttctcgctcctcaggtacccccaagggcagcggaggctcgggcccgggcggcttggagcgcacgcctttcctctctccttcgcactcggactttaaagaagagaaagagaggctcctgcccgcgggctcgccctcgccggggtccgagcggccgcgggacggcggcgctgagcggcaggccggcgcggccaagaagaagacgcgcaccgtcttttcgcgcagccaggtgtaccagctcgagtccaccttcgacatgaagcgctacctgagcagctcggagcgcgcctgcctcgcctccagcctgcagctcacggagacccaggtaaagacttggttccagaaccgccgcaacaagtggaagcggcagctctcggctgagctggaggcggccaacatggcgcacgcgtcggcgcagactctggtgagcatgccgctggtgttccgggacagttcgctgctgcgcgtgccggtgccgcgctcgctcgcctttcccgcgccgctctactacccgggaagcaacctctcggccttacctctctacaacctatacaacaagctcgactactgaccggcccgccgccccgcgccgcccccagctgcccgcagagccgggcgcgtactgtactgtaagcagggctccggagcaaggcggcgtgtttccagaaatatgaagaaatacaccatgtgtattcattagctcttatttatggtctctgccctactttttgttttgattgtttcgggtatttattggcattccctaagtcagagagcctgcttcctacctagaccgaaccagtacgctttgaaaaccattcggagtgagatgttctcgggtggtggtgggaaagggagttttggccagacaggctgtggttggtagggaaaaaaatcaggaaaacacctacaaaaccaggtacactcctcccccatatatacacctgtatatatgtacatgcatacacgctcggccaagccaggccctcagaggctttggacaattactaaattgcttcttttcgtttccctcatcccgaggatggtagggacgaaaaggggagagttcagatctgtaaatatttttaaaaagaaaaaaaaataaaacattttaaacatctttgctaactttggtgggcttggttacccggcatgataacgcacggaaggttttcaggtttttcggtggaaagacttgcatgcgtctgtctgtggaagtttggctcgctccacgtggagggtgggaccggggtcaggggttaaaggtcgggaccttggcgccgcccagactgcacgtggctggagctgcccgcccactctccctcctaacgcccagaatcgtcgcgcgggctggggcgcaccccggctggaatccagctcaagagtccgcgcggagaaagacaaagactgggaggcaggcctcgccatttaagcgattgccttctgggaacaagcgagctgggtgcccagcggcatattcccggcactgggctcgccttgagcttggccacagcagctcccgctatgacatgccctgtgccgcgcacttcctctccaggggtataaagcaggcgatggcgctgcttgtacctagtaaagcctccactttgctcgccgcgagcttggcgcgaccagcttgtcgctgcgcccagctacccggccggtggcagagttatgtgtctcgcgcggagagggaactgggcgcggtgaggcagttctgcggctcaggagagatccgaggcccgggaccaggcaaagaaggtgagggaggcaaaggcgcttccctacactcttttgttgttaatagtttgcattggttcagcgtgtggctggatcaccggctagcacgcggccgcttgctctgaatggaaccttgacgcgcggcgggggcgcccacggacttcctcgccctgacacctgcggccgcgcaggggctgggagggcgctgcaccgagagaatagccgcg

SEQ ID NO: 5400 - DNA, 829 bp, Homo sapiens; identical to SEQ ID NO: 5389
  source 1..829: mol_type = unassigned DNA

SEQ ID NO: 5401 - DNA, 1328 bp, Homo sapiens
  source 1..1328: mol_type = unassigned DNA
gcggggccgctgcgcgcccccctaagtgtgttagcgggggaggcggggctggaaaggaaacctggtgaagggctggcccggagcctggggtggggatattcactgcgggatagggccagcaagaggacccgacacgcatcgtcccgagtgacacgtgtaaatgtcaagatacagagacatctgcaaatgtcacccaagagggtgaggacgggggagcggtcccgaggctgtgccctccggggcaggtactggctcctgtggggctgcgggccaagtgtcgcccttccccaaggaattggcacctggggggggggggtcggtctcgccgcgctggaagcgcaagccccggggctccggagatgcgccggggcgcgtcgcccctcggggcagccctggacctcggcgcgcccaggcgcagcgtgcggtgccctcggcggggcgggcagcgagccgccctagttcggcgacttacctcgggcctcgcagggcgcgagcagagcaccggccagggcgagcaggagggcgcgggcgggggacacgggcagcgggcgcgctgccatcgtcgccggccttcagtgcagcagctctcgggcccggcggcgagcgctgcaccatcccacgcgggcgccgagccggggccgggcgtcgcgaccggagggatttcctgcctcggcgagtcagctccggagccctcgcgcagcgcccgcgccgccgctgagctcttctagcctttcatttttaaaaaagtttccccccgtgtgtgtgcgtgcgtgcgcgcgcgcgcgccgttctggcacaagccagccttgaccgttgcaataaatgagcaaactgtccgagttggcccggggactaggaagagcgttagtgagagaaggcaggcctgtgaaatggatccacggccagcagtcaccgttcttattaccgcggaacaaattattgtctcccccgcacccccgccagttggcggcgtcccgcgggtcctagagaccgctcgggtccccccgccagggtcccgccccgagccgcggctcgctcacccccgagggtgggcggctcagacgtggctcagtggcgtccgggcgcccggagcgcacacgtccccgccccaggatgatgtggccgcagggcccggggcgcccggctgccaagcgcacatgcggcggcacggtccagcttttcaggctgaagctggaaacgatgactctgctactcgctccccggctctctgggaaccctcggagtgcgggtcaggtctccaccgcggcccacagcccggcgcgcgaccccgcccggccctaagcgcccaaaggggcatctctcgcccg

SEQ ID NO: 5402 - DNA, 2957 bp, Homo sapiens
  source 1..2957: mol_type = unassigned DNA
tcgcctctttcgcacaggtgcccgactcggagtccgggaggcgggccctctttccaggtacccagcccagcgtcagcctgggtccatcctccgccaccccacagcgcggggagcaggggaggccgaaagccgggcagcttggggggccgggataacccgggctgcagcaaccccgggcggcagcaggactggagagctggtgtcggacgcactgcagagacgtccctgttttcggcgcgtcctccgacacccagcagagagcttggcgctctccgctctgcgcgcccgaggtcacagcgcggagaaacctggcggggccccggactccccggcttgggaaaagcgatgactgccctgaactgctggggcgttcgaaatttccagggtcccgaccctccgtggggtacgcgcgacttcggcgcagatgtcagtccgctgccttccgggttgagggagcgaggactccagacgaccccagggccgctgtccaggcccagccccgcgttctccacctcgccacctcgctctgcggctccagcctggagatctacggacttcattgcgatctcttgcgcagtgtagtcgccctctatccctagccccgagtcccgggtaacccaggggccccggcgaggcgagtttctttggggcgagatgtcccgagccgagcaaaggggccgcgcattggacggggctcccaagccacagccctgggggccttgaggagtcgtggtacggtccagggcagtcggggctgcggggcccgtgaagccagacgaggctacggacttagggtccctgcaaccaagaccgcgagcgactgtggactcgggacggatcgcacaaaggaggaagggggaatcagaggggcgtccggtccaggacgtgtcaggcctgggcggggcggaaaactgacaccagggcgaggacaaggatttcgctcctccagggctgccaggggaggggctcgccaccgtcactctccatgggctctggccccgacggtgtttaaagggcggagggctgggccgggctggtcgcacccgggcgctgctggcggccaagctggatgggtcgccagtgagtttcggtgcggcaccgctggcccaggcccgggcgcggctggacatggccacctactgcgacgacctgggcccctcctcggccccgcccggccaggcccaggccaccgcgcaccccccgggctatgagccaggggatctgggcgcggtgggcgggggccccctcctgtgggtgaacgcgccagcgctcagccccaagtcctacgcttcgggtcccgggcctgcgccgccctacgcggccccgagctacggggctcccggcccgctcctcggcgccccgggcggcctggcgggcgccgacctcgcctggctgagcctctccggccagcaggagctgctgaggctggtgcggccgccctactcctactcggcgctcatcgccatggccatccagagcgcgccgctgcggaagctgacgctcagccagatctaccagtacgtggctggtaacttccctttctacaagcgcagcaaggcgggctggcagaactccatccgccacaacctgtcgctcaacgactgcttcaagaaggtgccccgcgacgaggacgacccaggtaacagcggcgcgccggctcgctccgtccaggactccccatcttcccgccgggccgcgggcactccgggggtgggagcaccttagacaacctaatttctccctgcgcggttggggatacccggggaggagggagaaggggaagaagtgcttgggcatggacaggttctcagacagcggctgagcccaccacaggcccgcgtttacagtgcggcggtcccggggctctcaatctctgtgcgctccttcggaggaagaagcgggagagccagcaagctgggtgaccttgggagtgactcaacttccctgggcctcagtgccctacctggtaaaatggggaagacagcgcctaccccaaggatgggcaaaacaaataggatgcccgtttggaaagctctggagcctacctgggggcctggcgtggtctgcgctgtccttggcagagcggctggcggagtcccaccattagcatctcgcaggccttccttcaccttaacggggctcggcctttcccagggctcccttcctcctcctttctggattgtcactttcttcccagtcctgctgtggaggcccatcgggtacagagtgcccgtcaagggtggaatgggggcgaggactcagaccctctgtaagggccagcaggggatctttctgaagctgacctcctcgctggctcacaccacggcccgtcaaagctcgaaccttctgaactgggctgtttcttcttctgcaggtaaaggcaattactggaccctggaccccaactgcgagaagatgtttgacaacgggaacttccgaaggaagaggaagaggagagctgaagccagcgcggccgtgcgctcgggagccaggagcgtgggaggggccgaggcgccagcgctggagcccccgagcgcggcttgcctggacctgcaggcctcgccctctccatccgcacccgaggccgccacctgcttctccggtttcgcttctgctatgagcgctctggctggcggccttggcaccttccccgggggcctggcgggcgacttttctttcgggaggcggccaccgacagtcgccacccacgctccccagacccttaacccctcccctggcttcgcccctggccaccagaccgcggccgccggcttccgcctcagtcacctcctctacagccgggaagggaccgaagtttgaagggaggctggaggctagccgggtgcgggtccagaggtgctgagctcaggcctccggtttcccctggtgacagccccacgtgttggcgttgaaggccttggtgccctgggaggaagcgcagagccgggggcggctcg

SEQ ID NO: 5403 - DNA, 1860 bp, Homo sapiens; identical to SEQ ID NO: 5175
  source 1..1860: mol_type = unassigned DNA

SEQ ID NO: 5404 - DNA, 1422 bp, Homo sapiens
  source 1..1422: mol_type = unassigned DNA
tcgtgcagtccgcccggcggcgttttcgggcgagggtctggtgctggggagcgagcgcggagcgaggtgtctctttaaatacgctctgcagtgtgacggcggccgcccggctggaagagccatccccaccctgcggcaggagcccgcccgccgccatcgcccgccccggtccccatggttacgcgcctgcctccggccccgggtccccgctgtcgccgcgggaggtgcgcgcagaggcggcggcgctgctggccgggctgggccgctcgtgcgcggggctgtgactcaccggccggcgccgcagccccgcaatctgttgataactcggtcccagctcggccgctgccctcgcgaatggagagcgggtccccggcggggggagcgcagcgcgtctgtctccgggagcgcggcccggccgccccggcagccgcttcggccacagcaggtgggaaggacgcgcgggtctgggcggcgggagggacgcgcggggccgcggctcggcagaaaagctcgcgccccgaggtgacactggccgcgaggaaagcagctccgagtaactttcggctccgctggggcgggaggcgccacggataatccagggcccccgccccgcgcgcccggcccggagctcgagccacatccaggcagagcaggcgccgcggccgggctggggcgggcgggtcactcggtgccggttcccggtgcaaaccccccggcgcgcctctggctttgtgcagcccgagatggttgagtttggctccggagccgggagtggggcgcagattgatttttaaatatggagaaggagacgcatctgccgctggcgcgttcggtccgagccccccaccggtccccaccggcaccgcctccgccagccccaggcgcagcccccaggccgcccgcggaggggagggagcgacaggggccgcggctgctccctggcggggtcggggctgcgagctgccctccgcggggaccctccgcccgccccgctgaccgccgctgtcttcacagatgggagcagctcccggactgcgcccgccccgccgcggtcaccctgaggccaggggcccgggagcgcgacctcctggccgccgtctgggactttgaccttccagaggccatggaggctggcggggagcagggcgccacctgatcgcctccccctggacgcctcctccagcggcgctcacgcttccgcaactttgcagcgctcatggtgagtacgggggtcccgggggtcctgcagctgggggctaggccgctgcgggggggcggccacccgtatggggactcccaggctggaaaagttgtggaatggcgagctggtgaccgggcttccgggctcagtgccggggtgggaggctctgtggagtgggggccggggacaggccgcgtgtctgggcacctctgctccccgcg

SEQ ID NO: 5405 - DNA, 1479 bp, Homo sapiens
  source 1..1479: mol_type = unassigned DNA
gcggctctttccaagttcgaagcagggactcggttctgcgcatctggcgggtgtgcccagattgtaaccttcgcactaggcatccaagaacgtgctttggacacactcggcggtgggagcgggtgcttggtttgcatcagggatgaggggtggagtagcgaaagcgcccggagcgcgcactcactcacactccccaagccagggcgcggccgctctgggcgcgaggtcccaagccaagtctcgcgctcggccaggagccggggagtaccccaggtccccggtctggggccgccgctatcctaccctgcggcgcgcactcctgacctggccccgccccccggcggccgcgagtagcgggcggagcgcaagcagagaggcgctctgggctgtgcggcaccgcctctcctcggtgtctggggagggacggagggaccgggcgggagagagagaaagcctgaccgaccggctggcgaagagctgcatgcaaccggtgggaggccgggccggctgggtctggggctcgggctcaggctcgcaccgtttctcggcaggtccctggcggtgagcgcggacggcccggaggcggcggctctgagctggcaggcggagggctgtctcctgcgcccgcctgcccggcgcggtccgaggatgcgggggggcgatgcccggggccagggacgcgctctgtcaccaggcgctgcagctgctggccgagctctgtgcccgtggggccctggagcacgacagctgccaggatttcatttaccacctgcgggaccgtgccagaccccggctccgcgacccaggtgagtgccgccaccgccgcctggagggacctaagggccctgggctgggacttggggccgcaccggggcctgaggcagaacagcgacgcggactgggagagggcggggggcggccaccgagccaggagagtgatcaagaaccagcgcactgtggcctgatgctgtaaccaggcggggacccgggcggtggctactgcacggaggccgactccgggtcggctagggcagggttggagggaccacgcccgccacctgcgctcccatcgccaaggctcctgggggcggctccctagctccgagctacgctctccacttcccgggctatctgcactcagagcgaggggaggccgcggcggcctcggagccgtgggaagggggacgaggccgaaggaaactctgggaagttgggagttggggacggccccgggttggggccgaatcccaccgggtgctgctcatcctttctcccaagcgtctagttcctttccttggtatggggtgagaagggcgggacgcgatccggcgttgggccggggacagggtgcttctggccttgggcagacgggcctgaacccgttcccggcgggtcgcacggcatggaggtggcctgggcctgggcgctaggctcgaccagcgactaccgccggccacgatggggttcgtagactcgtcg

SEQ ID NO: 5406 - DNA, 446 bp, Homo sapiens
  source 1..446: mol_type = unassigned DNA
ccgccacccgctgataacaacggaaccgtgggcattggcccttcaacgccgtctcgcccgccctctccagtcagtttggtggatatttcggtgaaggctgcagactctcagagtcacccctccctcaagcagcgttctccgtactcttcggcgccgggaagctcagagggagctggcctgctcttaccttcaggtgtcggcggcggctcctgccgcttcccgcgggacaggaaggccttgggcagcagcagcgacagagccaggacaagcccagaagccagagcgactctctgcactgtggagtacgccatgactgctcacggtggtcgcaggtgcagacgccagccggaaccggaaccggaaccggagcacgggctgccgctcccgaccgaaccgcgggcggcgcggacggcgtcgcgcgagggacaaggtgcgcgaggcgcacg

SEQ ID NO: 5407 - DNA, 2991 bp, Homo sapiens
  source 1..2991: mol_type = unassigned DNA
gcgcgcgcagccagcgtttcccgcggatacagcagtcgggtgttggagaggtttggaaagggcgtgccggagagccaagtgcagccgcctagggctgccggtcgctccctccctccctgcccggtaggggacctagcgcgcacgccagtgtggaggggcgggctggctggccagtctgcgggcccctgcggccaccccggggacccccccaagccccgccccgcagtgttcctattggcctcggactccccctcccccagctgcccgcctgggctccggggcgtttaggctactacggataaatagcccagggcgcctggcgagaagctaggggtgaggaagccctggggcgctgccgccgctttccttaaccacaaatcaggccggacaggagagggaggggtgggggacagtgggtgggcattcagactgccagcactttgctatctacagccggggctcccgagcggcagaaagttccggccactctctgccgcttgggttgggcgaagccaggaccgtgccgcgccaccgccaggatatggagctactgtcgccaccgctccgcgacgtagacctgacggcccccgacggctctctctgctcctttgccacaacggacgacttctatgacgacccgtgtttcgactccccggacctgcgcttcttcgaagacctggacccgcgcctgatgcacgtgggcgcgctcctgaaacccgaagagcactcgcacttccccgcggcggtgcacccggccccgggcgcacgtgaggacgagcatgtgcgcgcgcccagcgggcaccaccaggcgggccgctgcctactgtgggcctgcaaggcgtgcaagcgcaagaccaccaacgccgaccgccgcaaggccgccaccatgcgcgagcggcgccgcctgagcaaagtaaatgaggcctttgagacactcaagcgctgcacgtcgagcaatccaaaccagcggttgcccaaggtggagatcctgcgcaacgccatccgctatatcgagggcctgcaggctctgctgcgcgaccaggacgccgcgccccctggcgccgcagccgccttctatgcgccgggcccgctgcccccgggccgcggcggcgagcactacagcggcgactccgacgcgtccagcccgcgctccaactgctccgacggcatggtaaggccgggaccccaggaagtgaggaagttagggcggcgctcgggatatcagggacgcgtttccgagggcggggagctggccttgcgggaggtttgggccaggatccttcccgagagagaggacccccttgtcctgggcagctgtcactggggtagcctgttttggaagtgtgcgggcaagcgttcgagctgccccattgggggcgctattagaacactgcagcgcgaacgtgaagatctttttctctacttatccctacttccaaaatgtaaatttgcgccccttggtgactgtccgcccttggtttggccctgcatgttgcagacctcatctcctacccacccgtaattacccccccaaccaggacaggtctgggcccggaactagagccttaggctagagttagggagggggcggctacaggaattggtgttcgggcctcgagccgtcccgcgggcctgactcagtcgcccttgctgtttgcagatggactacagcggccccccgagcggcgcccggcggcggaactgctacgaaggcgcctactacaacgaggcgcccagcggtgggtattccgggcctctccctgctcgctcctcctccttcatggagctgtcctggcctctatctaggacgctcccacccccactcacacacgcctatgtcctgggaagtggtgcaggagatgaaatactaagcaagtagctccctgtcttttggattgtcccggactctaactaaagtcctcagtttccaatctgtctcaaagtactgggcccgggggtgggaggcttgtcgcggccccacccctgcttactaaccgagccctccccgcgcagaacccaggcccgggaagagtgcggcggtgtcgagcctagactgcctgtccagcatcgtggagcgcatctccaccgagagccctgcggcgcccgccctcctgctggcggacgtgccttctgagtcgcctccgcgcaggcaagaggctgccgcccccagcgagggagagagcagcggcgaccccacccagtcaccggacgccgccccgcagtgccctgcgggtgcgaaccccaacccgatataccaggtgctctgaggggatggtggccgcccacccgcccgagggatggtgcccctagggtccctcgcgcccaaaagattgaacttaaatgcccccctcccaacagcgctttaaaagcgacctctcttgaggtaggagaggcgggagaactgaagtttccgcccccgccccacagggcaaggacacagcgcggttttttccacgcagcacccttctcggagacccattgcgatggccgctccgtgttcctcggtgggccagagctgaaccttgaggggctaggttcagctttctcgcgccctcccccatgggggtgagaccctcgcagacctaagccctgccccgggatgcaccggttatttgggggggcgtgagacccagtgcactccggtcccaaatgtagcaggtgtaaccgtaacccacccccaacccgtttcccggttcaggaccactttttgtaatacttttgtaatctattcctgtaaataagagttgctttgccagagcaggagcccctggggctgtatttatctctgaggcatggtgtgtggtgctacagggaatttgtacgtttataccgcaggcgggcgagccgcgggcgctcgctcaggtgatcaaaataaaggcgctaatttataccgccgtggctccggctttccctggacatgggtgtgggatccggaggaaaatccgcaaactgggccagctgtccctcagcgacgcctgtaggcggcaggcg

SEQ ID NO: 5408 - DNA, 928 bp, Homo sapiens
  source 1..928: mol_type = unassigned DNA
gcgggggcgagggggcgagggctggccgcccgtgaaaggaaaaataaatcctaaggaagcaagaaatcggacgaaaggatcttactttaagtgatctccttgaacgcgtcttttcaaactccgcgatagcccaaggagctgcgcggcgcggcggctgcggctaagacctgtgactaatgccatttgacctgagcccatggggttttgtgcgtcctgccattcactgttatgtcgttatcttcaagtttatttcggagaaatcactcgcgttctttgtctcaaggctgagctttctgtctatttctctttcaagagaaaagaagacgggaggggaaaagagagaatcggagtccctggtttggggtttaaggtccttgcctacgctgcgggggaggccgcagcagatccggctggggctccccgggcctaggtggccaaagctgccgaaacctgccttggatagtagaaagagcgtgtcggaacgcactctgggggtttcgttccccccgcgcaggggagagcgagcatgttcctgccccgggcgccgtgcggtcgcagcagcagcgcggccctctccagtgcgagccgtgcctggaatgtctcgggtaagcgaagggccagcaagcgaggcgaaacggacactataaagcagagagtggtgtgagcttccccgccctctgaaaagatggcaagtctccgtttcgggaaggctgcaacgctaaggtcaccctttgcaggcttcggacccccagtcctccatgctccctgccggagcagccaacagagtgagagcgcattttggaaagattggccggatgccgggcggcgacagggaaaagcgcccgacgcctggctttggggtggggggtgtggggagggggggcagggagctaacgggcgaggcgaaggaggagggctgcgaggctcg

SEQ ID NO: 5409 - DNA, 1267 bp, Homo sapiens
  source 1..1267: mol_type = unassigned DNA
gcgaatcccgagtaattgttttccgagggggtccgtgcgcgctcggtggcgccgcctcggtctgggttcccccgaggaaaaatacccacccgcgagggctcggcggcttttcgactcggcggggatgaactgtggcaacttcggcagcccccaccgcggtgcggaagtaaagagggcaacattggcgactgcggctcggaggggctggagcgcgtgaagccgtgggggcgccgtgcgcctcccgctctctcgtttcggccgcaggtcctgggactccgacttcggtgctccgggtgatagcggctgcggcgcctgcagtccagatcctcgcagttctgcgggcgaaggaggcgaacggaatcggcccccagtggggagcgcaacaagccacagtagccaaaccccgcgctcctgcccgggctcccagacgaacgcagccgcagcggggggccgggccccgagccccacgccgccgccgccgcgccagcggtggggggcgggctgggggcggggcggccggggctgccttcccgggcgcatatgcgagcgcagcacccggcgctgccgagccacctcccccgccgcccgctagcaagtttggcggctccaagccaggcgcgcctcaggatccaggctcatttgcttccacctagcttcggtgccccctgctaggcggggaccctcgagagcgatgccgatggatttgattttagttgtgtggttctgtgtgtgcactgccaggacaggtaagcatgactgtggcggttagagggatccgggaaatgggggtgcccacagaccacggcggcgtggggagacctggagccgagctttgcgctggtctggggaacggcggtagcgtggaccggttcctgggatctctttgccctgctcggagtgacagggtgaaaatagggactcacgggcttgaagatgtccccgttgagtgccccttctcaggggacccggcctcaggggcgcaggagtgaggggcgcggccgagtaggcgcaccctcttgctgctagtaaccggctttccgtcccagggagtcgaaacccgcagcagggcgggcccgcgtgccccgagttcccgaacttgtaaggtgctgtggaaaccactctcgccgacccccgccaggctgggaaggggtagctgcgggagtcgcacccgcagagggagcgcttccggctggcgggcgcggccggggcccgggagggcgcggtgcggcgagggcagagagctgcgggagaaccctgggatcccgcg

SEQ ID NO: 5410 - DNA, 1225 bp, Homo sapiens
  source 1..1225: mol_type = unassigned DNA
gcggaagtcgctccggatcatgcatggaaggctaattgaaaagatcagtcggggcgcttgtggcagccttgtcactttgtgacagtgctccgctccgggaaattgcatcgtcacgacaaacgggaccgtgataaaacgaccctttccgtccttatttgtagatcactcagacgagattgaactgcacttgtttccccttcgaggggagccgcgttttcagggtagccgaaggcttggggctgagggggggccctcaccaaggcgcgggtgggggccggagcctcaactcgatgagaagtgacaggcgtttgggggatctgggctccggccgggaccagcgcaagcagggactttgcggggacaccgcttctccaacagagcaaggcctggcccacgtttccggtttctcctaacttccttttattgccttcctttgcttcgcaagttccatctacccctccagctacagagccccacctctaggcacaggaagcttcccggaaaaagaaaggctgtcccagaaagagaccgagagagactttccaaacttcgggcatagccacggcaattcccagtctgctaatgccaaggcgggcgcgtaaggccgcctaaatctagacctccctcctcactcatttcaaaaaataacaacgtgccagccacctccgcagataccgccggctggtgcttgcccaggagacgccagggccagagcgccactcccagcatcgaaatggcagagagaaagcgcagctccaaattccccttcagaggttaagcctcaatcattgtgtcccttccctagggactgctggcgctctcgcccactggcgatgattatgcgcctagaactcgaccgcgaagcaactaataggaaaacatatggtgtcaatttggatgctccgcgcctcgcgcacacccgggaacgagcggcacaaagccctgccggccggcccgcgaccccgcgcccctcggggcctgccagccgggccgcagcgacaaacgctcagggctgcgcgccctggctggggcccgcccgagagacagcctgcggctggggagtctgagctccaaggggagagcccagccgccgaaggcgagcctaccggccaagccctggggtccggcaggttctgcacaactactcccgcaaagctcgccacctttgtgccctttcctcagctacgcgcttaccagccccggaagcaccagggggcgaccggcg

SEQ ID NO: 5411 - DNA, 1627 bp, Homo sapiens
  source 1..1627: mol_type = unassigned DNA
gcgcagcagagcgccggagaggagggacgcggaggccaccgaggggtcagcagggccgcggcgccagggtgggggcctccaggcggcgctggccacggttcacccgcgagggcgagcgcgcccggccggccgcgcctcctgccgtccgtgcccgggggtgggacccgcgccgggagctgccgagtgcgtggagggagccaggctccggctcgcctgatggattgacttggagatggatcgaattacaccatttgccgtgcatcggtttgttttgctcctgctctgtcccgctgctgctgctgctgctgcaaggggtggtggcgagtttcaggattctatcaaggaagccaagacctaaggagacagagggatatctatttttacaatatttttctttattttctttcttccttgcgcgtggcaagcttttttttttctttttcttttttcttaccagcctccccccaatgaggtaagaccgttttcaacaatttgctaatgctcttgtggcgcccggtgggggtcggaacctgagatcccgaatcgctgtgtgtgtgtgtgtgtgtgtgtgtgtgcgcgcggtgggggtcggaacctgagatcccgaatcgctgtgtgtgtgtgtgtgtgtgtgtgtgtgtgtgtgtgtgtgtgtgtgttgccactggacagttgatttattttccaagctgctctctctgcctgccgtgcaagggacgcgcaaagggctagagaggtttggcggacgcgtcaaaactggcaaagctggcggcttagggggaggggcaagtggacttggaggccctcctccactgtgcacccccttggaaaaaaagcggagggggcatcaagtaaaagtttcttgccaggcagagccagctcggcgtcccccgcacatagctggggttagcaggggttgcttctctgccgggcacagcgtctccaggagccagccggggagagctgagccaaggccgaaggagccgcctgcgggcttagccgccccctcccgcccgttggccccagagcggacgctgggacgcccggggtctggcagctctgcgcccggctaggagcgggcgggcgagcattagcctgcgtcctggagaaggggcgcagcgccgcagttgaggccggagcagcccctcgcgggcgtaggatacctgtcagtgagcgcccggattgcacggcccccgggtagtgcctgccggcgaggggcgggagctcgggtgacttggccatccccatccccggcccaggcccggagggcggccgcttcccaccgtccctctccccttactggcagagcgcgctgcgggcggactcccgggcccggagcagcccaccggccaccccaccgcccacccggctcccggtgtctcctcccggccgctctacccagcaactttccgtgctttgttccccgactggaaatgctttacggaagcgtcttggacagggtctccgccaggcgacaagagctcggtgctgagatgtgttacgttctcatctccccatcaattatggatggaaacaaataaggaagagtcaattttgctgagccccttctccggcaacgagaggcgttctgcagccgggagggagccgccgctcgcgccggcagccg

SEQ ID NO: 5412 - DNA, 1857 bp, Homo sapiens
  source 1..1857: mol_type = unassigned DNA
ccgcgctgcctaggcaaagggacccggcgaccaagacacccccgcgagggcccagggcgcgtccctcccgccaggccccagactccggctctgcgccaccccctcctacgccccggcgcgggcgcagccagtccggcttcctccaggcccccaagtcccggaccgagtgtggggccgcctctccctctcggaaggagccatcgccgctttaagtggaagaggagaggaagggggcgggggagcggggggcggggagcggaggcggaggagggggagggggatccccctggctcccacgtggtccgggcgcctgtgaatcgcgcccaccggagggtctcacagcgaaatacaaaagcagctgggaagcggcggggactcgagttcccagcgccgggcggagcgccggacagagccccgcagcgccccgcggccgcgatggggccgaagcgcccgaagccccggagcccacaaactgccgggcccgcctcgccgccgggacccgggtgcctgggctcggcttgaagcggcggcggcgcaccggcacagccgcgggagcatgggcaggaggatgcggggcgccgccgccaccgcggggctctggctgctggcgctgggctcgctgctggcgctgtggggagggctcctgccgccgcggaccgagctgcccgcctcccggccgcccgaagaccgactcccacggcgcccggcccggagcggcggccccgcgcccgcgcctcgcttccctctgcccccgcccctggcgtgggacgcccgcggcggctccctgaaaactttccgggcgctgctcaccctggcggccggcgcggacggcccgccccggcagtcccggagcgagcccaggtggcacgtgtcagccaggcagccccggccggaggagagcgccgcggtgcacgggggcgtcttctggagccgcggcctggaggagcaggtgcccccgggcttttcggaggcccaggcggcggcgtggctggaggcggctcgcggcgcccggatggtggccctggagcgcgggggttgcgggcgcagctccaaccgactggcccgttttgccgacggcacccgcgcctgcgtgcgctacggcatcaacccggagcagattcagggcgaggccctgtcttactatctggcgcgcctgctgggcctccagcgccacgtgccgccgctggcactggctcgggtggaggctcggggcgcgcagtgggcgcaggtgcaggaggagctgcgcgctgcgcactggaccgagggcagcgtggtgagcctgacacgctggctgcccaacctcacggacgtggtggtgcccgcgccctggcgctcggaggacggccgtctgcgccccctccgggatgccgggggtgagctggccaacctcagccaggcggagctggtggacctagtacaatggaccgacttaatccttttcgactacctgacggccaacttcgaccggctcgtaagcaacctcttcagcctgcagtgggacccgcgcgtcatgcagcgtgccaccagcaacctgcaccgcggtccgggcggggcgctggtctttctggacaatgaggcgggcttggtgcacggctaccgggtagcaggcatgtgggacaagtataacgagccgctgttgcagtcagtgtgcgtgttccgcgagcggaccgcgcggcgcgtcctggagctgcaccgcggacaggacgccgcggcccggctgctgcgcctctaccggcgccacgagcctcgcttccccgagctggccgcccttgcagacccccacgctcagctgctacagcgccgcctcgacttcctcgccaagcacattttgcactgtaaggccaagtacggccgccg

SEQ ID NO: 5413 - DNA, 2423 bp, Homo sapiens
  source 1..2423: mol_type = unassigned DNA
gcgcgcgcgcgcctgcggaggggggtggcaaggatccagaaggggagcccaccccttcttccgagctcagctctggggagccgggcgctcaggctcgccaggctgcaaagagagctgagagctgcctcgcgccccgcgcagaaccggcggtggaataaccagcgcctcaagtgtgtgcatctgggaccagggggcgggggagggggacctgcggccccgcggccaacccggttggtgcagacttggggatcccagaagggacagtgcccgcccagtcgcggcgattgagggtccctgtccgggcgcagctcgggccagccgcgtgctccggggccgcggcttctcccggaacccccgcgggcggggcctgccttccggagccggttggcggggggcgggcggcgccggggaaggggccgttactttcccagagcggcggggcgacgtcaggcggaagggcgcggggcgcgcacgctttaaatggcattcgctgtcatccgagctcagagccgtgtgggcagccgcgggctatataagccgcgagcctggccgccgcggggcagacggcgacagcagcggcggcgagcgcctcggagcgcggcggaacagcgccccccgagccccgtgccccccgacgggtccgcccgcccgcccgccctcccgaggagcgccggcccgggcccgcgagggccgccgccaccccgcagcagatttggatcccccgcccggcgagcccccggctgctgcctcccggggggccccggcgcagcggccgccctcggagagccccggcgccccgccgcccggccccgcagacgccggaggcgccatggccgccaagcccggcgagctgatgggcatctgctccagttaccaggcggtgatgccgcacttcgtgtgcctggccgacgagttcccgcagcccgtgcggcccgccaagctgcccaagggccggggccggctgcggcggccgcgccagtctcgcttcaagacgcagccggtgaccttcgacgagatccaggaggtggaggaggagggggtgtcccccatggaggaggagaaggccaagaagtcgttcctgcagagcctggagtgcctgcgccgcagcacgcagagcctgtcgctgcagcgggagcagctcagcagctgcaaactgaggaacagcctggactccagcgactccgactcggccctgtaaggggcgccgcccgcgggggggacgcgcgcgtccgcggtccgcgcggggaccggcgtgtgaaccccgagagtgcccgcgccctgctcccgggggacccgcaaggacccgggaccgccgctcctcgcgcgctcggactcccgccccgctgcgaaccggtcggtgcgcccctcgccgcgctcgccctggcccgggagcgccgggagcggggccgctttcctcgtccttgtaaatgtttattttttaactcttcccagtgcgaactctgctgtgagtgtgtgcggggaggcgcgcccgcgctgagtcggcggcgggtagccactccatgcccttgtccgatggtttgcaactccgattttgcacaccgctccaccgtgccccccagcgcacacccattcacactcacgccaacactctcgctgaacacttttataattgttaggcgtggccgttgggactttgggcgcagcgcggctgctactgcgtctggaggattgatatttatttttgcattgcgatggctgaaggcatttatttaacgatctttttacctggatatgtctgtgaggctcctgaaaggagacaaataaagtcaatatatttgcacagtgcagttttccaggctcttgactttttgcaccttcggggtccaggctcccaagactcggggaggtgggggaggaggtggcagggggatgtcggaccagggagccgggagtggagctacctccacaagcttcggtcaccggaacgaggttgcgccaccggtgcgcgggtcggttgcctgcctccccaagtggatccacccccggtccagtgtgctcctgcgtccctggtctattccccatcgccggcatccgggctgaagtgaagccgcaggaggggcggaggcagagctgacgatggagagctctctcctccgtacagttcacttcccagagctggggtcagggtcctcgccccgcacccgccacagaagacgcatctccctctgcgctgattcctggcggcgggtggggagatgtcggagccagcaatgcgagatgtttgggcgttgggacccgagagtgggctggaggccagcctgggttggtcgagagtgtgggtgcgcgctcgctgtcgcgggcaggtgactccctgaccgcagttgacccagcgcagtgcctggcgctcctgcgctgcggggaaaaccgcggccgctatgtctccagccgttctctgcgctccg

SEQ ID NO: 5414 - DNA, 1146 bp, Homo sapiens
  source 1..1146: mol_type = unassigned DNA
tcgccgcaggactcacgctgaccacgcccaagccggccccgcccactcgccccgcccaccgccaaccccacgcgccctcgcccggacacgcgtccccgcagccctggagcgctcgcacccactcacaagccctcgtgcccagcccccgtgcctcaggagcccacacacactccgacccccacgaagcgccccaggccctcacccccgcgcccaggcaccgggcggccgctccccggggctcaccttcgctgcagaacttgccgccgaagcccgtgtggctgcagtcgcagcccacctcgccgggggccagcacggtgcagaggccgccgttggcgcaggggttgcgcgcgggcgcgcacagcgggtcggcggtggcgccgcgcaggccctggctgcccagcagcgcggggggccgctcgcccagcttcaggttggccaagaggccgcggaagggcggctcgtacttgacggtgctcagcgtaagcgccgagaggcgcacgtcgggcgggatgccgcccacgaacaggtcgctggccacctgcatctcgcgccgcttggagcgcacctcggcggcgcgggcctcgccgtccaccgccagcgccgtgcggcgcgcgtcgcgggtcagcagcaccatgtgccagcggtcgtcggccaccggcgtgtccagctgcagcgtggccggctcggcgcacgaaagcgtgaagcgcagccgcaggcggccgtccaccagcagcagctccaggaagtcgcagtcgccgccgtcgtccaggtagagcagcagcgcgcgcgtggcgttggtgcgcaggctgaagctgagctcgccgctgctcgccgcgcccgcccagcgcgcgtagcgagcccactgcccggggccgccgccgaactccaggccgtccgcgcgcgccgccagcgccagcagcagcagcaacagcagcggcggcggtgtcggccgccaccggctcccggacgccatgcctacggcggccccggccccgcccggcccccggcccccgctcaggcttcagagccgcgggcgcatggggcgggagggggccgggcgctccccgcgctgagcggggctcccttgcaggctcacagtgccatgggcccggccgcggggcgaggcgcgcagaggcccagatgccg

SEQ ID NO: 5415 - DNA, 577 bp, Homo sapiens
  source 1..577: mol_type = unassigned DNA
gcgggcacagtcggcccttgacggcgcccaaggccccgcccgtgcggcgctgcccattccccatcaccagagatcggttcgtccagcgggcaggccccatcccaatgttaggtcaaagctcctatcccttggacccgggcctggcgcccccgcccccggcgcgtcctcacccggcggacgcggccgcgcacaaggcccagcacggcccgcgtccccgcagcccggccgcggttgaacatctccagcgcgaagcgggtgggcgccagcagctccggggacggcggcccccaggcctgaaagctggcggctcggggctgggcgggggcggccactgcgcccgggagcagccccagcagcgacaggagctgcagccagggcgccatggcgagggcgaagccggcggcccggacccaacagacgctccaccgacccaccgggtaccgagcccgcggccagcggggcctgagtcctccctccagcggggcgacggcacgccgaccaatgggcgctggtttgcggcgcctgcgcgttctcttgtttacaggaggcacgtggggcgcgcagggtagggagagcg

SEQ ID NO: 5416 - DNA, 1721 bp, Homo sapiens
  source 1..1721: mol_type = unassigned DNA
acgaagaaccggctggccacgccgaagatgctcaccacgccccgctccacgggcgagagctccagcaggcctgggggcggggcgcaggtcattgcggggcaggtgatccctggcccactccgcccctcggcttgttcgcctccggggaccctatttctggggtggggttggggataaagggccagggttcccggcgcagccgcccccaagggcctccagagcccaagctgccctctagggcctccggagcccaagcctgcgctagctcagattagcttgcctgtgtaggggacccccggcggccgcacccagtcccggaccttcagacgcgagcccgaccccagcggttccccagcctgggccaggccggggcgcgtgtctcgggccccctgtggctgcaccgcgcgccctgtgcccacgggcgaaggcgctggaattcggcgctcggagcccgagtttctgaaggcgggaggcggcgcccgacctcaggggttgcgctgggctgccggagccaagagtgtctgcgtccccagccccgcgtcagaagggaccggagcccgagtccgccccggttcccggggcccccgagcaggtgcccgccgagggtctcagagtgtgactgagcgggttggcccggcggccgttgccccccgcccccgccccttcgcgcctggccgcgccactcactgtcgcgggtgtccgcgtgcgcgccgccgatgcggccgtcggggagcgcctggaggtggaagccgatgcccacgttgcagtagagccgccgcagccgcttgatgcccagcaggtagtcgccggcgccgctctggacggccgcctccttgggctgcgctgccaccggcaggcgcgccaacgagagcgccaccaggctctcccagcggcgctccagctcggcctccagcgtgccgttgggtgcagtgggtgcggcggcgccccctcggcccgcccagggcgccagcaaggccagcaggaccgccgggagcagcgctaccgcggccgtcccgggccccgacatcccggcccgagggccgtgcgtcggtcaggcggtcagtgcgcccgggaagctggggggcagagctgcgcctgtggcgtcccgcgggagcgcacggccgacctcgggcaggagtgcgcaaccgaggaggtgcgggaggcaagcgacggggcccccgggcgccgggctctaccccggctgcatggagcggcgagccgggcggaaagcgcgcggctggagctgggactctgaggagcagtgcgcgcctccctgagcgccaggcccgcccgaggccgagccgctatatatatagcccggcgccccctcctactcgcccgctcccgcggggggccgttcgcgttctcctgggcgcccggggcgctgtggcgttcgcggctggtcgcaggccgcctgccaatcagggccgggggaagggaggaggctggggactagcgccgcgagtgccacctggagggaccccggcccccacccttggctccgcccggcccacggacctgttcgtcccgccccttggcggctcctacacttctgcttttcagccagttttgcctcttgcactttgtccctgcctgtccccgtccccgtctccctctctgctccggccgccttggcgcagccctaactcgggcatccgaagctcctagtgggcgcagaagccagcggctgctgcctgcccttcgcctttcggaggctcacg

SEQ ID NO: 5417 - DNA, 1721 bp, Homo sapiens; identical to SEQ ID NO: 5416
  source 1..1721: mol_type = unassigned DNA

SEQ ID NO: 5418 - DNA, 615 bp, Homo sapiens
  source 1..615: mol_type = unassigned DNA
ccggcgtctgccgagcgcgcagcgccgggcgaggcgcgcgggaccagcgggtgttgcgggcgcgcgggctagaggcggccggcgccccctgctcggtgggctcggggtcgggccgcgggggcctggggcccggcggggcggcggtcccagcagcggcggcggcgcggcggccgcggagggaggctgagcgcgggccggctgtgctcgccaagggcttcaggcgccgcgctcgggcgcatttgtactttgccgcgggaagcaggcagcccggcctggcgctggcctagcgctggcgcctcctctggggcaccgcgggctcggtggattggccacccgagaaacaggcccactttttcccctcctctcttgtgcgggtctccgggacggacgctccaggcgcggcgccgagtggaggcgagggggctgcggagggggaaggggccacgcgggccacggggtttaacccctgactccccgcgacgccaagaatgcaggagggcagagttgagggagacctcaggtggaactttcaggtggggaaggctgagctgtcggggctgcgggtaccgggaaggctcagggtaaggcgctcggcggtgcgtgcccggaactccg

SEQ ID NO: 5419 - DNA, 1542 bp, Homo sapiens
  source 1..1542: mol_type = unassigned DNA
acggaggcgcggcgctctccacagccgtctctaatgaagggaagcgtgcctcgaagtcagtcccggtgcgccccctcctcccccggcgccccttcccaaaccccgtcggatctccaaaggctggaataggcggtgcggctgtagcccgcgctgtaatcgtaggacacctgatggggcggcggcggcgggggcagggcgcagtctggaaagaagggggcgaaagaggccaaatggccccgcccgtcctccccgccgggagaatccgcagcggcggggtacagggggctcaagggctcgttcaaggtcaagccgccgcggggggcagtcagggggctctttttggtcggggagcagcccgggacgctccagggctcggggtacagtaggtttcccaccactgccggcggcggctcaaagaggccgggctccagctccgggggtccccgcagtacggaggctccggcggggaacacgtcgagaggctcggcggcaagcaagactgccgcctccgtgccggcgccgtagtcgggccccagcagctcaaagaactccacggcctccgcgcccttctccaggtcgcccaagctcacgtccggccccgacgggccacacccgccgccgcctgcccgggacggctccgtgaagaaggacggaggcagattgcgtgcccgcagcgggaccttcctggcccctgggatcgccgtggcccccgcggggcctgccacgtcccctcccgcgcccccagtgcccgcacctcctagcccggccgccggcgcagccacctcaccccccgccggctcggcacccccggggacgtggcgcagcgagtcgaagagcgcggccagacttcggctttgcaagctggcggccgcggcggcctgcgacgcctcccgccggggggcagccttgccgtgggccggggccgcgactgtcggggcgctaggggcggccagcggccgtttggctggcgtgtcggcggcgctcggggagggcgggccggggggcgcggcgcccatgaggccgctgcagcgcttgatctgcttctgcaggtacttgcggtggttcaccttccgcttcgacttgcccggcttgtccagcgccagcttgatgttgctggacgccgagtcaatgaagctgagtagatcgcgggtggcctcgcgcacgtcccctccttcggctcccgacagcagcgcacccgccggagccccggtctcatcgtcctcgaaacagcagcccttgtccagggctccgaaggcgccccctagcccgtccggggagcccccgaagccgaagggcacgaaagggtgcgtgctgaggagcgccgcctgcaccgccatcgccgcggctcccgggctgtccgcagcgctgcccgtgcgcccccgccagctcctgcccgccgcccagacccagctcccgccccggcgcggcgcgcgcggcgcagcctactagttccgggcctggctcgctgcgctgcctcccgggggagctcattaggtcttgtaagcaaggggcggagggagggagcgcgcggcgaccgtcccg

SEQ ID NO: 5420 - DNA, 1542 bp, Homo sapiens; identical to SEQ ID NO: 5419
  source 1..1542: mol_type = unassigned DNA

SEQ ID NO: 5421 - DNA, 1768 bp, Homo sapiens
  source 1..1768: mol_type = unassigned DNA
gcgcgtcgtgtcctccaccgcctcttctcttggcccgactggctctggtttccttcacgttcccagcctccaaattggcgtccgccccatggctcgtgtaggacgctaaaagcacggtaaatcccagggcgatctccagcagacgccctcgacgcatgatgccgagccgccaccggctcccgccgcctcttgccgcgcccggggctcggtctgcggccgccgctgcgccctgaagcgcaccgcgccgccggggtcccgctatcccgccgcccgtcccccgggccgggctcctcccgccttctccaggcgctgctcccacttcaggcggcccctgccagctgcaacacagagacaaatccccgaggcggggagactttcagggcatcgggatgctgaagcctcgcggtccccattcccaagcccaacccgtgcgccgcctgcgcgtggcgcagttaatttgggtaagggaagaccgtttggtccacagctggctggaaagcccaggcccccggcggcagcagccccggccgatccctcggcctcccgggccccgccagaagagcgcggcgcaaagtacccatatccccagcggtcctaagccccgggcgagctctctgggtttattttttttagcggcacgaattgcgcgcgatgcgcgctctgaacgccccactcctcagcctgccctctccgccaggctggaagccagccgcgccgtccccgccgactccgggcgatgccaccgccccccgaacatctgacgcggagcccggcaccaagagccccgggccaggaagctgtcaggcaggggagggccagcgccagctgtggacgttccgggacagcccctcaccccagtccctgtccctgccctcggcgcggcgcaaacgcaaaagcctccgtggccgcagctccagccccggtggccgcccgacccccgtcgggaccccggctgcacccactggagaagcggcggctccgactcccgaggaggcggcggcggctgctcccagtcgtggccgctacagccactgctcggctccgctcgcagctgtcccagctgtggctcctgtccgcttgtggcacccacagtctctgccgcggctcccgcagccccctcctttccccacctcttcaagtatcgtccgcgcagcggtttctcgcgagagaaatactttttttaaaaaaagaaagaaaaagaaaatgacaccccctccttcgtcgccctcatcaccaccccaccccccggccccatccatcctccctttccactcccctttgccagcctccgcctcggtgcggggcctctcgctcgcaggattagcgcagtgggaggaggcagaggtgatcaggtcctgcccggcctgggactttttgtcttgaggtggggaggggagaaatgggaagaggtggagtagcggttttagcccgctctgcggctgcgaggtttagatccgagattaacctctcccgcgataggtgaagccctaccggagcagaaagctgttccacctgcaccaagaatgcgcgctggagacggttgccccggaggccctggcccgagagaaaaccagtccccgctgcccgcgcctcccggtagcgcgctccctgcgcctctcccgccggacactcagcagacgccggaggccgggaggctaagactgggcgcgtcgcaggccgggaccgcggcagaggctgctgtgccgaccgaggagagggctctgccgcccccacttgccctgggtgtcgagagcccactccagacgcg

SEQ ID NO: 5422 - DNA, 2656 bp, Homo sapiens
  source 1..2656: mol_type = unassigned DNA
acgctctccccgcggcaggaaagtacgttggtgtcatcctagagccccagagggctgagggaagactcgagctctaaaattagccgcttccaggcccggcgccgggaatgccctccagttcgccgcgcctcctccgccgccccctcccgcgcgccccctctcccctgcgccacgctcctagatcgctagtcatccccgccgccgaggctcctctccccctcgcccttttcgctcgcggtttgggaggaggagactgcgagagacaagcgcgagggggagactggagaggggcttggccgtgcgtcggcgtcggctgtgatggggagcccggagcagccaggcggcgagcagtagcggcggcggctgcagctcggagcagacaggagagccggcgctcctccccgcaggctgcgctgtgaactggcctgcggattgggatctcgcgcctcccgtccctctcctcccgctgctgttctcttcatctcggctcccctcctccgcttgcgaacccccggcggcggcggcggcggcgtcccgagcgcagagcgcttctgctcgcggcctcagtcccggctagcgcgcggtgggcgctgcggcggcagcagccgggggaccggctcgcccggagcaagagcgccgagcaccgggtgaagaagaccacgggggaggcgcctcgtagagccgtggatcgccagcggaggcaagggtgcgtggggatttgtagcgtgatgatttggctgcctggtgcaccgactggagcgcgcctgccggagcacagcctcagctgctgggtgcaaatgggctgcgaggtgggctggggaggcgagagccgacgaagcgcgtgggggaaacttttcaccttgtaaagttccaacctccgcgcagccccgagccgccgttgctaccgctgcaaacaggagaagagggtggcttggccccgcggcgggagccgggaggtttacacggagagttggccaagtttggggctgaggatctggggaggggttgcgaggggggttgcggatcagtgcacccatccccggctcccagccgcccctgcaggtggatgagaaggttcaggtggcgagcctgcttggcagccggtgcctctcgggcgcagtgggggatgttcagatgccgatggatgatgcacttaggggaccccgaggtgcaagttgggtcatcgctaggcgaggcgcggcgcagagagggagcccagcctccactttcgctaggaaagggaaagggttaccagtctgcgggtccgttccccacgcctgactcgggcttgcggggcttgtggtcagggtgagatgtagtgaacggcggcggcggctcttcgactggggacgacatcctttacggagtggttggggacagagactgtccctgctatcttgacaaggagagggaaccggaatgctttgcgagagtgcatgatttttggcgggcgtgtgggaaggctgcttgtctttgaaaagaaagcagcgcgggtctgaccatccccaggagtgcggaggagctgtctccggattgggggcgagaacgccaggggcaccagctccgagctcaggccccactcccgggcggttcgggacgaatcccctctacaggccagtgtgtgtgcagggcaagtgtagggggctgaggggcgctggcggggaggcagtagaggtggcctggaccatcttggcgcggcgcgcggtgagcgcgaggattccgccagtgggagtcgctgagctaaagtgcatctggccccccggcttgcatgatggcgagcccggatatttttagctgtgctgtgatctgaattccctcctctcctctctcgttgacttttgtcacatgtgctttccgagatggtttaacattgaacatgattgggctttgcggaaagcaacttttattcactttccaccgttctcctcttgtgggcggggggtggcgggggcgtgcttggggcaaggatgcaggggtggccggagtttggctgcgagctaagagagccgcttgggttgctcgggatgagaggaacaggggtgctcccggggtgtgggtgtgctggcggtgacatcctgaggctgcagctcgctggaataatgggctcaaaccaggcggtggagaggggtccccggaatggacgtcgggggcggggaggctgcggagaccctgcgaggtctccgtgaaggactaggaggggctcccgggagggagtggcgcctgcggcccggagcgtgggcggccggtggctctggcacgcggaatctggtggactcctagcgcctcggccgggagctccagctccatcccgccgccgccgcgcgcccaatgggactcagcttcgggtttgggcgaacctgcagcagccgcggcgggagggagggacgctgggaccgcggtaatgattgaagtctttttcccccctctcccctcctcccgctcctctccgcccccagactctggcgcgtttgttttccaagttggatcccacttccatttacaagtgtcagacaaacccgcgagaacctcccccaacccgccccggccccagccagactagggagggcgcccagggggagggggcgagctgtctgggcagtgcctggggaggtgcgacgcgcccacccggggcttgagcggctggggttcctgtgcg

SEQ ID NO: 5423 - DNA, 623 bp, Homo sapiens
  source 1..623: mol_type = unassigned DNA
gcgccgtagcgcctcctgcccacaaagttctgccagtcggagaaggtgtagttgttccaagagaagaagtgcgaggcattgggcacggccagggccgcctccgcgctctgctcgtcggcccggccctcgtggggctcggtggctcgcaccaaggggaggagacagagcagcaagaggtgagggaccattttgcaggagccacccctcccctgggagcctgcgggccgggcgtcccctcccgctgggatcggagcgcgcagccggggtgcggggcgcacagcatacaaggccgtcccgaggagccagggagcccggacgcgcggagcaccgcgccgcccgccaccagcccgcggtcggcacgccagctccgggtttgttggagcacttttatatctctgctcccaccaggctgctagggagcgcctctgcctattgggcagcgcggcgtctctcgcggcgacggtgacgcgctctggctctgacaagcctggctccccccaccctaccgggtggcgccgttgctgaccccacgcccagccgttcccactcccgcctgaaactcctccgacagggcttcgcttcgggggctcagtccccagcgcgtacacactcgcgtggtgtcg

SEQ ID NO: 5424 - DNA, 1967 bp, Homo sapiens
  source 1..1967: mol_type = unassigned DNA
gcgcgtcgcccttgctgcccagccgaaccccgctccctccagggctgcgctgcacggggctgcctccccgagccgccagcgcccggcgcccctccggcgcgtccgcccttcccactttgtgcgcccgcggcggtgggagcagagccggccggctcctggggactcagcggccgcgctggtgatgggcagcgctccttccccaaaggcgggcggcggggcgggggaggtcgcggctcgggtggtgccgccgcacgggctcggattccgagggggaagtggcttgtcagccccggctccgggaagagtgaacaataaggctagggcagccgccccagatcgttatattcctgggtctaataaagtcaggatcgctgctttgcttcccccgccccagaagaataacggtttgcaaaatggggcaaaatgggcagaatcgcacggccgttgttgttggtgtgaccgttgttgcaccccagtcgacatgacgttagtttttcatttgccaaattgctggttagttgcaaagcctaccctcggccgcgagcactgaaggatgggagggtcgagcgccgcgttttgacaggaggaagtgcggaggggcggagggcgaggagggcgtgattggggctgcctggtgtgtgcgcgcgcgtgtgcgcgcgtgtgtctttacacgcgccgcgtgcccagtgttgcacggggcgggagaagaatggcaggtagccgcccgaaacacctcgccctgtctcctttctttgggcgaggttcccgatcctggcaaagtgtgaacaatagggagctgggaggaagacagtagtgatgctgccgcgggtggcgggggttgcgccgccgcccagagaacctcggcagtgtgcagggaggtgcatttcattttggctatttccatcccggcctccctggaaaattcttctgtgcgtgcccaccctcccctccagctgtcatccccccacctccacccaaggatttgcgctttggctctgatggacgggagggaaggaagaaaagcaggggccgcagagagctgggtgggttgggcggacattctgggcggggggcgtgtgctgggaagcgatcgaggaaagccgggcggaggggctgtgtgtcgcggtcgcagctccaggtaccgttgtacctgccctggacggccgacccccggttggggagcgcacggggcgggccagggagcacccagtgcgccccctccgcgggcggcacaagagcagcgctcggccgccgcctccagccaactcgggtccctcccacggcgaccaatcagtgcgaagctggctgggcgggaagccgcgagaggcttttattgcggcgcgggtggcggccaggagctgccaggacagtctcccggtgcttcagcctaacggtctcgctcactcaccgccaagagaaaccccgccctgcggccggtcccccgcctgcccggcagtttccgaggaaataaaatggagactaggtggtcaccgggagtgctcctggtccggccgcccgtgctcgcccactctcgcctctttcacgccgacttggagcatcccaccgcccccgccagcgctcactctcgcgccgcggaatccgggcctgagcgcgtcgccggggagggcatcctggcaggcacacctacgcgcgtgcgctgaccggccgaccgcgggccgggggctctactgacggcggggcggggccgtggcagggcccggagaggaggggtggggaccaagcctagtccgcctggccctgggtctccgctgccacctgggcgggggccaccccggttatgcccctttccgcggtgcccgtgggtgccgcgacgcgacctgtccacatggggcgggggaaggggggtgtttttgagacatcctcgcccccgggtgggagcgtgacaatggagcccggatatttggtgggccttttgggggatcgcctggcggtcctttccatcatcg

SEQ ID NO: 5425 - DNA, 2558 bp, Homo sapiens
  source 1..2558: mol_type = unassigned DNA
tcgcgacagctaaaaacgggtgtctcgcttcgacaatagatccccgcggaccttctggcacctggttcactagcgcccgcgaactctgcctcgggagacttattgaaatccggatgctcaagccgggaggcgcgcagtaaccaggaggatgagagggccgggtttgggctaggaaagcggccttttaaaacagatgtcagggggactgcagccccgagccatgagaaaaaagttaaaggcgagatgacacgcactgaattggggcaaacattggaagaggagacaaaactgcgtgcttgagcaccggggtgcggggagggggggacaaaacccgtatccagtgcaaattaaaatcttgggagtaggtgggggctgctgcgcgcccttcaccctcagttcccctattaaggattctgagtccccatgcactcctgtcctctggctccttccttcctctccgctcggccggtgagaggcggccgccggcgccccagcagcagctagatgtcaggcgaagcccggagcgcggagcgcggggaagggaggggaagggaggggaggggaaaggaggggtggggcggggagcgcgcgcgggctcggccagtgcggggtggtgggcgggctgagcccggggacggcgcgggaggggggagggaaggggggcagctgtgggcagggagccgggctcggccgccagcactaaagatggagaggcgccggggccttgcaggggagggggctcggcgttgacgtgggacgcggcggaggcgcagcagccggtggtgatttgctaacctcgcagcagagaggagttgagggcgatgagagcgggtactgcgaactgccgggcgatgctgtcgctgccgccgtgatacggagagcaacagttccccagcaacacccctccccgacacaggcacacaccccccgacaggcacgcacacccaccccacagtgcccggctcggctgcggtgagtgaggggccgggaagaggcgcaccgcccagcgagcgccgcgcgccggggcttcccggggctggagaggtctggggggcgcgcgctcgcttcggccactcggccgctgggcttgtgccttttttatttggcgtgttcccttcctgccgctgcagccgtcgccgccaccggttgggggtcggctagaagggggagccccggctgtcagcctgggcgcagctgcctccccagcccttcctcttcagggcacggtcggggtgagaggtggggggcgtagcggtgtgcgggggctgagggcgtgagcagaggggtcggggatccggaggctttgtaccgccaggggctggcggagcaacagagcccgtgggtgctcttatgtatgcggaccggtgcgcgggcgcaagataaggttgtggtttatttatttgtgtgtttattcgccggccggctgggaagctagaatcggaggagctgacgagtagatctgggggcggaggggagcaggactgggactgcttacgttttgtttctctttgagaaaacgtggtgggctttttcttgattggacttgatccccaccccccttttgcaggggagggagggaagctccagagggtctgcagcgctgcgggccctcctcggctctcggcgggaccggcggtgacaccggagctcgccgtgcgctcccggccgctctcggtgggtgccggtctctgcacctgatgcgttcgggatgcctttcccaccctggcgcgcccgccgctagctcgcacagcgcctcgcacactcccgcacgcgcttgaaatgcgcacggtcccgccggcccgcggaaccacccggacgcacggagcgctccgcaccgactcgctcgccgcctccccgagacgctcgcaccgtgcttgggccgggcgcgctggccgctggcgccgctggccagaggcctgggacccagccggtcgctcccagggggtcacggccctgggtcggagagggagggcgggcagaccccttctcgcctttcctcccacaactcgctgcggggcttttgtgcttccccttcgccgcggggcgggtccgcctcccctgccgctctcgccgcggagtccagcccgcccggactgtcgccgttcctccccgtctctttcgctttccctcgtccctagctcagctctccttctttcaggagtctagctcctcgggaaaagttgcttccccaagtttgctgaagtcgtctccaagtctcggtgggggtcgctgggaactgggggggtgtgagagcgcggtcgatccccggagctcgggcgggttatcgccggctcttccccgcgccgcctggctggacgctgcagccagcgccagccggatcgcgggcgccgagcggcgggtgggggagacggctgcccgtgggcgcccagatttccctcaggacccaaaaggcttgtttcagggcgccaagcttccattcttttggctgttccctcctagttctcagaaaccccgatgtctgcgggaaagcacgcggtggctcggctcggctgaatgctcatcccaaccttgacggcctccgtccccaccccggggcg

SEQ ID NO: 5426 - DNA, 2558 bp, Homo sapiens; identical to SEQ ID NO: 5425
  source 1..2558: mol_type = unassigned DNA

SEQ ID NO: 5427 - DNA, 1508 bp, Homo sapiens
  source 1..1508: mol_type = unassigned DNA
ccgccccggggcgagaaggagaaaagttagagggctgaacaggtgacgctgagcttgttggagcgtgtgtgctccaccacgcaagggcgcggagttcggccgcctcatctcccgccatctgcgcgcccgggggcacgtcctctgcgatagcctggaacccagactacctgcgcctgcctggtcccgactcagtgcccaggtggcttcagtcggaaatgtctgccctcttccaacctcccgatcccggctgcctcgcggatcaggtacgcagcgccccagccgcaggtctggacatgccggacacctggacccacccctagcaaccccctctctccgggaagagggacacgccccccagcctgaagacttgtccccaggtccaactggccaggcgcggaagcggagaatctcgcatcttggggcgcgctgcccgaggtggccacggtggcgcaccaagccggggctaaagccggggcagaggggtggggtagggccgggggagggtgacctctgggtttggagaacaaacttgctatccgagggacctccagctctcgggactctcactatccccaccctgcctccagccaatgcgcggataagcgccatgcggtgcgccaacattcgcgccagggctggggtccgcggcgggagagggacgcacggacatagcggaggaatcagccgccgagtccgaggcctgaataagcaaggactcctaggtcaagagtcacggcctgaggacccctcgactcggagggcactccggggtcccagtgccaccaagccgcaggaagagggcaaggggctgggggaggggtccagggcagaactgccgccgtgcagggagcagggagatgaggggctcctttgccaccacccctacgggcgcgccccaaaacggcagacgcgggtggctggcggagcggtcgggggctgactctcactcggcccctgtcagggtgcctgcccctccccgctgcgccccacccggggccttgcaccccggtcggttcccccacgcacctggagcccgccgggcaccccgcctcgccgccagccgcgccaccctggccccgccgcctccgccgcccagccgcccgcgcaggtctcacctttgtgtaaagagtccaggagcaggaggaaagttaccagccacatgccataaagaggccctattctccggggaggtggtcctgtggccggccgtgcggcagcgcctctcccccgctcagcgcgctcccagccgcccgcactcggcgccccgctctctctgctcctcagcccagcgctcggctgcggcggcggctcctccctcctcggctccccggctcctgtcatccgcggggctgggctaggcggccgctctccccgcccccccgcggcaccccgggtggtgagcgccgcgcgagcccggagcccagacggaccccagccccacaagcccaggaacaggagcggcggcccgggccagaccgccccgacccggctccgctgtctgagaggcg

SEQ ID NO: 5428 - DNA, 1119 bp, Homo sapiens
  source 1..1119: mol_type = unassigned DNA
ccgggcgcgcaggcggcggctagcgctggagccccagccagctccctctccccacgtgcgcgctaggccttggttactctggcaactcgccccgctcagacggcaccaggcagctgaatccagccccttgttacgggggaaaatgctctcattgaagcgccggagcgcagcttctgccttttattgcaagcggcgccaccggattccatttgtaaacttattagtgtgcgctcgcggggagggggctcgggaatccgggcccgggcaaccggcgccgcatgctaatcagggggcgcccgcccccgctttgcccgtggccctcctttcccgattccccgacgtttcgggaggagtggggtcggagcgcagggctgggaagggtcttaggacccaggaaggagacgggtgcctcccagagaggaccccatcccctccgaggtccgggcggctcccggcctctccctggggtgccgtagcccccctcgacccgccttcccgcagccgcagtcgttcgggcctggaggtggccgggcatcggtgccgacgccgcgagggcagcgcccgcggcgggaatactaatgcaccctaaagggcacggccgccgccgcagcaggtaattagctggaccgcggcggagcgcgcggaggtggctgctggctgcaaggactgcgcccagcctccgcctcgcccctcgaggctcccgcgtgggccggcgggcagtgcgtgggccacaggaagcgggctgactggacccggctcaggacttcgcacaagggcagctctttgtttacagctcctctcccagctccccgctttcctttcgcccaccgcctcccttttccggcgatcggctccgccggctgcgggggggtggggggggtggggtgtcctgtgtagccgcccacctcctgtcccggcctcgtgctcccgctggggactgtttgcggtgagtctgtcgcacgcacgtcagggccgaggcagtgatgcggggcagcgtgggaggacgggctgcggagcccgcgtcatcctgcctgtggggagcgctgtgcctgctctcctgccagcgcgcccagctgtcccggccgccgccacgcgggactgcctgccatgtcgccaccg

SEQ ID NO: 5429 - DNA, 1119 bp, Homo sapiens; identical to SEQ ID NO: 5428
  source 1..1119: mol_type = unassigned DNA

SEQ ID NO: 5430 - DNA, 653 bp, Homo sapiens
  source 1..653: mol_type = unassigned DNA
gcggagaagccaggagcgatgaggggcggggcggctcccggcgccctcttttccagccccgctcccgcgctgccgccggagagggactcggggcgcagccgccccgcctctgccggggccccaggaggaatctaagaaaagagagatggagggaggaaatggcatcgcttcaggaaggggcaggacctccaggaccgaaggcgttttctttctctttcctttcagcgacactgggaaacaaagctccgcggctgaaaagaacaccacgcgcggccaggacccgagcagggccctggggcgctaagggcggggaaaatagggcatccggagtgcaggagattcctcagggccgcccccttctccgggggtgccctgaggaaccgcggcggggactcgccgctggcagcctgcgggtcctggtgccagcgcgcatgggcgggctgtgcggacgtggctggtcctccaaaggtttcagatcccgtccgggccgctcagtcccttaaagctgtgtcccaaagcctaggggagacagcgaggctggggacgccgggaagtttctctgaggtgtggggctcctgagcagaaacgcgcgggggattgccagggctgcagaaactttggctcgaggcggtggctggcccgccttacttccg

SEQ ID NO: 5431 - DNA, 1768 bp, Homo sapiens; identical to SEQ ID NO: 5421
  source 1..1768: mol_type = unassigned DNA

SEQ ID NO: 5432 - DNA, 1101 bp, Homo sapiens
  source 1..1101: mol_type = unassigned DNA
gcgccaagccggctccccaacctggtctgctgaacgcaaaccgctgagagtttgctgcaccgccccctggggcccctggctgccgagtcccgctaaggcaaagacgccagcaagcgaggaagcgcagcggaagaaaaacaagcgggcgcgcgaggggagccccaggagggctgccgagtggctggcaggcggctcccgcccctcccgggtggcctcgccggcggctgacggcccggaggacgcgcgctccgaaaagttagactccgggcggcggcgcgctacgccgcgtcccctcgcgtcccttcctcgctgcgctccgggaaaggaacttgttccttcggccccaggattggggagtgtgccgcggggccgagggtggggaacagccagagggagacgcgaaccaggccgctggcggagggctcagggggagcgcagaggcgacggcccccatgccggcggccaacatgatggagaaccggccgctgcccgccctgcaggtgcccgagccgcagggtgcgcccgagggcagcccggtctggtccagttcgtcgacccccacgcttcgccgccggcgcttcaagatgcgccgcatgaagaacgtacaggagcagagcctggaggccgggctggcccgggacctgcccgccgtcttggcccccggcaaggagttcctgcagctgccgtccatcgagatcacgccctccagcgacgaggacaccccgtggtccaactgctccacacccagcgcgtccccgcgccgaaaacgcttcctcctccgcaagtggctgagggtgagggagcggaaggagtgcagtgaaagcaggtacgtccccgttccgcccgtctccttcccttccctcccgtcctctccagagccgtccagggccccggggcattctgggggaaacgtcctgggggagaacaggagcccgtcaccagaggcgcttctggagggcgctgcgcctggtcccagggatggtggcattcagcttccacgcgtgccacccgctccccaactcagggtgaggggcttcatgttgcacgacacgtttacgtggggctttacgctgcattccatctcccttgatcctcgcagcg

SEQ ID NO: 5433 - DNA, 1101 bp, Homo sapiens; identical to SEQ ID NO: 5432
  source 1..1101: mol_type = unassigned DNA

SEQ ID NO: 5434 - DNA, 2341 bp, Homo sapiens
  source 1..2341: mol_type = unassigned DNA
gcgtggtccggagagcgtggacaaggtaacctgttttggatgtccgggagaagggagtccggccgaaagggcccagcccctcgaggctgctccaactggggcgcgcggcggcccaggagggaggcggggaggtctccgggttgggccggggaacgccggcctccaggctgggtagggaggacggtccagagcgcgggcctccgggtctcaccccgggaaaagtctgggtctgctctgcgctgttgcgtgctgcgctcctgggacctgctgactgtcctagagggaacgtcccgcggtagtgtcagttccctggggaccaggaagggcgactcttgcctgggagtcagtgcttgggccgtcgggtccgggtaagcgctgggggtttggctcgagaagatgcggataggtggcctagggcgccgcggatctccgccctctgcgggcaccgggagcccagggtcgaggcgcgccgccccgaggggccccttctcctaacaatgcgcccggaatggagtccgcgccctgacagcgcgggtcagcccgaaaccgcccagaatccgcttcgatgagtgggtgagccgctctgggagtctgccgcgtctcggcagcggagggcctgagtggaaaaattcttattggatgcactttttaatggttggtttgcctcggttttcgtccgagtcttccccggcagtaggcgctgggttacccgcagccctagccaactctccctccataccccccctaccccacccccaaaaagtttgtctccggctggaaaaagcattaatgaacgtatctgtgggaagaaacggaaagtgaatgagtcaggagggccaccttcggccaaccgcctcaggaaaagcaaagaagccaaaggtctttggctttggattttgggggaaggtgatggggggaggttcagacttcgggaatcagggcgcggacgctgggcgtggaccccgtcattgttcccggctagctcttatctcccaggagcaagtatcctgtgtgcgcagcgcatgaatgtgtctgggcatctccgcgtatatttatatagtgtgtgatgcgaaaagcaggaccagcaggggaggaagagggggtgtggggggggagggaagacgagggagagcagaggggagagaagagagaggagagctcgaggcgagagagagagagagagagagagagagagagagagagagagagagagagagataggacttcctccccgattcgcaaagtgaagtcacttcccaaaattagctgaaaaaaaagtttcatccggttaactgtctctttcgctccgctacaacaacaaacgtgcacaggggagtgagggcagggcgctcgcagggggcacgcagggagggcccagggcgccagggaggccgcgccgggctaatccgaaggggctgcgaggtcaggctgtaaccgggtcaatgtgtggaatattggggggctcggctgcagacttggccaaatggacgggactattaaggtaagcggcggggcaacggacgcgggcggcggggaccggccggggaggcgaagcggcgggcgggtaggtgcggggcccgcgtcccggaagacgtggcctctctcccttccctccgcgccccggcttcgcgccggctcctccggcgctcgggtggcgagtcctactcgcgggccagccggccaggcgcccgcattgagggcgaccctcccccgaaatcccagcccccaaagtggagccccggcccccctcccacctcgctgcccgccggggctgcaggaggggacggcgggaaaccgggggaccccagggtacggaacggagtcaagggcgagagacctcggggtccaccactcccaccgacacccggggctcccgtggccccagcgctaggcactgggcttcctctccgcagaggcggaacacggcgggggcgggggctgcagtcgcccgggctcgggtccctgcctggtgggccctggggtgggtaagtggcctcgttgcacgagggtaggggtgcaagtgagtgtgtcgggggatctatctgagcgggctcctccagatggaagcccctgtttacatgtcagcgctttcccttcctctcggcactcagtcgcccggctctaggcgctggagagccgccggctccgcgggactcctgggccggcctcgccgcctctccggcggggaaccttccccagcccccgtccgcacagatccctagcgccccgagcccccgcccttcgcgcctaggcgtgcgccggctccaggaccagggctcctggagctgtcgcctccgaaagggtcctgcgtccttcggagccgcctccgttgcaggggccg

SEQ ID NO: 5435 - DNA, 3857 bp, Homo sapiens
  source 1..3857: mol_type = unassigned DNA
gcgaggggcggggggcggggagggaggcgggtcgcggcgctggctccggggtccgcggcacggcctcctctgccgcgctgcccagggcccggaccctgcccggcgctgcgcccaccgcgagggtgccagacccgccgcgccgccgccgcgctctcccagccgcggccccctcccccgccgcttcctcttgctctcccagccccttcccccacgtgtggatgacgtcaaaattccgcgaaaaagccgcgtggtggctccccgagcggaggcgcgattccgccgcccagcggccccctcccgggggcgcctggagggggagaagggcggaggcggccggttccttctcctcccgggaggcaggaccccccgacgccgaccgccggacgccccccgccccaaagcttattggaaaattcacttttgtaaagcaaatgtatttccagagctattttcggccgcgtgaggcgtgtcctaagctgaatcagacaggaagagggggaagttcgggtcttttaattttttttttttccgaagggaggggagtgagatgctaggtgggtgacagacggcaggcgctcgccttcttaactcacgcctgtcgcatctgccgcctcagtaatccagccccgtccaagccgaaattcgccgaagggagtgcggatgcacaggcctggcggactctgcccccctccagaacgcagcggcccagcgccccggcgggcgcggctgcgaccagagggtcccggaagcgagtgaacacctgcaatcgcactgcccgtccccacccaccctgctcccccgtgctctccgcttcccgacgttttcctcttctccttgtccgcatttttctactttgcctgcactccctccttcctcttgatgtgcctcctatgtgtcccctcggatttatgtgtcccctcgcattttgccagtcgggttttcggttttgattgaccgtccatccctccacggagaaacacaaacacagctccactctttgggggagccgaggggaaggcagtggctcccatttctgagcctgaactcagtcactacccgctccccacctggcctaggcgcccctgcgcggagaaggcgggactcgaactcgcgctgctcccgggccttgagccgaccgcggaatcacctggctgggaggcatcctccaggtaagcttgggagtatgtgtgcttagtgctgcaggctcctgcagaaaagtgcctataaacacccaacaccctgctgcaccctccacctccaggctttgtacactttccaaccgaaactccaaaacgctagcgtagagggtggggagccggccggaaaaagaataaaagtccaataaaactggcgttcgctaaagtttatcaccagtcctacatgggatatatatatatgtatttttttttccgtgaagggtgaaaaggagataaggaagaaccaacaatctaccccctcccgccgccccccacccccgcgccacggtgatcagtttggacttcaaagccagagcacaggctcttgcgctttttcttgaaaccgaagtctacactgaaagaaagtgtgcacttttgcctagaaggcaacatgcgttttcccgcgtgctaggtggagtgcattttaacaagacattagggttttaacacatggctggagtggcgaccaaaagggaaaactcagtttccagtccaagcctcctagagacattcctgccaacctccgcaccctctcacgccccaccccacgtgtgagagtctgcaaaaccaccggggattggattcgatggcgagcttcacgctcgggaacagtcagtaatcggaaggggaagtggacaggggaacttcaagaggcgagcctgccacgcgggaagcgcccgaacttgcgggtctccatgaatgcagagggcgccgggaagggggggcatccggccgcgaccctctctgcccctcccattcgctgcccccctccccgctggaatttctctgtaaagcaagacggagtagggggagggggagagggaaggggcgagagggccctcggctcactcccgagacgtgaggactcgccacccaggcattctcctcggggtgggctgggccccgggacgaccacccgcttcttcctcgcccccgctgcccccacttcgggagacccagagctctggatgcctttccccggagaagggggggtgtgcggagtcggggtggaagagaccttgctcgcagagctatatcaagtgatgtccagaggctgggagccccggcggcctctgtcccttgcctgtcgggttagatttatactttaaaaatacctcccgccctccctccttctctcgcctctccccgctgcaactttctttgatccgctcaaaggtggcttaggtgaaattggagtaattcccttatgggggtcttaaaatgtaagtgaatgtccttatccggggtgactcaaaagcttaagtcgggaagcccaacgtgactaaaaccaataggtgattgttcggggccgactgtgtgcgggtgtacacggtattcggcccgggtgtcatccgcggcgctggactgtttcattttgagtttgcaacttgggtttttcagcgagctttttttcttcctgaaagctaatggcttccacagcaattagacattttcctcgcccgccccttccctcccctttctttacatataggagatgggatactcattcccgctgctattgataaggtcggaggcggccgggcctctccccagctttcgcccgccccagcgcccgctctccctccgccctcccttggcttccttttgatgtagtggggaacgcgtcctactaaaaaaaaaaaaaaaaaaaaaaaaaaaaagtaatctgcccggtaacaatcagcgcgcagtagcaggagccccagagctattggctatgcaaatagagggaggggagacggcgccccaaactcttcctcacccttttaaagcgatatcccctcctttcccccccaccaccccttccgccccaccctcgtttaaagaggctggctccggggcctgagttaatcgcttgcacctctagtttattcgctcccctcctccgccttgcagggaacctagtgtacggctcacccagcccgcgccccaccccgccttgctggctctccgcgcccctgcccgggccccctctctcggtgagggaggcactcagtcggcctcggtgtgcccagagagctcgagccacgccatgcccgctgcacgtgccagcttggccagcacatcagggcgctggtctctccccttcctcctggagtgaaatacaccaaagggcgcggtgggggtggggggtgacgggaggaaggaggtgaagaaacgccaccagatcgtatctcctgtaaagacagccttgactcaagcatgcgttagagcacgtgtcagggccgaccgtgctggcggcgacttcaccgcagtcggctcccagggagaaagcctggcgagtgaggcgcgaaaccggaggggtcggcgaggatgcgggcgaaggaccgagcgtggaggcctcatgcctccggggaaaggaaggggtggtggtgtttgcgcagggggagcgagggggagccggacctaatccctcactcgccccctccccctcccgggccatttcctagaaagctgcatcggtgtggccacgctcagcgcagacacctcgggcggcttgtcagcagatgcaggggcgaggaagcgggtttttcctgcgtggccgctggccgcgggggaaccgctgggagccctgcccccggcctgcggcggccctagacgctgcaccgcgtcgccccacggcgcccgaagagcccccagaaacacgatggtttctgctcg

SEQ ID NO: 5436 - DNA, 1439 bp, Homo sapiens
  source 1..1439: mol_type = unassigned DNA
tcgccaccaccgccacccctccggaaccctctgggtccgcgctagtcccacttggtcacgatccggcaggcgaaggggtgcggaggcggtttcaccagcccgctcccagccctgcctcgagagagaagcccgctgagagggcagacagttgagaaactcgatcccaactccccagccggcgcctcccgaaccgccccgagagcccagattagccgggcagtggatcccggagcaaagtgccatgcacatcctggagaggagggaggcgtggagggaaagggcggcaaaaatgaaatgcccccaagtcagtcccgcaacttctcccggtccgagggacgggcggagggtagaggaggcagcggcggctagcgcgaggtgagggactcacttgaaggtgaggacgcagagcggccggtaggacttgtggctggtgttctcggccatgcccttgccccagaagtcgttggtgaagatgccccagcggagcggggcgccgggccgcacgtcggggttgttcacgatcgcccacacgtcgtcgtgcacgaactcgccctgcagggagcggccgtagcacaggcagcttgccccggccagcagcgccgcggccccggccggcgctagcccgcagccccgccgccgggagggtgtgcggtccccgccgccgcctcgggcagaggtggtcaccaccatcgcgccgccgccgccgctgctgccctggcctctcccgggcgtctggcatcctcccctaccggggccccggcggcgcgcggcgtctgcccggaggggggctcgggcatggtgctgcggcagctggacccgccgcgagctccccgcgctccgccgccgcctgcgccgcggagttggcccagctgcaaataaacagcagtccccccgcctcccccggccatcgccacctcctccgccccactgcgcatgcccgctcgctctctcttccaccgccccccaatcccgggacgcgggccggttcccccgcacagcccggcgccctctgcccccggcccgccttgcttgcaggtggaccggggttcgcggcgcgcggctgcccgggagctgcggggaaggacaccccaggttcccacttgcggtgtccggctgtgctcacccccacgcccccgcccccatccttctcccccgaatggggctgggaaggggcacatctggcggacccctcccgggggacccaggagggtttagcaggtgcgcagtctggaacccccacacccaccttccagggagaaaagtgccgctgcttcccgggaagttcccggcttttcagcacccgggacaacagcagcggcgcccggagagacgctctccacccgccccgcgctcgcgtccagtcgccggctctgtgctctcctgcccgggctttctctcacccgcccggcgcggcgtcccgcttggcggaggaacccgcg

SEQ ID NO: 5437 - DNA, 1288 bp, Homo sapiens
  source 1..1288: mol_type = unassigned DNA
ccgacaggttgcagccgcgggttacctcggaggccaaggcagccacctctgcaagggagttctgcgtccaagcatggcttgtccgtcccgcctggcccccatcaacaaggccgggaccagcggccggtggaacgagcgagagcagccctagtcccacaggtgagccgcccccacaagcagccaagccgcgagccgtcccggcgccgtcaccgcccgcactcacttctccactccgggagggagatgggaggcgtgggagaacgcggagaggcgcggcgaggctgggagcgggagacggcgccgggaggcgggaagcggaccagagaatgggagaagcccggcaggtggacaggaggaaacaaaacccaaacgccccaccctcgaagtcgtcaggagctgagcgaaggaaggagcgaggtaggaaagcgtggcgccccaaatatgccgcgggagcggcgcgggaggcgcagaaccccggagcttgcagcctagcgcgcggggtcccagcggagcgcgaggacgcgagcggagccctcccggttacctgtgctgcttccgccctggctgcccctgtcccgagggaagatgcccgagcacttctcccactccacctggccggcgaagcacagctcggtgacgatgtgcagagccttctggcacagactgttcactccgtcctccttgtggaaactcatcgtttggcttttctttcgttttctctttttttcccagttagccgtcttttcctcttcccgtacctctaacccctctggcgccctaagccatagtccgcccgcggtgactttggctggagattgcgccgctgagagccggcaactcttaggagccccacgttggccccatggcgggagcggagggcgtaggggaaggagaggcgcgcgaggaggctgcggctgccgcgaggtttgcgccaactctcccgccgcgcgagcgagccgaggcgcgctggaactagagacccggcatggagtgctgaggggaggggggagccgtaaaaaagccaaagcaagccctcgactcgcaagcacgcccccctcctctccccagcgcactggtgtttctggcgggtgcctggcggcgacgcgtccaatcgcagcccggcgcgggcgctaggtgacaggcggcggagcgcgcagacccggctccccgcgtcctctgaagaagggactcgcgagggagggagggagggagggcgggcggcccggcgcccctgccgaggccggggatgctcatcgttgcccagagttggcccgaggagccctctccg

SEQ ID NO: 5438 - DNA, 1006 bp, Homo sapiens
  source 1..1006: mol_type = unassigned DNA
gcgcgtgaagaacttagaccctccaatgcgcacatcattcccacacgcagggccgaggcggcagcgcggcccggagggggcccggagggaggggtcggactcgccccggcgcggctccgtcggggaattagctcccgagccgaataaaagcagccaaagactcgcacacccggtagaaggggggcggccccaagaaagcccgggctggggcggccccgcacccccccgtcttccccgccgcccgaacctgttgtaaaggcagagacaatggagaaagctccgggagacgcgcggagagactgctcctccggggagggaggggcgggccgggggaggcggggtaaggaggagggaggggccgccgagggcgaggccggcgctcagcgtcggtctcccgcacggtctcctggatgccaaacccggtctagggagcccaggagccgttgcagcctcagctcttctccctccctctctcgatgacccgggcaatgccaacctcctttcgggattgaaagctctaaatccaaggtgctaagttgatgggcggtctttgctctcacccctcgatttcgggcgcgtgtcttgaaagacaggagagaaaaaagaccacccagctgcaggaggcaaggctggagcgagtagcgctcgcctgccctttaagcaaaggagggaagcccatgtgcactcgtgcactgggctccggagcagccccggggtgcagggcactccccctccagggcgtgcggaggaaggccaccaaaacacgctgcactgccgaggtggagctgggcaaagtaggtagagactggtggggacggatggcgagcctgggaagccccgggtgtcctggtggagaggttccctgccgggggcggggcgctggagagcttccccggcgcggagagcttcccgggcgcggagagcgcagagaacttggccaggaggtgctggacagctccggaacccgcgcgccccctgccaaataaagcgtggagacccggactcg

SEQ ID NO: 5439 - DNA, 1185 bp, Homo sapiens
  source 1..1185: mol_type = unassigned DNA
ccggctctccctgggcgcagtgcgcaccgccggcgctcccagatccctggaccacccggcctgggggcgcgggcgcggctggggagggaggggagagctggctcacctggcgctgaaggctggaaggtacagtctcggtcccccggagcccggcccggcagcctcgcactgtccgcagagggactgagcacttgaaaagcccaccgcgttccgtagggcgccccggcggggctaacttgttcggctgcggggcacagctttaggggaactgggctagcaggcaggggccggagctgcgcgcccgcggtggccagggcggtcgccgggtcgtggggcgcgggcggctgcagcctgggcgttggggcgcccccgacccgcagcaaattctcgatcaggaaactcttgcccaggttgccaaagccgggcgcagcggggaggttgaggagcgcggaggaagccacaacgtcccagtacgcaccggcgtgggctgcgaccgcgctggggagcatagtgcggcgccaaccggtctgctgcgcgcccgccttgcgcccgcctgtcgcccgggcgccccgcaccgcacccagagccgcagcttctcgccgccgcctcccgcagggctggagcgcgcggagccaggcagggaggaaaggccacccgggacggcggcggacttggaacgatattatttatttgcgttgggcgtttttttaagggatgggaggagtgagtgtgggagggggaagctgtgagtttctctggccgacagcgtaggctctgggagcgcaggggggagtctttccccctctctatgcagatctggacgggttttttttttgttttttgtttttttctggacggacggaaggtgtgtccagcccatccattcatgtcaccagccccacaaagtgacagacgcggccaacaataagggtagtgctgtggcaaggggaggggactcgtagtgggaggaggtgggcgtggaggcgacgtgaatcgggcgcgctcgccacctccccgctgccgtgcagagccgtggcactctcgctagagcccaagcagtcccccaggcgtggggtctggtggacgctggcctggagcgcccggagggcggggtgggggtgggggggacgcgctgtcgtctggggtgtctccgcgtactcctgttgggcgaaccctggctctccg

SEQ ID NO: 5440 - DNA, 409 bp, Homo sapiens
  source 1..409: mol_type = unassigned DNA
ccgtctctcggggaaggggtccctgaggcccgggtggccgcttgggtaaccgcagcctgcctgcgtctcttccttcctccgcgtgggttctagcaacatccactgcagccgggccaggcgagccggcgcgtaccatcggcgcggggggaggagagggccgggcctgggaagatgctgcggaggacgctgcggattcgcgagcccggggtaaggcggcggcgcaccgccccctcccgccgcttcccccccaccccgccccccaccgccgcccttagccctcccccgggatgagagagagtcgcgctgcggagcaaccccagtggatgggtccgcgggggctgagcgggcggaggacgcgggaactccgtgacaccgaccagctgacgctgcccgcgtgaaaccagagccg

SEQ ID NO: 5441 - DNA, 1813 bp, Homo sapiens
  source 1..1813: mol_type = unassigned DNA
gcgggcggcggaggagggctggcggttagatacagtatcgctggagctcagagagccgggcagaggctggcggagagccgaggctggcccagccttcaggagaccggcgagctggggtgtgtgggagcgggatgcttctaaggcgaaaagaagcgccagcctcgtaagcggcctctatctgggctgcccaggccggatgctcaggagcccacagcaggggggatggagcgaaggaccgaggggctgggaggcgaggccgcagcgcactgacgcaggccagcgaggccgctggccccgacgcagggcgcccggcaaggtgtctggcaccacgagagtcaatccttgcgcgccatctccggaggccagtgcgcccagggcgcgccggcccggcaggagggtgggtgccagcctttcttcccatctctcgagcctcctccccggcgcccacgtgggcggagcagcgcgagggtgtgcgtggcaggggccgcggcggcgtgtgccgtgcgtggggtggggtgcgggctgggcggcctcgccttcgggccccgcgccgccggggcgcggcccccagctccatcttctttgccacctgggcggagatctgggggactgtgacctaccctgcggaagacacggaggggacgggccggccacaccccccgcgccactccggcaggcaccgggtgggtccccctcccgctccttggcttgagggcggaatccggagaagagtggaaataggggtggcgtgaaggagagctgggggctgggggcgggaccgggagggggtgttgggggaagcgacgcagcggctgggagattttgcaagggggtctgaagaggagtgggggatgggtatggaagggtgggggaccactgaggtgggatgcgagagtggaagggggacccagagggggcgcgatggccggaggagggggagatggacgatggggcggggcggcaccggtcgccgcgtcccttgccgccaggtccgcccctcggtcgccgggtccacgggttccctctggccagcgctcgcctcccgccccccggcgcacctgtacccacctgctcggcgctcaggcccgagccgggcagcagcagcggacgtagcgagcgcagccccgcgccgcatcctccggccgccccctccccgctgcgagcttacgccgctgtcgccgccgccaccgccttaaaaaggacaaaacggaacagaaaatgaatgcatgcacaaaaaaaatcgtaaaaagcaattgaggaggatggcagtcgcgcgcgcggctcggcggggcgggagtcgagaggccgcggcactggtggccgcgatccgggcaggcggccggcgcgtgccgcacgcgggtggctgcagctccctcggtcgcccgcgcccggctcaggcacggcaccgcccctccccccggggagcccctccgattggtctgtcttcctgccagtcaggcaggagggcgcggcgcccgccccgccccgcccccgcccccgccccgggcagatgccgggagctctcctgccgccgtgggagggggagctgagctgccggagcgtgcgcactgggccagcgggcggccggggcagggctggggtcccggcgctgagcgcccccagccgcgccgggcagcctggcgcctcgctgagtcggagcaacccccggcaggagctttcaggctctggtcaagcctcgggacccgggaagctatccctgccctcgggggctcgagcctggagtggggcttgcaggtaaagcggggctggggccgtcctggccgtcagtggtcaggaagacgcagcgaccccg

SEQ ID NO: 5442 - DNA, 1294 bp, Homo sapiens
  source 1..1294: mol_type = unassigned DNA
acgctccctccggatgcgcgtggagcgccccacaggaccgccgccctctgcgcgttggcgcgcacacgccccccgccagcctgggcgccgggctccgaacccccggtctgcaaacttgcgcatctcccctcgccgcgcccgccagacaacttggcgaacagctcgcccgcccgcaccccgcttccttcggcccttccttcaaatcccaaacgcaccgccgtgctccaaagaaggtgtccacgtcgcccccagaccccggagcgccccctctccacccccgggacttcccaggtcgctcactcctcccgccccccgcccagatctgagagggaccgaaaacacacccccgactcgggcagccagggccgaaactgtcaagaggagaaaaggtaaagcggaaggagggtggccataaacagatttttttgccccttcttaaaaggacactgccgctttaaaagtttctttcccgggcccccactccccgcatctccgtattttgggggagcgtatttaattgaggcaacgcagctttcctccagtgtttgcagaaaaatcaaagccaggggggtgagcccgccggctgtcaaccttcccgccgcctcccccgccccactctgctcccgcaagccgagaacgggctgcaaaagtttgcaacatttctggggggcggaggggggaggggaggggggtcctccgggctcggggcgccgccgcaggctcgcgcgcggccgccggaccccgcgccccgggcgcccgctcccggccgccccccgctccgcgcccgggctcccgccgccccctccccagcccctctccagcctcctacctctgctggtgctggaatagctctgtctgcgcaccggggcaggcggctcgctcttgcgggcggattcctggttcagcggggtctccctggagccggcggccgcgtccgcgccgctgctgcctggctcgctggcggcggggtcgggggctgccggagctgactccatgttttttcccaatgtagagatcgctggagatggcgagctccgagactccctctatcttctgttttcagagcaactctatggtaccaaaaaaaaaaaaaaaaaaaaaaaaaaaaaaaaaaaaaaaaaaagaaggagaaggcgaccggcgaaagcaggagggaaaaagcaggcggcggcgggcgggcaagcaaaagcgcgagggagcgcgcggagtgtctgggtggacgtgtgtgtgcgcccgaaaggggacaagaggcgggtctggccacaggcagcgctagcgagagcttctccagccg

SEQ ID NO: 5443 - DNA, 939 bp, Homo sapiens
  source 1..939: mol_type = unassigned DNA
ccgatgccgagagtggttctgctggagaaccgccgcgcctgcagttcctgcaccttttcccggagctgcgccagggaattacggacgaactggaaggggccgagaagaaaggtcttggccaccacctctagctccaagccttttcgctctttcagactttggatcctccccggggaggacctccaggagccccttggcagtttcccgccgcctagggccgacttttccatctcctcctctacctccggctcccgggcgagggaggccccgcgccgccccttagactggctgcggccggaagattgcagccgctttgagcttactccttgttttctcataatcaaggagtatggtggagctgggtcaatttcaggcacagcccagccgagtcaggcgaggtccagagagacctgactcgcctggcagcctcaacggacttgtccccgcagccgttgcggacctcccggtcgtcatggcgactgtgaaatgtggggtggggcgcatgcgttggaagccattcgcgcgggcagtccctgagtgtcccctcacgtgctccccagcgcgagcagcacccccgcctctgcgcttcccagagcgtgcagcttccggtgagggcagccccacgcacagccccccacaccctccccagcgcctgcagcctccggtgcgcgcaggccccaagcccacatgcgcagtcctcaccttgcgcgcagccccatgtacagccccggacgggctcccagccccactggcgcagaacccatcaccgcttgcccttcacgcgcttcattgggagtgcagcccccaccccgagcgcgcagctccacgcagcctctccacactctccccagcgcctgcagcacccccagtgcgcacagctctgccagtcgcttccccgggcgccgcccctgcaccacttcggcccataaccttgcggcg

SEQ ID NO: 5444 - DNA, 939 bp, Homo sapiens; identical to SEQ ID NO: 5443
  source 1..939: mol_type = unassigned DNA

SEQ ID NO: 5445 - DNA, 899 bp, Homo sapiens
  source 1..899: mol_type = unassigned DNA
ccgaacgcagttacgcgcccactggctccctgtctctggcgcttctgggcacgggggagctggggcggccccgcctgcgcacggcggtgccgggattgggggcgggcacgccgcctccgtctcccacgcgctcgctcgctcgctcgctcccgccctccccgcctcgagcgatctcctgcctcagccttgcaggctccgcactgcagatgcctgctggcttccctgcgctcggcggctcccgcggtgccccgtaagtccccgtgaccctccagcaccagccggctgtgcgctccctgctcccacgggccggtcagccgcagacactcacccagctccgcgagctcagccgctcagcgagtggggtagcggggaccgagacggacggtagccgtgccagagcccggggcgctctcggatgcggcaggacaagctgaccgggtctctgaggcgcggggggagatgcctgaagcggcagggcggcggcgtgggcaccatcctgagcaatgtgctcaagaagcgcagctgcatttcccggaccgcgccccggctgctgtgcaccctggagccgggtgaggaccccagggctgcagatggggcgctgtaaagtagcgccggggctgcccgcgcttctgccttagcctgactccgtctaggccggggagctctggggaaagtccgcgtgccacctggtgcggggcaccgcgttggcacctgcagggagcgattggtctggaagggtagagggcagacgggggcctgggtggggcagcggccaccccaggcgcggagaacccgctgcttccaccctctccccgcggacccccaccctgcggcctgtgtgctcggctttctccgcgtggcggggaagtgcgggtggctgcccgggccctcagaggccg

SEQ ID NO: 5446 - DNA, 899 bp, Homo sapiens; identical to SEQ ID NO: 5445
  source 1..899: mol_type = unassigned DNA

SEQ ID NO: 5447 - DNA, 547 bp, Homo sapiens
  source 1..547: mol_type = unassigned DNA
acggtagacctcggagggggtgcccaggacagtgacggctgacatgaagctagcggtgagggacagcgccacgggcactgcggtcattctgcggccgcccatcaggaagtccttggaggtctgctggccgcccccagcgaaggcgtagtagatgccgatggcggccgagatgaccagcatgcccgcgaacaccacgtagtcccacaccacgaaggtgccgatgccccgtggcgtgtccatggccgcacggtcgcctgagccctgcgcgcaaactggtggccccgcggcgcgcagccggagcccggcgcgcacttcttatcccggatccctggcgcgcaggcgtggcgtcccgcggggactggaggcgtcctccaggtgtcggcctccgaacgcaccccgaggcggggtgagggctggcagtcgcccctgcacccgccgctgcgagccgcgcccctcaaacccaggtatgggacctcggaaaatcgacccgctgccctgagtgctcaccacgtgaggaactggagtggccgagttcgccaaggcgccg

SEQ ID NO: 5448 - DNA, 2505 bp, Homo sapiens
  source 1..2505: mol_type = unassigned DNA
tcgagttaacgcgccctagtggcaggtggcgaatggccggagatccggcctcccagtggtgtccaccgccacgggcctccgctcgacaggcttatttccctccatgctggagcaaaccccggctgaaagagggccgcactaattggtttgcgtacccgaagtgggaatagagagggaggaaaaccatgtttcaggtgttacggggggaaaaaagtgaaatgcgaaccgcaggggagagagcgaccgtcaggcagacaccttgtgaaccgcggtggagagcacacctaggtggggaggtcaccggcccaacccaccaccctccgggagaatgcgggcagggacagcagcagggggcagcatccacgtctctacgcttgcaagggttccccaagtccctggccactgctccccacttcctgcagcctcggtgtccgccgggggcgtgtgtgaggggcggggccgcatggggaggagggatttaaaaaaaaaaaaaaaaagcgaggtaattagcattctccgattccactggctctccgccgcccctgctttgcatacgcccgtcccactggctgcccggggtttgctggggttcggcaaggtttgcagccgccacggccgctgctgcgctccggtgcagggcaggctggcgccgagcgaaccagggccgggaactgggagccgggagccgggagccagctgcccgcggagctgcggcggcggcggcatctggggtggtctcagtcccacgaacaccgtggccggcgcccggtggctactgcgcccagcggggctcagggaagagcggtctagacactttttattttggaagaaaggggcaagccccggcgggagcttccttcccggcctggctcgctccccattgcgcccagctccggcccggactctggaagatgactccagggtctgctctgtatattccagcggcggcagttccgggaggcagccgaaagtactaacagttggtagcagcggctagtggaaaagtgagccaaggcggcgcggactcggctctccccgcgccccgcggcactcgctgctcctcgccgctccttccctttggctcccaggcggctgcagcatgaagtggcgcagcgatggccaggagaggtaagaagcccgtggtgagaacgctggaggatctgacgctggactcgggttatggtggcgcggcggactcggtgcgctcctccaacttgtctttgtgctgttccgactcgcacccggcgtccccgtatggcgggagctgctggccgcctctagctgactccatgcacagccggcacaacagctttgacactgtcaacactgccctggtggaagactccgaggggctggactgcgccggccagcactgctcgcggctgctgccggacctagacgaggtcccctggactctccaggagctggaggcgctgctgctgcgttcgcgggatccccgggcaggcccggcggtccccggcggcctgcccaaggacgcgctggccaagctgtcgacgctggtgagccgggcgctggtgcgcatagccaaagaggcgcagcgcctgagcctgcgcttcgccaagtgcaccaagtacgagatccagagcgccatggagatcgtgctgtcctggggcctggccgcgcactgtacggcggctgcgctggccgcactgtccctctacaacatgagcagcgccggcggcgaccgcctgggccgcggcaagtcggcccgctgcggcctcaccttctccgtgggccgcgtgtatcgctggatggtggacagccgcgtggcgctgcgcatccacgagcacgccgccatctacctgacagcctgcatggagagcctcttccgggacatctactcgcgggtcgtggcctccggggtgccccggagctgcagtggccctgggtcaggctcgggctccggcccaggcccgagctcgggccctggtgcggcccccgcggcggataaagagcgggaggcgcccgggggaggagcggcgagcggcggcgcctgcagcgcagccagcagcgccagcgggggcagcagctgttgcgccccgccggccgccgcggccgccgcagtcccgccggcagccgccgccaaccaccaccatcaccaccaccatgcgctccacgaggcgcccaagttcaccgtggagaccctggagcacacggtcaacaacgactcggagatctggggtctcctgcagccctaccagcacctgatctgcgggaagaacgccagcggtaagtgtctgcgcgggtgccactccctctcacctaacctggccaactcttggcgcaagtttgcctcgcgtccccctcccgcgtcttcccagccacgcgctgctgtcccaagccgctgaggaggcggccgggctggaggtagccagaacaagaggttgcctgtttgctcctgcactcgggtgcgcgtatttcacgctgctggtgctgtcccaggtccgggagcgcgaggttccgcccccggtgcggggcggggcg

SEQ ID NO: 5449 - DNA, 1587 bp, Homo sapiens
  source 1..1587: mol_type = unassigned DNA
gcgcgtctcgatagcccccaagatggccgccaatgtgggatcgatgtttcaatattggaagcgatttgatctacggcgactccaggttagtgcgggcagcgccggccgcgcggccgtgaggagcccccgggcgcgccctgggcgcattggggaggtccccgggcgggcaggcggacgccctggggcggcgggcggcggctgccggggctcgccggggctcggccgcccgctgcccatcgataggtattaggaattgatctcgccgctgctctttgttcggttcagtcatcgattagctgccgcgaccatggagaagcgctagtgagccctcggtcggcggagcggccgagcggccaggcggccgggcgaggagcggggaaggcaggggctacggcctcgggcagggggctgctggcgggaacccccggcggtcccccctgagccgcactttgcgcgcctcccaacttcgcggcgcccggggaggccgcggagcgcgccgcttgccagtccgcacccggctggggctccggcgagggagggagggagctggcgggcagggaggaggaggaggagaggaggaggaggaggagagaggaggagggagccggggttggcgaggaggcggctccgcgccccgccgctcgccggcacctcagccttcgccgcccgcctggctgcgcagcccggacgcgccgccacccgggggccgccgccgccgccgccagagccgccgccgccggactggccgcaagcgccggcagacctcttctcctcgggccggggtcttggggttcgtcttgcttcttgcctttacccccccgccccttccatccccttcccaagtctagatgcagacgggcggtggaggtgggcccgggcgctcgcaagtttgcgctcctgcctccagggcggtggagagccgggagcggcgcagagcaggtgactcccagccctcgggcccaagggaacttttaaatgagagatttccttgcttgttctgcctcctgcgtttctccccgctgctcccctcgtctcctctctcccgtctctgcttttcttctgtttctttcctctcttccctgctctttctctctccttccctagggcgactcttcgaaaccccatcactttctccccatcctccctttgtgggagtctgtgtgcctcccctagatttggaggtgttctctgcggaccccgtaggagccggggctgggaggtggaatctcagagaacgcaccgtggaggcgcggctccggcctctgttctttcccggagtgccccggacgcgcctggcaaggccccccagccttggagtctcgcaaagtctcggcgggtgcggcggggatcaggggcgggaaaatggtgcggataacagggcggttagagcatcctgccttgaccgtgacattcgcggaagacgcgagatcatcagtctggagataaaaagggacccacttttttttttttttttaatccgccggcaaatctcgttaagtttcttctgataagtggttccagcacccgcgccttctccccgtcctggccgcttcccagtccccgtccttccgaacgccccactcctcg

SEQ ID NO: 5450 - DNA, 5693 bp, Homo sapiens
  source 1..5693: mol_type = unassigned DNA
tcgcggttgctgggagagtactggcggtgggctgaggctcctggagagcccgcggggtggagatgggggtcggccccccctcggcgcccagccgaggagcagctgccagttgagtgcggacccgagagagaacccccgagggacacccacgtctcccaccgcgtctgcgtcgggcgttttggtttcaggaggctgcttcggggcggggcccccgggggccgagcgcggggggcggcccggcggccttaccacacggcggcttcgttgagctcggggttgggatgcgacaggggtccgctgtagccgctggtgccgctcattgggaagggcgggctgggcccgccgctgaatacctcgccgggcatggggtgcagcgtgcccggcaggcctggctcggggctcggtgtgtccgggtgcgagatcatgtcggtgaacctggggttgtccgcggcgtgcgggccggcgagcggcggttccagcgctcccagcggcgtcgagccggggccagaggccgccaggaagctggagtcggccggggactgcgcctgcgaaggcgggccgtgcgcgaagaagtcgtagttgcttcccggcgcgtagtagtcgccttggtagtctgcggagggggagcgggaaggagacagggcgcggtgagagaaggcgaagtaggcgggggacccgggacccggggaggggacccgggcgggcgagagaggggagcgcgcgacaccgacccaaggttagagagacctgcggaggccggcgccccttgagacggtggacgtcgcaggctcacggggagggttggggagagagacaatgagagatctcgaaagggcaagagactcagactgccagagaccacacacagagacgggagagactccgagaccgtgggggacacacgcggcaaaaactcggagacttcagtcacaggttccctgacacctagagatggagagagacagaggcggccagagacgcagagacagacaatgattcctaagtgtcttagggtcggtgagagacacagagatgcgggacagcgagagacagacggagagatcggcagaggggcagagagaaaggcggaaaagagacccagagacgcggagtccgcggctgagacccgaaagcccgagacatcggagggtcgcggaggagtcgaggagacgcagagagaggaaagacggccgcggttagagacacgcgtggaaacccccgggggcggcagcgagggagtcaggagtgagcccgaagatggagagaagtcgatgcgcccagagaacgcaagacggtggatcagagatgagtcccaggaacctccagagaagcggaggctgacaggcccggggagaggaaccgggcagggacaaaccagcggacagagcagagcgcgaaatggttgagaccgggaagcgacctggccgggggaaactggatccgggccgcggcaggagcgactggtgggttgggccgggcggggcggccttggcgccctaaactcggtccctgcgccctaccaacccagtccaagtccttcgcctcgccaagtacggccgccgcgtcgatcccggtgagaccatttgtaccggcctagcctagcctgagaaagagaaaactgagctccagcgacttgggagagggggaggaggacacgaagattctctgggtcatggccagagctccgcgggctccttggggtagaagctcggtcctccagccttgccccgggttggttttgccagcacccccaggttctgaagcatctgaggacattgagatcttttgagaagctggtgatagctatgggctctctctcaaggaaaatgcaaggatgagaattttgcccataaattcaggaggtgtagggactccggattgcaaacccattctgcctcaacaaatctgtatcaactctctgaccgccccacatagccccttttccagaaccttcgggatatcctgccttcccccaccaggtggggccctgaaggactgacgtgggggacgtcacgaaaggaccaccttgtaccaggcacccgctttgtacggcgggaaaaccagcgagtccagaagcctgagtctcttctgcaaatccactccccctgctgagtcctgggatctcagtcaaggggcgaattcctgatgccccctgccaccctcttccctctccaaaccctgaaatctgtccaaatggggggtgtctggaggcgtggcttggaggcagtttaagcaacagctaaaacggttgccaattactttttaaaaccattaatttaattctccccgaaagtgaaggggaagatggggagcggcaaatttggagccccaaagggacagggatgggagacggccgcggcccgcggcgagccggaaaaccagcgaaggccgctgcccccgcgccgtgcgcgccgcctccgcccatatggcggccgggccggaggtaattggaacaaacgccgtctgaaaagggcacaaaagccgcagctggggctttgtccgcgctcccacggggagccgccggccccgccgcccggcccctttctcgcccgctgccggtcgccaccgccgggatctcccagcgcggattaggcggggctgcctcgctgggggctggggagtcttccccaccattacggggaacgaggggcccccagtatccagctccccacctcatccagcgcgcagggagaggaggcggtgggataggtcggggcgggggcgaagtggtcctcggggaaaccttggttaattatccaggcggggaaaaattccgggccggtaccgcccccactacctcgctgctccgggcccagattttgtagggaaagaggcaaatttaggtggagagagtcggtgagtggagactccggaagacacgcccaccatccgggctctccagggttgggggtctgtccggggttgggggtctgtccagggttggggggctgtccagggttgggcggctggggcgctccagcctgagccctgccactgcctggggtctctgccctgaaaagcacagcctggcattttgcccacaatttctaggggccccggtccggtctcaaggtctaatcccccctcaggcttccggatgtgctgaggttagtgatggggttatcttcccttcccttctgcgtctacctgggtgcctagctcctgccttgctaacactgccactgaacccactttctaagagaaattgcctcttcctaacctgcgttacaactcagaagtgcagatgcctctcagacatagacagtcctggggtctctccaaattcagaagcttcagaatagaagaggagaggtgctttcttgagccctcagccctgggaagaacaggacagtgagcttggtgagctcaagcaatgcggctcagggtaaggagctgaaaaaatcggatagggggagttgggatggctcaccaatccagtgtgagggaagtgagaggaggaaaagctgaggtggcaaggggacagctcaccccaggcccaagcctggtaccaccatctgaagccctttgtaaactggggctcctcgctctctgcagccccaaagacggtggaaatctggggttggcccaacacttgtgcccccagtctgtaggaaccccaggggtctcggggctggagggtggactacagtcctgcccagagcaactgccggcatttgggctaacactgccagatgctgtgcgcacacaccccgccacatggaacaggagttgctgccttcgatgctagtgagcaggcggcttggaatgaatccagacccccatcccctcccctcacactaccctccagcgctcggaatccacctcatgccaagtacaccaggcacagggcggcaggaaggctgtgcgtctgtccgtgggggccgcatgcatgtggatttgccagtactggcctcagtgtgactggtgggagtgtgcgcgtctgtggagttgtgtctccgtgagtgtacctgtgtgtgagagggtggaatttacctatacgtgatcgtgcgatcgtgtctagacgtgtgtccctggagtctctgaacgcaagtgtgagtgcaccttgtgccctgcgtgggtgaatgtgtcactgtatctcgtgtgtgcttctgtgtgcatcactgtatgggtgagaccatgtatctgattttgtgtccaggacatgtgggtgagtgtacatgtgtctgtgatcgtgtgtccagcgagtgggcgatgttctggagcggcggaaagcgtgctggccgggacccttcgccctcagctcccggaataggacaggtgcggaacagcgaatcccggggcgccccttacctccgtagtaggtgtacggggtggaccccaacatctcagactcgtccaagcggccgcccagcggacgcatgcgccgcggactccggaagaaggcgtgcctccgggcgcctagggcgctcagctgtttcatccggcgttctttggaccgtcggttctgaaaccacacctgggacagaggagggggctgtgaacccaggatcaggagtgtcctctccccccctcttctcccttccctgactgggctgcccctgctgggtccttgcgcctcttccgcaccaggactcccccgaggcggggccgggccggattaggccgggaggggtggagagaggcttcggcgaaccagccaagggtgaaggatttcgcggacccgtggggcgactcataaagacttgggcttcctggtccccggctcgcccgcggcctgacggctctataaaggcctccctcccggcacggctctcgcctcggcccctcggctccggagccagcctctggccgtttgtctgcccgcgcttcggcgcagggagggagggggcatcgcctgtttctctgctcgaaaggtggaggtaaagagggatcccggaccccagagaggcttacaaccttccataagcaaggcggggggcggaattcagagaggtaaagtgacccgcccccaaatcgcaataccaggaggacagcagggctagatggaatctttcggttcacagtccccgacctcgggcaagtgccccactcgggcgcacggtctgctcccagaccagaaccaggcgcgctcgtagccaaggaagcttggcgggagactcctccgaggctcccggctcccaggccagcggggctaaggagctgtgcccgccccgggccgcacctggatgacgcgcatgttgaggccggtctcctgcgccagctgctcgcggatgtggcgcgtgggcttgggcgtggcggcgaaggcagccttgagcgtctccagctgcttggccttgatggtggtgcgggggccgcgccgcttggtgcccgagttctgctcctcgttctcgttgttggccgtctccttgtccgacgaggtcgagttgtccgtctctttggggtcgtcctgcagtgcgtcctggaggtccggggacaaactgcggtccgtacaggatgacactgcgggcggacggatcgggaaggggacagcggcgtcagcgacggccagacgcctcttcagtccagtggcgggttcccgccggcccaagctacggcctgcccaggctacggccagccccgctggattccctcccaaacctgcgacagcccctcccccagggacccggtgcccgcccactctctccaggcggggctgggcctttggaggggcgctcttaagccctctccgcgcg

SEQ ID NO: 5451 - DNA, 589 bp, Homo sapiens
  source 1..589: mol_type = unassigned DNA
tcgcctcgttctcggggcttcagggaggcggcgactggagccccgctgcctactcacaacaaaagaaagcagggctggcgcccctacacgcgctcccattcactgccggccgcggggagaatcctaccccgcgccctcgccagggtcccggggagctctgggctggcggaggcgaacaagatgcggtttgacagaaccaggccgtgcttctgcaaacctcaatgccgctccgccagccgcggcggcctcccagactccatttgccggggagctccgagccgcgcaaaatctctgcaagctgtgctctgcagaatgcaaagccgggctggaatccgccattcccgccgccccagccgactcggccgacgagctccctcctgagcctcccgggccatctgccgggacggttacctcgttcggtgaagccggtgcattcaccacatcctctgctgctcctagcagggaagccggcggtgaggcgggggagcaggcatggtggctccggggtttatgcggggtttactgcttacccagaatagcggctactgctgcctactagggcgcacctaccgctggagcctccgcggcg

SEQ ID NO: 5452 - DNA, 1294 bp, Homo sapiens; identical to SEQ ID NO: 5442
  source 1..1294: mol_type = unassigned DNA

SEQ ID NO: 5453 - DNA, 1373 bp, Homo sapiens
  source 1..1373: mol_type = unassigned DNA
gcgagcgtctggcgtcctctggggcgcagtcccgagagagccccttccgggacctcggacgcaaggcccctgagtggccctggaagttggatcccccggggaccctgctccgaaccctggccacctggaagcaacctcatcgagcgctccttccactgcccagccccgaaccgtggcggaacgcgcccctcggcctccctagagcctcctttgcgggagaagcacaactttcccaggttttggagacggcgctcttacaccccaatctcgcccagacggaagaagtgagaggtgcgggcggccccgccatgaccgcgggaggagagcgcaaggaggctcctcgcaaagttggaggccaggccggagcgatgttccgggagcggagccctcccagcctcgggcccccagccgcggacagctggcagtgccaaagactccgccattacctgcggctcgcagttgcgattcggccgcagagtcgggcaccgaggaaggcgtaaagttgagcttgggcaggtacaacggtccccagggactggcatcccccagcccgggctgcccgcgggagggtagcgagctgtgccaagggctccgccattaccgccagcgcacagctcggagccaagcgcgcggctgaggaacgactagggtcttgcaaagttggagcctgggcgcgtagacccccggaccggagcccccggcctgaggccgcccgctaggaggaaaatgaggccgcccgaaccaagttgggacgcgcagcaaagcccgagccttccgcgcacaccaggggctcgggcgggagcggggagccctggggacggagaaggggcgcgggacgcctggatcaggaactcacctgacgccgagccgggcagcgccgaggctgcctcttcgcgctgcgcacccgcccgcccgcctcgtactcctcctcttcctcccgggcgcccgcggccgccgcgctccgggttctgaatcctccgagtccgccgccccgcgcggctggagggcgccggttgcacccactcgcctcctggtaggagccgcgcgcgtccctccccttcccctccgctttgtgcctccaagatccctccccaccccctctcccctagcccccactcctcccttctcttcttccctccccttgcgtcccctccctcagcctcagcgaacccaagttcgggacggaggctgcgggcttccccggcgcagtgctgggcgccccgcgcgcgcccctggctcaccccgtccgctcggccgctgctcgctgcccggccgcccctcggaggagccgcggcgctaagtagctcctcacccagcggctggaaacgcggcataaatatgtagggactgagccgtgagctcagcgagggtcg

SEQ ID NO: 5454 - DNA, 1524 bp, Homo sapiens
  source 1..1524: mol_type = unassigned DNA
gcggctctgcggaccccaggcctaagggggcatcgtcccaaacacccgacgcgcccccatcaccagttcctcactggcaggccccaagcgggaacgggattgggaaggcttcgggcctggggggccttaccccgatgccccaggggcgccctgaacccagttccagccaggcggcggcacctcaggcagcgcagggagcgcgaccggctcggggagggggaggacgcggcgctcccgccctccctcggtccgcctgtccatctccaggtccctctgtccgccggccccctggctctgcccaccctggggctggtggtgggcgcgggccgggcctaggcccatgcccggccccccttactgcctgccctcctccctcaccaccccaccccacccccccagtgctcggcctcgtttcgtcaccggatcccctggaatgggggacgcgggcgcgaaatacgaacccagccaccggcagctccctccccacgtgcgctcggcccgcagcgcagagggcggcccggggtgggggcgcctcacctttgccctccatggcgtgcacgaagtccccctggtacagctggctgcgaagcttctcctccaggctgaagccgcggacgctgacgatctcctccacgtccgacaagtcctcgttctcgtcgtatcgctggcggtcaatcgggcgctgcgaggacccaaaccagagagcccgggacattattgtgggggctggaggtcgcctctcaacctgggcccagcactaacaggtgcagcagccgagcgccccctgcaccccaccattgcaacccaagcaactttgcgcaattgccaaagatgctgaaaagcaggacaaggagaggggcccgcaccccgagggtccagctgcgctctacgcggggtactcccctccggtgtcttcggaagcactgaagggacatctggggaccctcccctgccccccgcccccgaaatgtgctgggcttcgcccactcggccgggagcctggttatgtaacccgcgaagggggctccggacacgggctggcggggcaaatgtaggccccaggaggagccgctgcggcgcccggctcggcggtaacagcagccccagcggccgcggcggcagagccgggaagccggaaccgggggccggcggcatttctaaagctggagccgcccccgagctaccggggaagctggaaagctgaaatggaagggctgagaccccagccgcccccgccgcccgcccgccagtgcaagaagaggaggtggggggaggagaatcggggcttggaagggggagaggcagacggcccgccacaaagctcggatcggagaccccaaaacgcaccagcagctgcctcatctccccacaagcgcgcgcgcacactcacttcctaaggagactcccccaccactccccgcatccccctgcctcctccctccaccgcccagcgcccggcccctcagccccccagattccgggcgaaccccgagcccgctcagcccccctccacgcctttccccg

SEQ ID NO: 5455 - DNA, 1009 bp, Homo sapiens
  source 1..1009: mol_type = unassigned DNA
gcgtctgcagcgaaggactcgcgtgggagcgagaaatgtccctgcccagtgccccgcgcgctggatcgcgggggcgagtctgagggtggagaggccgccgggtggaggcgcgcaggggtgcgtgggtgggtgcggaaggagtgcagggtatggaggggaatcttggggcggcgcgaaggaggagcgcttggaaaggcgcggtgtttggtcacagaggggctcggagtgggagtgcaggggtgcggggagggagtgcagggacgcggggagggagtggaggggtggggacgtgctggaggggcgcgcctcgatagaactggagaaactggaaaagtggaggggcggggcagtggctggaggaacctctgaagcgacgcggggaatatgtgaaggagtgctatgttggaacttggaggggaggggggatgctggagaggcacacggtgatggacatggaaggacccgggaggtgtggagtggtgggcccggcccgtcgcgggaaggacacagagggacataggctgccctggagaggcgctttcggacatctggaggggcgcatagtgctgggacttggcggcgcctggggcggaggggcgcgccggatccagccgggcgcgctcgggggccgggcgcagtgggagttgacgggcgtccagccggcggcgccctgggctcggctaggcgcaggacggccctggcagcggtgcagcagcccaggctagttcctggggggtccctggtccccgcctccccgcgcgccccggccagcaccgcccggagtccgggcggggaagtgggcgcccgcggcttgggaagctgctcccccgccctggagcagagtcgtcgctgcggtcgctgaggaaggacggagcagaggcccgcgctgtctggggagaagactgtggtgtcatcccgtcgggaatgaagggaaatgcagcggctgtttgcgccccgggactccaagaagtacagcaggtaaagagaatagccacggcccgccacttcg

SEQ ID NO: 5456 - DNA, 961 bp, Homo sapiens
  source 1..961: mol_type = unassigned DNA
tcgccttccccgacacctaaaagccccggtcctgcgtaatattgcggatccctcccagcctcccgtccgctcctcctcccgcggggctccgctcagggccggtcccccgcccccacgccgcagcccgggccagcggggcccgccgcggtggcgttcgcggatgctgccgcattggccgctgcggcacggacggcgcagcctcgggcgcggcccggcacaggcgccggcggtccccgccagctagcagcccggcgaggcgctggcccacccatggtcctcgggcggcggcccctgcgcccagccctgcgcgtagcctccgtctctcgcccggggccgccgagcccccgacacgggcgagatgctgaacggcgcaggcctggacaaagctcttaagatgtccctgccgcggaggtcgaggatccgctcgtccgtgggtgagctgggaggggcgcggcgagggagggtgggcccggggcgggggcggcgcggggcgcgcctgcggttatgcgacactgccccgcccgcgccccgctcccctccctgggctccctgggctctctgggctgcaggatccgccgacgcggcgcgctggccgcacgggggctgggcgtcgctgcacctgcggggccaaaaggctccaggccggggcgaggtgagcggcgggcgtcagagacccccggctcgtccctgtacagatgtgtgtgtgtgtgtgcggcctccctgtgcgcgtgcccgtgcgcccctacgcgcggatgcggctcagggatgcgacctaggcggcagtcaccgcgatggtgggcacggtttggcggcgcagagaagatgcagccttccctgccggcggccggcaccgctgtgctgcagagctcaaaagcagagggggaaaaaggcatccgaagggtccctcgagtgattctcaccacttggagccccgggtcctcgcgcgctcacagcggcgacg

SEQ ID NO: 5457 - DNA, 961 bp, Homo sapiens; identical to SEQ ID NO: 5456
  source 1..961: mol_type = unassigned DNA

SEQ ID NO: 5458 - DNA, 980 bp, Homo sapiens
  source 1..980: mol_type = unassigned DNA
gcgtgagcgaggcaggcacacacggactcgcggcggtctgtttgcaacagcgctgggaatgcacattggaaaatcacatcttgcatgctgaaaacgaacaactgtttgacatctgggctgctgccgagaaaaccacgcggcagcggcaggtctcgagccaggggccgccatcctcgatggaatatttaaatcgcctatttccatcgaactcccaccctccaaacgcatcccccgcgcgcgtgcacatcctcaaacgcacccccgaccggaacaaagaggggctccagactccccccgtgcgcacggggcagtcgggagggccacgagagggaggtgtgtgcaatggaagtaccgagacagacagacagacagatgcccatgcactgctgccgattccctggcggcggggacgggagtcggacgcgagggggacagacagggtgcggggacaggcggcccgcgggggcgggggggtcatcgagggggtcaccttggctcgcccaggccgagggggctcctccggtgcttccgaagcgcgtgggctactcgtgtcgcatgtcggcgcagttgcccgctgtggcaaggggggggcggccgggctccggagcgggccgggagggcgcggggcgcgcactccgcggcaggtgagcggcgcggctgcaggtgagcagcagcctcggctcgcgcgcccagctttccccgccgcgcccgcccggcccacacgctccccgcgcgcgcgccgcccccgccccgcgcgcgcccggccgcccgcccgcccgcgggatccccgcgaggccgcgcgcccccacgggtcagggctgctctagggtgcgggcaggcgagggcggcccaggggcgcggggcgaggggcgaaggagccaggaggctgagaactgcatggtagccctgcctgcctgccgcgctgcgcgccccaccccagccggcggccccgggcttgcaccgggcggggcaggggagcg

SEQ ID NO: 5459 - DNA, 408 bp, Homo sapiens
  source 1..408: mol_type = unassigned DNA
ccgtaccccctgaagctcgctgggcgcgccctgggctgtccttccctgagcagccgggcctagagtcaaggcgcgatgattgccgcgcaagctagggtccacgcggccggggctcctctcccgcctcgggcgcaccagaggccagaaagcggaaagcggctctgccaggccaaggccgacagaaaccgagagcatgtcgctatttgccggagagaactgccctgccaggctgccacaggtgacttgcccgcgcgagccacggcctctgcgcagagctcctcccgaaggggagagtcagagccacccgcgggtttggtcggggctcttcccagcccggcgtccacgccccgcgtcctgcgctcgcccttgcggctgcttatgctcaggtgtttcggaagaggcgccgcg

SEQ ID NO: 5460 - DNA, 2190 bp, Homo sapiens
  source 1..2190: mol_type = unassigned DNA
gcgctccgaaatctggctctctgcgcccaggggaacgaggcacaaatctccgccactcagccccactgagcagagactgcgagtccgaaccctcaagttcctcggggctttgacccctcaatggcggcggtctaactgctggtaaaacccccggcccctgactgttccaccgcccgtctcccaaacgcccagcgaaggctgacttaggtggcgggcggacctcatcgattcctcaaaccacatcgtttggtcaaaatcgcccgccctctcttcgctcggattttaaaggctaggcttgtaagtcagtaagttaacggtatttgggccctgggctgcccttgtgggtcagggtcactgatgtccgcgacacggactggaccgcgcaccacgcctgctcccggcagaggccccacccgggtggctgagcgcagcgcactggggccccgcggtccgagagcggcggggaggagcgggcgctcgccgagcgttccccgggacagtccggcttggggactcaagcgggtcatgggatgccggcgctggccctctcctgagatcctcctgctcccccgcaggcacgagtcccctccaaatcggctcccctcctacactctcgtgacgcgaggtcgcggccagtgcccaatatcaccaaagtcccggcctcagcccagccccgggcagcctggcaggctttcaggagcctctgctcccggctccgggggaccctgcgtacctgccccaggtcctctgggaatgggctctgggtgccaggcaggtcccggtgcgtgctgctcctagtgcccagggcctcggcagtgagaccccaacccgacagctggataagggatcagcgatcctgtcgcaaacggacagccccagcgcggacccggtctgagcgctgatgctcgcgggtccaggccagccactcctcgaggcgctccctcggagaaagggcgcagcggccccaagcgtgcccgctgcaactagtgtcccaggttctcgccgtagccagcttctccgggctacagcctcgtctccccgcgtgcaccccgccctggcctcggaggctctgccctccggccgccccatcgcagcccgcctcaggccccggcccccagccgcgcctcacctgtgagaagcagacagctgagcagcgcgcacagcaggaccccggtgtcccagtagctgaccatggtgagcgcgacgcggcctgctcgcccggtgcccgcgctccccgcggccaacgacccggccgccagagtccgtcctctcgttcgccgccgccggccccgcgccctgagcgcccgtctcgcggctccagccaggagacaaccacttccccgggtaatcctcgccgccaggcgcccgctggccgctgcacccgagccccggagcccgctccgagccgccgccgctgccggggaggagccgagaggagtgtccgcctggcgcgctccgagcctcccgcggacctcgatgaagagcagccgagggcgggggcgatttataacctttccccagcccacttcctaccccggcacctccttctggtgacgtcaaggggtcccccacccctcatccgcctccccacctaccctcttcttcctcccaggctcgcttccctgcggctacggagaggggcgggggccgacgagggcgggtggcccggggccgagcgcgcgtggggaggtgctggcgacgcgggcccgggagcgcggccccggcaggttcagggtctttgctccgcgccctcttgcccttgcccctcctcctgcccatcgcgctcaggaaatccttgcagactccctccacccggcttactcagctctgggggccgcccgaaactggggaagggacaaggctgaagctccgccgcctggccctaggggcggaaagtccgatccaagggaagctggccgcgcctccgcgacggtgttcttggcacggaggactgaggcgcagtccggctgtctccccttgcctgctcttcccgcgctgtcccgccgctcctgaccccttcagactgtcccgagaagtctaggaaggcaccggagaccctcggcacaaggcactgaacctggagcgcctgaggggaactgacgcttgcttggcacctttgggaagactgcgaaccagctcaggtcccaggggagcgtgtccgtgtctttttcggccgcattgatgcacccg

SEQ ID NO: 5461 - DNA, 2190 bp, Homo sapiens; identical to SEQ ID NO: 5460
  source 1..2190: mol_type = unassigned DNA

SEQ ID NO: 5462 - DNA, 679 bp, Homo sapiens
  source 1..679: mol_type = unassigned DNA
ccgagtggagagcagcggccgcagcgcggcgccaggctcgggctgggctggccggcgcgaacccccgggggcgtctgggcggccaggccgggtggcggctgcgcacgtaggagtaccccctgagcccagccgctcggccggcctgacccgcgggtgaccggatacgagtaacgcgtgcgccccgatctgtgccctgcgcggggtcgggcggggaccggccgggggcgccgcgcgcccggtcgggttgactgtcgggggcgatttccgcggggcaaggcgggggcgcgggagcagcgcgcagctgcggggccattccacctgagcgccctgaggtcagggccggggcctgaggacacggcgctgggctccgggggacgcgggttcacgccggcgcccgagcgccacctccccgccctccgccggctcacgtagtcccggggttcggtacgtgaagtgccggcgcgaggctgctcaggccaccgcatgggccgggcgataaacaatcgcacaggatacacaacaccctggactgtcacaagcccctcgcaggaaaagataaataacatctgaggcgctgcggcgcggcttccccgggctgaacaaaaactaggaggtggggggcggtggggcgaagtaaacaacagaaccgaagaattgccgcacggagcctgggccggcg

SEQ ID NO: 5463 - DNA, 2013 bp, Homo sapiens
  source 1..2013: mol_type = unassigned DNA
ccggcagacctggagacgcccccggcctcttgggagctcctgagggtccaggtcgggtggggcgcgccttgcggcaagttcccttcttccagccaccgtcctgaggagcagaaggcgcggggacacacacatacacgcccgggcacgtcgccgcactcccccaactgaaccttggtgtcttcctcctgcctgcaaagacatcccaggccctgggcctgggagctgtccccgcgcggtcctgcctgaccctagcggggtcatagtagtctggcgcccggagcggctccagcgcggcgccgcgggcctaggtgggtgtcccagagagcgggcggctgcgcgactgaggagctggaggcgcacccctccgcccgccagacggcccggcccgcgcccccgccccactcccctcgcgttctcttctctggaaaggaaggccggagttgcaccctcaaagcgcctccgtccccacccctcccggcccgccgcgccccaggggctccacaaacttgctgcaagtcgtcggggctgcagctgcaggtaagggtgaggcggggccgcggcctgggctgccgagcacgccccctcccagccccaagcgtgcacgccccccacggacgcgcacccagcaccccacccccgccgctgcccccgaggctcccgcccaatcagaggccgcgcgcgccgcgccgccggcgggcagacacaccggctccccggcctgcgcccctgcggccctggccccgctgcagcgtcccggcccggccacactcaccgtcccgggcgcgccgtccgcgcgcggctccgctccgggccggcatcccccggctcggctgcctccggtccccgctccggcctcggttcccgctccgcagggctcggctccgcgatggtggccgcggcggcgagcgcggcagggagggcgtgtgtatgcgcgtgagagcgcgcagcgtgtgcatgtgcgtgtgcgcgggagggtcccggctcccctgcgcgtcccgctcctgcctcctgctcgccacgatgcgatgccggcagaatctctaccgcgcgcccccactgcccggcgcccacactcgcgcacacacgcgcacacccaggcgcgcacacccggctccgcactcccgactcgccctcctggagcgctcacaaagaccccctgccgggacggccggagcctgcggagcgcggccctgggcccctccgggacccgccggccttaggtgccccgctgctccccgtagggaccccgcgggcggcccggctcccgcaccctgcctggccgggccgcggccgcgctcccagcccgaacctgggcccaggtgccgactcgggcttctcgcactcccgcgggaagcgccggccccctccgcggcgccgccgcccttctcccccccttccagtccggcctctccggcgcctccctgccttgtcccacctgcccagcccggtcctcgttctccccgctgctctccgtctgtctcgccgccgccctctcccgcgccccttcctccccaccgccctgcgctgcctctcacattctccgcattacagcgggtgccgcccgccgctcgcggggcccagggttcgagcgcgcagtgggcggcgaggggacccgccacgcccggccccgccgccccctccgctctccgcggctccgcggctgctagctccggcctggcgctagggtggcgacgtcccgcgctagcctcggctgccgctgacagctctcatctcgcccgggcttaaagggatagcgcacccggctcgaccggccccacccgggggccccggggaagggacctcgctgcgcgggaacagtccggggcggtggcacagccggggccgtgcgggcgacgccctctccgccgccgtggagcccggccctcggggctggaggtgagtcaaggagaaggacggtcagaccacgccatccagggggcgctcagcggccaagcctctgggccgacaatgggtgtgcggcggtgtaggctgagcgccctggactgcgtggcg

SEQ ID NO: 5464 - DNA, 1501 bp, Homo sapiens
  source 1..1501: mol_type = unassigned DNA
tcgaaagaggggcgcgggtgggcgcgtctccccgcgagcatctcacctaagggggaatccctttcagcgcacggcgaagttccccctcggctgtcccacctggcagtccctctaggatttcggccagtccctaattggctccagcaatgtccagccggagcttctttgggcctccgagtgggagaaaagtgagagcaggtgcttccccagcggcgcgctccgctagggcccggcaggatcccgcccccaagtcggggaaagttggtcggcgccttttctccccgacgaagccgctccagggctgctctcagaggacgcgcggcaggcaaagagaatgaacctgagcgtccacgaaacgtcctgcacggctcccgggagctgggagaaacaggtgcctttctccgacgtccgcgggcgacgcctgccgcaccttgcccgctgccgcgcccctcccgggcacccctcgccctcggcgcccctgcccccgcccccagtgccagggcggaggcagtcccggctcgcaggtaattattgccagcggagcccgccggggagcgggggtgggcgcgccggcggtgggcgggcgggcgcggcggggcgcgggcataaaggggcgcggcgcggggccccggagcctggctcccgcgcagcatgcccgccagcgccccgccgcgccgcccgcggccgccgccgccgtcgctgtcgctgctgctggtgctgctgggcctgggcggccgccgcctgcgtgcggagccgggcgacggcgcgcagacctgggcccgtttctcgcggcctcctgcccccgaggccgcgggcctcttccagggcaccttccccgacggcttcctctgggccgtgggcagcgccgcctaccagaccgagggcggctggcagcagcacggcaagggtgcgtccatctgggatacgttcacccaccaccccctggcacccccgggagactcccggaacgccagtctgccgttgggcgccccgtcgccgctgcagcccgccaccggggacgtagccagcgacagctacaacaacgtcttccgcgacacggaggcgctgcgcgagctcggggtcactcactaccgcttctccatctcgtgggcgcgagtgctccccaatggcagcgcgggcgtccccaaccgcgaggggctgcgctactaccggcgcctgctggagcggctgcgggagctgggcgtgcagcccgtggtcaccctgtaccactgggacctgccccagcgcctgcaggacgcctacggcggctgggccaaccgcgccctggccgaccacttcagggattacgcggagctctgcttccgccacttcggcggtcaggtcaagtactggatcaccatcgacaacccctacgtggtggcctggcacggctacgccaccgggcgcctggcccccggcatccggggcagcccgcggctcgggtacctggtggcgcacaacctcctcctggtgagtgcgaggggccaggcggagggccacg

SEQ ID NO: 5465 - DNA, 668 bp, Homo sapiens
  source 1..668: mol_type = unassigned DNA
ccggggccgcccgcacgcaacgcccccgggtcgggccaggctggccagggcagggcggccgcctttcgaggaactgcgggcggggcggcggggccaagctgagcgcccgccctgccctcggcgccccgcggctgcgggcggagcgggctctgcggagtcccccggccgccctccccgcagctcccgtccccagggaaggcaaaccacgcaccggtccgcggagagacgccgccgggggtctttgtggccgcgctgggggccgcctcctggtgctgtcctcgccgggctgggcgcggccggggctgcggggctgcagggctggggggcggcggcggggccgggctgggcggcagcagctgctggagcgcggcgcctcggttgcggccactagtgcagggatgtgcctcggcccgtcctcattgaaatgcggcgcttcgcacagcctcactccagcctctctctccagaggagggcggcggcggcggcggcggcgggcgcgctcccttttcttgtctcactcgctcacacgccctcccgtctccctcctcctcctcctcctccgcgtgcgcgccccgtcgcccccgcccttcttggcagggcgcacccaccacggctgcgccccaggtcctcctccctcccagcgccctcttcccaccgcagcaacctcg

SEQ ID NO: 5466 - DNA, 1006 bp, Homo sapiens
  source 1..1006: mol_type = unassigned DNA
ccgggcgccctgcccgctcgcccgcgcgccccaggacccaaagccgggctccaagtcggcgccccacgtcgaggctccgccgcagcctccggagttggccgcagacaagaaggggagggagcgggagagggaggagagctccgaagcgagagggccgagcgccatgcgccgcgccagcagagactacaccaagtacctgcgtggctcggaggagatgggcggcggccccggagccccgcacgagggccccctgcacgccccgccgccgcctgcgccgcaccagccccctgccgcctcccgctccatgttcgtggccctcctggggctggggctgggccaggttgtctgcagcgtcgccctgttcttctatttcagagcgcaggtgagtggccaccttcccaggggatcgcggctgagagcgcccatctccttcccccgcacttggaaactgagtctggcggcagggctgggccacccagagcttgcatattccggaagggaaagtgactccagaagggagagaggaagtgttgagtttggggacaacctggcgcagggctgtcgggcgcaccctgctctctctccgcccacgcaccccagcttctcggtgctctgggggcggactcccctggccggacgatgggtttgaatctcaccccgtcccttcgctgggaaacaacactggcctctcaccttttctggtagtgattgcatactttttctccctgtcatttctcacttgaagttaagaatcaacttctgttcacgtaggaaaaaagatgagcgccttcacttgggcatctacctttcccttcccgcccaccacccggcgggtttcggttcctgcgcctggctgctctgcaggtgtgctggggccacggtgctggagggctgcgcggagcgggaggtcgcggtgctcgtgcccaggtcgcccaatgggtgggcagaatgacacggcgcgaccagagaggcgcgggctcgggatgggggctctgcggctgtggcg

SEQ ID NO: 5467 - DNA, 867 bp, Homo sapiens
  source 1..867: mol_type = unassigned DNA
gcgcggaacaaggcgctgactgtctcccagcctcccctcctccgcgccccctcggcagcagcgaaaacccggaaatctgatcctggccccaggagagccgggttccatgaggtgcactgagcatgctctgcagggtccggcgtgggagggacgcgctggcgctccccaggcccgggcggaagcggcgctcgcaggcgctgaaagcgagcgaccctctgagcccgggtggtccggcgggcaagggcggcgcgggagacccgcagggcgcgggcgcggatccggggaaccagggccaccgctgcgggcggatgggggtcaccgaggcggctcgtctccaggcgcacacttcgcacatctctttgctaagtgaaggggccaaaatgcacagatgggggagtctacccaggaacagaggcgcgagacgtatagccacccctgggttgggagcacgagccagcagatccccggagcgcgttaaacggacaacatgcccggtgctgcaaatagaggcttttgctggcagggacattggaaagaagggcggagagggagtacagcgaaaggtggggaccgcagaatttggaatctctgcggagaccggaaagaaaattaatcggagcacttcctacatgcagagccacggaaactgccttggaaagagaaagtggcagcgtctgggtcccctcggtcagcccgggccagtcggctgcgcgtgcgaagtctcctctagcggagcgggaccggccgcggcggtggatcgtggcggtccctgcacttctgctccagccgcgcctggaaacctgagcccggactcgcggctgctgcaaaacccgcttccagcccacctcactgcgaactttgcttccg

SEQ ID NO: 5468 - DNA, 1072 bp, Homo sapiens
  source 1..1072: mol_type = unassigned DNA
ccggttgcgccgccctagcccagggacgccttcgccctcggctgccatctatcggccaccgagcgcccgcttcgccccgggcccatcatgtctgctgcagcttggctcgcaccagaggcgcgacaataaacaagtgcactggactgggccctgcacccgctccggagcagctgtctcagagacccggtgttgcttaccgcgttgccacctcctcggcgcccgggaggaagacgcaactttctcggagttttttttagagccaccgggctgccaggacaagccacaggcatagaacgacgcggttgctgcccgccccccccttcccccagaaaccccaaaggatgtcggtgatagagagttccaactaatgacgattgtgcgccgcatctggggaagggatacagaaaaaaaccctgcaaacaccgtgaggatgaaactgccaaagggatgcaagagcctctcaaatactaattaggggccgcggcggcggcgggctcggcgcggagacagcgtcggcgggatcccagcgcggtggtcgccgctgcgctggggggcggaggacagcgcaggagctgcagccgccgccttcgctggagcagccgaggggccggtgccacctttgctcgccccctcactaccatgtacagtgtgcgctgcaagaagaaggcgggagatgcatgcacacccccgcgacccgctccctctggctcgtcccccggcgtgcgccactgaccaggggggaatgtggtgaagacggcgaggaggagagccgaggggggaggggagggccggccggcgcgaacccaggccggagggtgcgaggagccagaggaggctggagggggcggcggccacagctgggtcggagaaagttgccccctatgcagatggcaactgtgagtacccctgtgggggggagggtgcagcgaaggctgccagggaccccgcgatcgcgccttaacacgtattggagcgagtgtgcgagtgatcatgagtgtgagcgggtgcgagcgctcggcggggctgaccgtcacgttggcggggccggcggggccaggcagtcttctccgcg

SEQ ID NO: 5469 - DNA, 1633 bp, Homo sapiens
  source 1..1633: mol_type = unassigned DNA
acgcgcgcatacacactcgctctcgcttgtccatctccctcccgggggagccggcgcgcgctcccacctttgccgcacactccggcgagccgagcccgcagcgctccaggattctgcggctcggaactcggattgcagctctgaacccccatggtggttttttaaacacttcttttccttctcttcctcgttttgattgcaccgtttccatctgggggctagaggagcaaggcagcagccttcccagccagcccttgttggcttgccatcgtccatctggcttataaaagtttgctgagcgcagtccagagggctgcgctgctcgtcccctcggctggcagaagggggtgacgctgggcagcggcgaggagcgcgccgctgcctctggcgggctttcggcttgaggggcaaggtgaagagcgcaccggccgtggggtttaccgagctggatttgtatgttgcaccatgccttcttggatcggggctgtgattcttcccctcttggggctgctgctctccctccccgccggggcggatgtgaaggctcggagctgcggagaggtccgccaggcgtacggtgccaagggattcagcctggcggacatcccctaccaggagatcgcaggtaagcgcgggcgcgctgcaggggcaggctgcagccctcggctgccgcacgtcccactggccgcccggcgtccccttccttccccctgttgctgagttggtgctcactttctgccaccgctatgggactccgcgtctccgtgttgggcggcggatgctcctgcggcttcttcggcgggggaaggtgtgcgtctccgccgcctcattgtgtgcacacgcgggagcaccctggctcccgcctcccgctgctctcgcgcccttctaccccttagttgatggctcaggcccggctggccagggagcccgggtcactccggggcggctgcaaggcgcagacggagagccgagccgggcgctcactccgcgttctggttcgggcaaacttggaagaactgcgaccgcagtttgcccagcgccacagtctgagtggcgccttctccactcccgcccttgcgccggcaggggcggtggagagacgcggagggctcccccagcccctctctcccctatccgtccttcgggcgacagagcgcccggcgctcgggccgggggcgggcaaggctgggagggaccctcgccggggacctggcctctggacgccggcgtttcaaggctggtttggggacttcacgggctgcctgtttcagatgtggggcgggctttcccgttagggttcctcagtgcttccccagttgctgttggccactcagggcccggggacaccctgccacccggtctggagccggcctcgtctgccagcgaacagccaactttagcgggtggctcagctggggattcgggtccgggttcgggggccccgtgtcccccgcatgcccggccactggcattgctccaccaagagcttgagagcgcccaccctttctctcggcgccagtgtgtgtagcacttggtctccgacaacttgcgcggcagtctgggtgcttgttttccggctcttagctccaaccgaatccgagcttctctggggctctgtgaatgaaacgtgtcg

SEQ ID NO: 5470 - DNA, 1143 bp, Homo sapiens
  source 1..1143: mol_type = unassigned DNA
ccgcggagcccccgcggagacctgctggagccaggctgcccacccccacctccccacccgcgcgttggcccagaggtttacccaggcagcggccctggtgccgagggggcaggtgcagcgctgtagtgatgcccagtggcctcgtcctcagccacctgccccccaacacctgctagatgcccaggcggggcaggcccgaggtgtcgccggccctgggcttcccaagccagcccaggggcatcccgcggcaggcgcccccgacacccacgcgcaggaatagggagggcgcatcgcggctcccgcgccccggccaggccggcaaggaccccaccgccccgctctcgggtggaggcgcccctccccacccctcccccgcgcggggcccccgcccgcagcccctctagcagcccctctcgcagccccagcgcccctgagccgtcctggcccggaccggccaaggaactaacgagcgcgcatcgcgggcctcgggcgcagggcacggagccggccgcgccgcagcctcccgggcaccggcggcggtgaccaacctgtaaccccagcgctcagagctgtcatggtgcccgcgggcggcggcggcggcgacagtgggcgaccggcaggatcagtgccaggcgcggcgcccagggcgggcggggacgcgggcccctcacctacggcggctcagctcaggcagcgcgctcggcccggctggggccgcggctcacgctcgccgtgtcactcactgagcgccgccgccgccgggcaggctgggggaggggtgggagccggagttttcgggcctttaaaaaattattattttatttaaatttttaaagttagctttgctacagggactgcagtgatgccgaagggcgggcaccgcagaggaggctgcgccgcagttggtggggagcgccagggtcggtactggcagttccttcttgccggctgccacccgcagtcagtctcacagcaacagctaggctctcatctgcgagctcctctcgggggtctttcgtactcaacagcacggcggcggtgtgcacgggagtccgccgggcacacgcggggtacacttaagtgcactgccaggaggccgggagcccagcgtgcgagcgtgaggtcagactgtgcacggtaccg

SEQ ID NO: 5471 - DNA, 1143 bp, Homo sapiens; identical to SEQ ID NO: 5470
  source 1..1143: mol_type = unassigned DNA

SEQ ID NO: 5472 - DNA, 1371 bp, Homo sapiens
  source 1..1371: mol_type = unassigned DNA
tcggttgagagcgtatggcgttctgagtagtgcaggcctcggcaccgagggcggaaagcgctctgagctcacagccgcacgacagaccgccggcctgggccctccaggaattccctgcagccttgcccggtccccgactctcgctacccaccagccctcccaggcacccaagagcctcccagcggcgggccagggccggcttcccccagcaggctcctctggagagcgggaggaagacaggaggcgctctcccggtggagggtccctcagcgacgcagccaggagcgctaggaggctacaaccggaggagaggctggcgctccagctccagccccagtcccgaagcgactcccctcttcccgaggtggccttggccaagtcttcagccatctccgtcaaatgaggaggtgggcgggatgcagacggtggagcgggaggcttgggcgcgccagtttgggagccagtgcgcggggcagggcgacgggcagcgcggggacgcgaatccccaactcctgcgcccaagacgaaggacccggtctcgacctccccatcacccggcgcgtaccagcgcccgctcagtgactcccaggtttggtggtggctaggggtgggaggtgagccgaaagggaaaaagccaccccacccaagtcgccgccgggctggagccagtctgcgcgggttccgagtccccggcgacggcgccagccctctccgctcgcccgcgcggtgttctcgccggcagcccctccggaccccgcgccccttctcgggcgcccgtccctccggagccctaacgcctgtgcgcgtacctggcagcagagacagcagcagcagcagcagcagccgcggcggcgacagcgccaggggcagcgagagcgggccagagcccatggctggtggccgggctggccgcggacccggacggtcgggagcgggcgcggcggtcgcagagacggcctctccccgcgcggctccagcgcagaccccagacctggagccgtgcgggcggagacgcgcggggctcctctccgcttcgccgccgctgggtttccagcgccctcggacccgcgggaggacaggaaccatccggagtgaagctgcgccaggcgcgggcgggcgggcgggcgtgcgcggggcggggcgtacgtgcggtaggggaaggggctccaggtcccagtccccagcgccgggcgagctccttctccgccgggctgggtgctccggccggcggcgtccgaccagatctgagcaggtgctgtcaccaccaccaggaaggagagggactcagtttctgtcccaggtttccggggcgtgtgcagctcccgcagggggttgggaccaccgggctaggcgggcgccgtaggagagacg

SEQ ID NO: 5473 - DNA, 1545 bp, Homo sapiens
  source 1..1545: mol_type = unassigned DNA
acgcgaaccccgcgggtggctccgggtggtgggctccctccagcgcgcagcttccgctcgctttcccctcggcgctgcagccgcgacctgggaccgaacggacaccgccttcccggggctccggcggcgctctgactcccactttcctccgccgcagcctctggcagggcacccccttggcgcgacgccgcgcccctccccgggaccgccccctcggtcccccagggtgcgctcagttgctgcccgtgcgccccgccagcttgagcgccccgggcgggcggcggtggagaagcccagcccagctctccccagccgcgttcccggcccgcgctgctcccagcctgcaagcccatgacgtggcgacgccgaccgagacacaaagaccgaggctgagaccgccaggggttgagggtgaggccgcgtcccggggccgctggagcgcgggcgtcatgcgagactgtcccggctgcgcgccgccccagaggagtccgagcgcccccttcagccgcggcgcgctggccctggccgggactgcagccaggtgggcgccgcgcgtgtgagcgccgcgcgtgtgagcgcagacctggactcgggcggcggaggcgaaagtcgctccatccgcggggtgcaaccctgggcgcggaatccgggctgccgggtgacagtgaccagctgactctggagcctaccggaggcgcggcatcggaggccgtgcggaccactgccgaacagccgctggagacccgcagagaagggcgggccctgcgcccggggcgcctcggaggtaagttcggagagcccgggccgggcggagggcgggagcgcacgagtgtgtgtgtgtgtgtgtgtgttcgcggtgtgcccgcggctcggtgcacacgcgcgcgggttgtaaagtcaggagctgcgggagcgcctccctgcctcggcttggccccggagcattgcgggccgcggaggtgtgggggcccttgtcgctgcgctcagggcagcggcggaaaaggtgtgtgcggatgcggggcggggccgcacctggtggacagagcagggattcgggaagagaagccacggaagatgatcatgcagtttggggcaagttttcctggttgagcatcgcttcaggaaacggtgttttgagggttaaatatgtgagctatctgtgcaaaaagcctgacacatcagaggcgcgaagtaagatggaaagctggacaagccccaggtggaccgaccggtgcatccaattcttaaattgagatttccagtcacgttgatgtggaatgggatcgttgttcttcccgagggtttgataaggatgctcaacttcacctgtcagaaagcacgggagctgggcctggcccgcggggagcgtaagctcgctcacacgcggtccaactcaggcaaatgcagcatgcccgacctgctctgccgccatccctccgaaagcgataatttccttgggctaccgaatccatcagagtagtcatttgtcccctcgccggcggtgcggggagcgtaacatttgagtagcctaactctcacagcgcg

SEQ ID NO: 5474 - DNA, 1545 bp, Homo sapiens; identical to SEQ ID NO: 5473
  source 1..1545: mol_type = unassigned DNA

SEQ ID NO: 5475 - DNA, 1027 bp, Homo sapiens
  source 1..1027: mol_type = unassigned DNA
ccggccccggtcccagccccgacaacgcctccagtgcccgcagaagcggccctcggacagcgaggacagcccgccgtcgcaggctcacccggcgcttgatggacatggtggccacgttctggagcacaacgtactgcacctcactgcggagaggacgggtcagagcaccccgggcccctcggttggggcaagggtcagcggatgaggggaaaaggtggggcaagtcgttgcggggagaggaccagtgcggagggcaggactacggtcagtgtggagcgggtgggcagaggtggaagcggctggtgggcgtgagggggcggagccgggcagcccgtggggcggggcaggaggcgagggagggggcggggctgggggcggagcgcacctgtggctgcgcagcaggcgcaccagcgccttggcgatgacgcccacttccgccttgggcgccaggtggaagtagagctgcgccaccgccatcaccaccgcggcgctgcggctctgcagcaggggtttggtgttgcgcagcagcagccggtggtcggggtccatgacatagggctttcgggagggggcggccgcggcggccgtctcctcagaccccgcgcccttggcctcgtcctcctctgagccgtagaaggctttttccgcgttctcctctagtagggattcctggacggggagaccgacgggtctgtgggcgcctccccgggacacacttcggcccgctctgcctgggctgggcccacttacgttctgggtggggctcaggaactgcgtgcgggcgtagcgggtgagcatgctgatgatgaccacctggccccactcctccacgtcgatcagcaggttacagagtttccggtagtttttgtgaatcaggtcgatgcgctccgggcagacctcctcaaaggccatcaccacactgcccgccaccagctggggaaagaacaaagacgagagggtgaacgcgaagggtggaaggccggctgccggtcaccacccctcccggagcgcccctatacacgcaccg

SEQ ID NO: 5476 - DNA, 693 bp, Homo sapiens
  source 1..693: mol_type = unassigned DNA
acgaacaaacgttttatccccgggtagccggcgggtgcggagcgagtattcgtggggcgggataagtgcggaagtcgctgcgccctcgtcccttcatctccgggggacggccactctcagggttcccgaggagcccgctccgtgcacctaggccctaggtcggctcccaagccctggcccgccgctacaccagcggtttcttacccgcaagtacaaatgtgacacagacaccagctcctcgtgctcttggctcccagggtttctttcaccgcgcctcagcacctgcagcttctccactcttacagcgcccgccgtcgtcaaggcaacagagggatgcccggtgacagactcggcgccggcttccggcgccgtaagagaagcgtccgcgcgggcgttctggacccgcagagttctcggcgtttccgaagctcttggtgtggccgggacccgggagaaggagcagggctggtggggctgctgcagccggtgagtgtgtgctggcgctgggggctggaacctcctaggccagtctctgggcggtgccgcaggaccctgctcgctgcggctctgaggcggaaacaggggctggggccgagcgcgggctggaagctttggtccctggagtgtcgcttccagtctggggccgaggcggtcgcctgtgtagacccgggatcctcaaatagaacgaatccg

SEQ ID NO: 5477 - DNA, 1496 bp, Homo sapiens
  source 1..1496: mol_type = unassigned DNA
acgccgagcgatcagatgcaaaatccttcagcgtctgaaaccatcgcggacgccgccgccgccgccgccgccgccgggtgggagccgcgaggagcgcctagtggcgcggtctgccgggcatggtggccggctcggcgatcgctgactcgccgggtccgggggctctggaagcgaggcgcgctctccgactccgagactttgcagggttgcaacagacggtggggaggcaaaaaaaaaaaaggaaaaggaaaaaatggtgctaaagtcaccaagtcccacctactgggcagaattaaaacggacacaccacgcacctgcaaaacacacacactcactctcacacatacacacacccggagcccgaggaaaggaagagaaggaagatgcagtaggagctgcagcagccgccgcgaatggctcgccgcgcggctgcagaaatgtacaagtgctccgagccttacgaaacgcacgggttatcggagcgtcttcctcggctccctccctcccttcctccctccctcctcccctccctcgtcgcggcctcctccccccgccccccgcccgggctgggagcggcaggagagcggaatctccccctccctcccctccccacacccgtctctctccccgcctgtcctctccctcctccccacccacccacccacccactcgccggctcgcggctgtagccggcaccgccacccgcagcctcgcggcagcccgcccgctccacgcctcgcagcgcggcgcccgctagccgcagcccgggggaaaccgagaccgaagggaaaaagttgcatttgagattgcgagggtcggggctggggagggagagttggcgagctggctgcacgacacggaaaggcgctctcctttccactttttggccctcgcgctacccggttttgctgcaatccggaccgcggtaggaagtgaaatgaacgtggcggaggtgattggggagtgctcccaagccttgggtggggggcgctcccaagcctgggtgggtggggggcgcaggctcacggacggcgacggggggtgccggagcgcacagacaccccagagaagcacccagagccggggaccgggaccgcagacgcgcagtccttggtctgaatgacactcatttccgtaatctagagtctggggctctggtcttggctgggaggggactgcgggacatggcacgctaggtgccccccgtgcccgctgcgctttcttggaggtgggttttgcattcggccttgagcaggcatggatcggggaaggaagaaacaggggtcgaaagggctgcgctggagagccgaggtggccccgggcgagctgtgcgtgcaagagaaatggccgggggaaattgagatgcaaggggcatattttggcaagcgccacgccagcaccgtcagaggccggcttctcgggctcagctctcgggtgagctgagctggctgccgggtgagggggcgggcgggctgctttctccggattcgggggcg

SEQ ID NO: 5478 - DNA, 5820 bp, Homo sapiens; identical to SEQ ID NO: 5231
  source 1..5820: mol_type = unassigned DNA

SEQ ID NO: 5479 - DNA, 699 bp, Homo sapiens
  source 1..699: mol_type = unassigned DNA
ccgtggtgggcgaggcatccggggcttccttttctctggtccacgaactcccaactccgaacgctgtgggactgcatgggcctctgcccgggccaatgaaatgcgctgccgagaggaggctgcggcgcggcctgaggccggatctccacaggccggagagttctctgccggccgcggccggacctcccgggaaatgggaccagagcgcggagggagcctggccaggaggcctcctaggactcagccgcgacgctgaaaagcatgaagggtcggaattaggcactcatttagcgagcgttactaatccgaagttacagcgctaattccctgatccggccgctcccacacgcagcgccgggattagaggcgcggccgccgcccgccccgccctcataccccaaacgcgcccgccccgcgccctcgaggctgcgggctcagggctaatccgccgcgccgcgctcgcctggcccgagcgcgcggcgggtcgggctcggccagctggggcgagccggcctgttcgctggctcgggcgcccggttccgggctgggcaaggagcgcttggccatgagccgcgggacagcccaggcgggacggatgcgccctccagggcccaggcgaggccgcgcggtgcagaaccgccgggatttctccaacccgggtatgcgcacccacagcagcggcctttggaggccgcggcg

SEQ ID NO: 5480 - DNA, 1845 bp, Homo sapiens
  source 1..1845: mol_type = unassigned DNA
ccgccttctcgccgcgcgctgggggctgtccccaggtgttggtctttgtgtcgagaaaactttgcgaggaggcgagggagctggacaaagagcgggcgagggagggcgtttgccagcctgaggggtgcgccgggcggtgcgcgcacttccctgggctcagctccgtacccggtcgctcgcggtggccagagcccagtctctctaggccaggagtggcgtccggctgcatccccgcgccctcgggagctgaataaagccaggcgggagaagcaaaggctagcgcctggacgctggagttggtgggaggaggcgagcagaggcgcggagcaaagctgtcaaactgcgcgcggagccgggcgcggggcgggggaagggagaggagggagggaggggcaggcgggagccgggagggagcgagcgggctcgccgcgcctgagcaacccctgcctgtcgctgccgctgccgctgccgctgccgccgccggcccggactcgtccggagcgcagggtgtctgcccagctgcgcgcggcgcgcggaggctccggcgtccgccgctgcgccctccggcccctgctcctcgcgccggcccgcgtgggtcccggcgggcgcgaacccaccatgcagctgcagttccggagctggatgctggccgcgctcacgctgctcgtggtcttcctcatcttcgcagacatctcagagatcgaagaagaaatcgggtaaatagctgctcccaggcccgtgccacgagccctggcgggatctctccctccttctgtactctccaccctccgaccccctttgtgtgcgccgcgccccgctgtagctccgctggagagatggggacggtttggcagaaggtggcggcgacaggggcccgggacggtttggggagaggagggtgggggcgcggctgctgtggggtgtccccgggcggggttcacgggaagcccccagctggcccgcgtcgggaagcggactcgcccaccctgcccccctgcctggcgtgtccaagcgcagtgtcgccggggtcgagggagggcgccggggagtgtctcgggcgggcggaggggccgagagtggagggaggcaggagtttctttgtctccagcacggccgctttctcgccttggcaaagtgggcagggggcgcgcagggatctctgagctgggggaggggttcctggggccggagcggagggcggggttctgcatgggctactgggaagcggaatgtcccctgcacacacagacaggcacacgcgcctcccgccggcccgggagcccggcgtaggagctggcaccactagagaagggctcgcatagctggactgagaccccccgccctcgcctggctttggacgttcagccaagccacggcaaccccggcgaccctgggttcctgtgcgctcgcagcgcggagacggagacatttcgggaaagtctgtaccgccgcccggtgggcttctgggccctcaggcgggcgatctggcgctttttttctcccgacctcgccagaggtagggtgggaccgcgagcccggatcctcccggctccggacttcctggagtgcgcacttgaggcgcgggacgcaccggctgtgtgtcccaggggctgagactcgcgccccgccccgcagccttcggctcgccgggccgggcccctctccggaacctccaaagggcggtagacgacaggtggggaggcagccggggttctgaggaggcccgaggagagcttcctggccctgggcaaggggaaggtgaggtctcaaagagggcagaaggtctcttcttctgtgggatttgtgctctgccaggcgctcttctcgagtcccgcgccgcgtgcg

SEQ ID NO: 5481 - DNA, 1844 bp, Homo sapiens
  source 1..1844: mol_type = unassigned DNA
tcggcgaccctctggtaccctggacagctccccggggagcagtctaccgctaggcggcggctgctaagagaggaaccctcctgacgcggagtctgccgctccggggctcgctctccggcaggcccggggagaggtggggtgacaatgggttggggtgcgcgcgtgcctcataggtgcgagacagagcgagccgccggggtgtgagtcagcgcgctgggggctaagaagctgggtgaatagtcacggaatctcactcacgctcggctcctccacccatcccgtctacagcgcgtgtcccagtccagggcgtgcgtgcgctcggtgtccgattccgggctgtgtgtgtccatttggcgagatgtcgagagcggggggagtgtccttgtcggtgtatctgggcccaggttaggggacttctcctccccacccccgcgtgggtgtgggggtgtgtccgggctagggcgcgtgtgcttctgtgcctgtgcgtgcgtgtgcgggtcagggtggtgggaccgcgcatcagggcagggtgcctgcgtctgcgtctgggtctgtctggtctgcatgtcggcgcgatctcgacctggattcgtgtccctggatgtcgagaggccagcgtggtgggggtgtccagcctcccggaggagtactatgccttgacaccttcgtttcaccgccccaaagctggcctggggctccgtagggagtggcctgcatggggagggcccgcgtgctgtgtttctgggaggggtaagagagtgggggcgcagggggcgggccaggtccctgggcgcggcgcgggctcgggggacccgcgcggctgacgtcaggccactccttaaatagagccggcagcgcgctccgctcggcatttcccgaagagccagatcgcggccggcgccagcgccaccgtccggtccacccgccagcccgcacagccgcgccgccgccgagcgtttcgtgagcggcgctccgaggatcaggaatggggcttcgggcgctgggcgcgctccgaacccggcgcacgtaagagcctgggagcgcccgagccgcccggctgcccggagccccatcgcctaggaccgggagatgctggaaatgcaaccgcctgttccccgaggagccgctgcccccgggaccccctggcactgtgcgcaccctggtcagcagcccccggagaagacggcgcccccaacgcccgacccgcgtggccgtggcagcgccacgcgagccctctaggcgaccgcagggccacagcagctcagccgccggtgccccctcggaaaccatgacccccggcgcgggcccatggagccatggcctatagggtcctgggccgcgcggggccacctcagccgcggagggcgcgcaggctgctcttcgccttcacgctctcgctctcctgcacttacctgtgttacagcttcctgtgctgctgcgacgacctgggtcggagccgcctcctcggcgcgcctcgctgcctccgcggccccagcgcgggcggccagaaacttctccagaagtcccgcccctgtgatccctccgggccgacgcccagcgagcccagcgctcccagcgcgcccgccgccgccgtgcccgcccctcgcctctccggttccaaccactccggctcacccaagctgggtaccaagcggttgccccaagccctcattgtgggcgtgaagaaggggggcacccgggccgtgctggagtttatccgagtacacccggacgtgcgggccttgggcacggaaccccacttctttgacaggaactacggccgcgggctggattggtacaggtaaggaccaggagctccgctccgtgcgccgggtctctgatcg

SEQ ID NO: 5482 - DNA, 1480 bp, Homo sapiens
  source 1..1480: mol_type = unassigned DNA
gcgggtgcggctttccgggagcccgcgggactcccccactccccactcccgtctgggaggttcggcgtgggttggcgatgggggtggaaggctcccgggtctgtggatctgcggcaggaggggcggctggtagcaggagtccctgcatcacccccacccccaggggcgttccggggtgggtgggggcatctagtgccccgcgaaaggaagaggaggagggggcgagcgtggagatgagttcaggagcggaaagcagcgcgcgcccctccgaccggcagcgggggtgggcgccttcccggggcgcgggagcgtccccaaagccgcggggcgtccgcagcgggtaggagctctgccttgcacctctccacggcggggcgtcccgcacgtccccccatgctggtccccggccccggaacggcgcgcgccccctgccccggaacgtcgcccctagccaggcggagcgctgggagctgggcccaggcggcgggaggagggcgaacgggtccggggctcgggcctcgatggccgcgccgccccgggggagccggagccgagctggccgccgcccgcgcgcactcaccaagcccgctgagctcctcctcgcacgagtaccagatgccggtgtggaaattcctgaagaggaagcggtcgtcgccggtctcccagctgtagagcgcgccgccaggggggccgttccccgaggcggtggcggcggcggcggcggcggcgggggcggcggtgccgttggccgtggcgttggcgcccgagttggggcagttggcgcgcccgccctggccgcagcccggcttggggacccgctgcgtgccctggcaccagtgcgtggtgaggaaagcggtggtggcgaacagcagcgccagcaggttcagggccacggccaggagcgctcggccgcggcggctagtcttcatgccgcccgcgccgccgggacgggactgcaccgccggggagctccgcgcgcgaagttggcagctggcgccccgcgtcagcggccgctgcccgccgcgccccggggctcgggtgcctgagatcggcggcggcggacgcggcgcgggcccatgccccccccaaccccggggtgggggcgcggcgcggggggcgtgcggggcgggctggcggggcgggcggcggtggaggagcggctacggcgcgcccggagcccggagcgcgagtgcacctcggctaggagccgctggcgcctggcagcggccacggcgcagggacgcgcgcccctccgtggggagacacctgcaggcggccggcgacactgttccggagcccgcccgcacggggagagggggccgccacgccgggcgcgggcgggggcctgggagtggagggacgcccccgaaagaaatccgagccagggtgagggtctgagacgcaaggagaatcccaggcaaggcgctcctgagaaaagatccccacggcggacgtggggcaacaaaacccgccgggagcg

SEQ ID NO: 5483 - DNA, 5065 bp, Homo sapiens
  source 1..5065: mol_type = unassigned DNA
acgagccggggacctgggggcccgggcggccgcagcttagtgggctgaggtgccgatcagggtcacgcttcggagctctgtcggggcccagctccctccttcacaccccaaaatgccgcctagggcgtgggcatcccgagtggcatccggagccgctgagaccccgccgagattgctccttgtgcgtcctcccacagccgagaggccagcatcgtgccgggacgacccggggacccgagtccgggcgccgctacaccgcctcgggcgctaggcctgggagctttgaggccggtaccgtgaaacacctttaggagcaaggagggattccaggtgtcctccctttgtaccccaactccctgcccggatctcttccactctctgccatagcccccacacacaaactttgttctggacttgttcagccccttcgggacccacagttgtcgcctccatcggagaaaacaagtgcccctgtttcaggggggattccactctggctggccacccgcaaacctggaaaactattctatgacttcttccctgacccccctggaagtagggagcaccacgatccgcagagggcgcataccgaccagaaagattttggggggcagagggtgcaagtgttgtgggaagagatgcggagataaattttgcgagccagaccccgacactttccccgtccgtttgcaccgtctccggaacaactggcggccagcagcactctccaccccggccgcaaccccagcgggtcaggcgctggcgccccgacaccagtccccatcttcttgcagctctgaacctccaaagacacccggttctgcctcgcaggccgagggggagtgtgcgtgggggcaggggggcgcagcgaactcccccacgctcggagttcagcccagcgcccgaagtaaacttccttaccgctggcagcaaggccgggcggcggaggccgggccgggtgccctggggccggcgccgggagcgctaggggccccgtgcggtcaggccggggcgacctccacccgcacccacgcctcatggggctcccgggtcttggccgcggctgggatccccggaaaagcagggacggagaagccaggccggcatgcccgccctccttcccccgggaggacccaacaactccggaaagatcctgccgggagatgtgctcgctttccccggggcagcgggggaaagcccagcaaaggcacattgaaaattaaaaagaaaaaaaaaattacgccgagtggaagaagcaatcggggccgcggcggcggtgaggtagggggcgcgggggccagccgcgtgtgagtgggtccgagtgtgcgtgagtgtgagtgcgtgtgtgtgtgtccacggcgcgggccggagcactcaccatctcgccgggggagcgaggccacttcggggtcggattggaaatgttgaggcttcgcttgcttcctccgcgacatgctggctcaaacatcagctggggcagaataaaaaattactaaaaaaaaatcttctcaaaattacggaaatcgagcggcggcggcggcggcggctccccccgcccgccggcccgcccgccccctccccggctccccggccccgggcgcagcgcgcatgtgtcctgctataattatgattatcaataatgcattgcgattaatcatagaggggctctttgaaaggcgattggcaccgggccagcgctattcaaacccgctcgccttaatcaattagttcgtgatttgctgcagacccctgtctctccgcgcgctggcccaataagccggccgcggggctggctctgcgcgccgcgccgcccgacactgggttaaccctctttgcgaccgcccgggactccgcggcccggccgccgggggccggcctcctctccactgcgggcccggcgccccggcaggcgccccccgctctctccctctcccctccctcttccctccctccttcgcccccccccacaatcccgggctgggccgacccaaattagcatgccctccccggaattgagccgccccgggtggggggtggggccgggcggcgagggctggggacccgggctgccggcgcgctgcgaacttcccaactcgggggcgaggcgcgccggcccgcggggggagggagtcccgcggcgggatcaggggggagggcgtcccgtttcgtgagtgtttcttcgtttctttaagagctaccagaaagcagcccacccccacccccattaaaaaaaaaaataagcgagtggggaagagccagccccacgccggtccgcctcccgcccacggctcggcctccctcccgcctggctcggcgctcctccgccccgagttctccatcccctggatcccgggctcgcgggggcgcggagaagaggatccaggaaaggtttgggaacctgatgggtttgtggctggggggaggggcagttctcccgccaccccatcccctccccgccaggggcactgatcctccagcttcttgcttgctccctcgctccctttctctacctcggacattcccaggacaattagggctgaagttttcgggagaagcagccccgagcccgtgggataagggggcggcccggctccgcccaggacccctcccggacctcccccccggctgccccggttggctgcagggcgcgtcactccgcggggaggcggcggcagcggtggcgccgcagagccccgggcgggcggagagcggggaccggcctgggctccgagttcagctccggccggggggaggggaggggctgcggctcacactgagcgcagcagcgagcaccggcctagggagacacagcccgggcggacccggcactggactgggccagtccctgggacccctgggcaccccgccctggggagggggccgcgccccagccttccgggacgaggtggcggcgcagagccggaaagcggggtggggggagggcggtggggaggtgttctgtccgaggctgcctggcggcgccgaagctcgcctccactttttgggcacttgccgagcgcggcgcccgaacttttcgctctatcaccatctccctcaagctgagatgcaacctccctaccctcgccccagagcccagagccaggagcccgatccctctgccgggctcaggcgcccgcgaacctgagactcggtacgcggctcagcctagctctttcccctcgcgcctcggggtctcctcgctccaaggttctcgaagtcttgcgcccgaaggactaaactaaactaaacttcggctgagtaatgggggaggaggggggtgcagatacacaatccctgccctatctcacgatcaggaaaggagagggctcataaggacgccccaattcgcgagcgcccttgagtctggccggtgccacggtcggttcgcgcgaagtgggcaccggtctcccgagccgacttcgtgtactccggacctgtactgcgctccggtagaggacccttccctttctcttagcttcttaaatcttttcttttaaggtgtaaatgtgtgtgtgtgccgatgaatgtttctgtttttcatctgctgactttatttttttttattggtataacttctcccttctctctccctgctcgtccgttttccaccttttctcttacttatcttctgccctcgctcactccctaacacacacattcacaccctctccgcctcgctctcccgttctcgccaggtcctgatgggtacagtagattttgataaaaagacaaacgaagctatcagtggggctgatgttgaagaatgaagataataatgtttccataggtggtgcttcaaatgccattatttctcactgaatatttaaagagatccctcggcaaagatggatctgcgcactcctggggtgtgagcggctcgcatctcccagaccccggggaacgtgtacgggagcacgtgtaaatcccgcacccgcctccatctcacaaacaggggtcctcgcacacccaccaatccacactgtcccaggtacacgaacgcgtttgtgtgcacttgcacactcctttcccggaatgtgcccgtgtttggagccgcccgcatccttctctaacaatcttggcttcttgaaagtccgggcctcccgggcaccgcatgcagccaggaacctagcggagctggcggtcccgcaaagcttttctcctggtgcgcgccgcgtgcgcagcaggaagctcccgggaataacttcacacgtgtttgttacttggtctacgtgtgatttaagattaagtgtaggaaaaaaaaaaattccccccccccaaaaaaacaccacaacaaacaaccaaacgaaatgaacatgcgaaaagcagctacgcgatgcttaattaaaaatgggcgagcagagacgaataaattgggggatccaaactttaataacttttttcgtttttttgcgtcctcgacggcgtagaggcgggcgtttcgatctgcgcttggcgtcccccgctaatttcttgtttgttttctttccctcggtggccccgggaaaggagatgggaggtggaggagggggggatgggaggagggggatggtcggaatggcggggagaggagaattggtctttattgttgatggcaatacatcaattacgggccattgtctcggtcccaagttccgtggttcgctggtgcgggcgctgcagtgtcagggcgctggcgaggctccgcgtgccgcgatgcaaagaaatacatcaataaaaacagaagcagagtgggggttattctttatttttgtgcgggtcgaaagtaggcggcgagcgggagtgaggtgccactcctggagtccctccacgcgccctgctcaccccagagacctgcgcgctctacgtgcggtagcaccctcctaactctgggtggaggtggggtgggggggggactactggggaatccgggtagcgaagtttggacttgcaggttccgccagagggcctggtacttaggggctgatccgcaatagcgaatggggatagcccgaagtgaggcggcagctgcgccggggtcgcgacctcactggcggagaggaaccgcacccgggggaggcgcttggcg

SEQ ID NO: 5484 - DNA, 2372 bp, Homo sapiens
  source 1..2372: mol_type = unassigned DNA
ccgcgactgcgcaaactccggtcctgacactctagtctcaggtcccaactccggaagggttcaggcccaagcctgcacgtcgcgttgccatggcgaccgctggctgccctctccgctctgtcttttgagcacgtggcaccaggaccccgcgttctctccagctcgagagccaggtctggcccagagccgggctcatcagtattccgcctgcggcgtctccccgaccctccgccgtgcctcaccaggtccgcctatccagcagcgacagactcccgccgtccgcgcgaccccaccgcccccatcccagtccctccccgagggttcgcagcccgccctgccctcgagcgtgcctagcggccctgggcactggcgcggctctacccagctatgcagtgctttcccacacactggccgcggccactggctgcagacccgccgcggaaagggggcgccctgagtcccgctcgcaggcagcgcgccccgagagacccgctctaaggcatccccgcaacaactctgtgggggcattcaactcccccgtgcgccggttaagattcccccatgcctcctgcaatgcaccagaccagggaggtaaacatcgaaggcacctgcattgcgcccccactgggatgcgctgtgcgcaagagacggggaccgtctgctgcaaaaccggatgatcggagacgcagggagttaggagtgggttttcttaggactcaccttatgtagtttccacatggcccccagagccttgacttcgtggctggagtgtttgccctcctccaagcactggtagcacacgggcatcttgcattgcacgcagtacatgctgtggttctccagctcgtggtctgtgcaggtggagaccttgcgtgggctcagcctccggctcacacgaccctgggccgggggcaccaggcggtgcttggctaggggcccccggggcgggtggcagcgcaggcggcacggatcgcagtagaagacatcgcactgttcgcacatgacggtggcttccttgggcgccttctcgcagagctggcacttgagggccgcggctttgctctgctggtagcggtcaattaccccttccagtacgcgattcttggggaagccgcggagcccccggtcatccaggatgaggctgcggtgacactgggggcaggtgatacaggagttgcggggcaccggggccagggccggtgacaagtgggtggccggtggcggcatagccgggggaaacacgcggacgccgttgggggacttctggcacggggtagtgggggcgctggcgaaccccccgtaggagccatagccgctgtccgcctcgctgtataggctcatcttgtccaggtccagatagtcatagtcggagaccccggagcccgcggcccgatggctctggggggattcagactctggggtctgcaccaggatgttgcgggcgcacgcctgacacaaattgtgagagcagggcaggatgatgggctcccgatagaaggagccgcacacggggcatttcaactcctcttccatctcctccatggggaccggtctgggaggagacagcgacggctgcagcgggtgcctgagctggcgaggtggccgacgggcccgtcttgtccagcaccctggccagcggcggcggctgtggtggtggtgccttcccgcgcagcactggcacggacacccagagaggcgctagctctgtgagccgcagccgcgtagccgccgcgccgcgcgccagcccggaccgcccctacctgccctcctagtcccgccccggcccatgagcagcggcccattgggcggggggcaagagatcgaagctctcattggccaccagacccgtccgtctcctcgtctccgcaggccacagggggttcggtagagtctgaggatagggcagtcttcgctcgcggctgcaagatctctgaagggggccggcgtgcggaggctaggggaccgggaaggaggagttaggcgggatgattcatcctcgcccggcttacttccgacctccggtgcagtctcccaggagctgggggcgtgagaaacccctccccgcagcgagtgggctgccggagggggctggggcttctcgccagcgtttgcgtttggctcccagctctgagctccgcgcccacctaccgcgggcgagtgctgcgcagcacggaggacgccccttctcttccgctgctggcagccttcgcaggcgtctcacccgggcctaggcttctgcacggcagtggggcttttctccttctccgtgaatccgctgacgccgtgccctggagctcccccatcccgggagtctgacggcgctggcgcaagccctggcgacactcttggcttctttcatcctgcgtccctcg

SEQ ID NO: 5485 - DNA, 2372 bp, Homo sapiens; identical to SEQ ID NO: 5484
  source 1..2372: mol_type = unassigned DNA

SEQ ID NO: 5486 - DNA, 2372 bp, Homo sapiens; identical to SEQ ID NO: 5484
  source 1..2372: mol_type = unassigned DNA

SEQ ID NO: 5487 - DNA, 2142 bp, Homo sapiens
  source 1..2142: mol_type = unassigned DNA
ccgagggcagcgccccgcgcttgacctcctcgtaagcgcctacctgctcccaggtggccaggaaggcgtgggtgggggtaaagcgcgcagagcgcgggaagccagcgcgcacatagcgggcggccaggcccagcactgcgggggaggtgtcctctcggtacaggactcggcctctgccgtggctcgtgtcgatgtccgccagaaaaggggcgatggccgggaagtcggtggggaaatcatagtccacatactgcgtttccctggggaagtcctgagtggagatgatgccgttggtgcccacctgggagaggagagggacaaaaaggtgacagtcgctcaagcccaaggacgctaccctttcgcgcagggagggaagggaactgacttaggcaaaaagcctctctctccttccccactggccagggagtctggattcagggaaacaagcgcaacttttgcgactgtcccagctccgcgctgcagtaggtccaggggccctaaaactcgttcacctatcttctcactcccctcacaaccccggagccccatgtcctcggagaggaagcctccaggtctgaagagggaacaccccagctccgcagacgggcacagccttctcgcggtcctaactgcaaagcccgctggccgccctagcaacgccaccttttctgcctgggacgcgtacgtggctgcgaacaattcttgctctcccctccaggtcattcttgctcccctacagcagcggggcaggcagcggcatcgctctctggccgggtaccaccgcaagggtgctggggggctccaggagtggggtctgtttcctcccctctggaggcagggtttccgtgagaccgaccccagggaagaagctgcgggaaaagtgccaggagggggctgaacttacgtagaggttgctgaatcgggcttcgtagaagtgcaggggattcgccagcttcaccacggctgagctttcgtcgtcgccttcctgcaggagctggtccccccacgactccccgtgtgggaagagctcgtctgggtgcagcgccgcggcccgcaacattagcaacggcagcagcagtagcactggtaacgacgacagcaccggccgcccggccacccggtccccctccatgctcgctcggccgtgcgcttacccgctgcacaacgcgtcccgccccggcctccagcccactctccgcgccgcgccagcctcgaacctggatctccgcgggcgcctgggcggggcgggactccaggcccacccagcaagctaattggctgaggccctcggctggggaccaatcaccggctctgagaaagttcggcagtggccaccacatctggttctcgttaacttttctaaggcagcggccgctggagcagcggggctggcggggtaaaagctcctggccagggctgcctggagctgccccttccactccgcccccagggagctcccgggtcatcctctcatccgggctgccccgcggcccccaaggagccccacccccgggaccaaatggcccgcaaggtttggggcagcggcgttgcaggagatgagctcagcgcaaagggaaccccgcagcggcgagtgcggctgctggcctgcgcgctgtggccccaacaggctggcagggcgcgggcgggtggcggggttgcggtatgagctttgctccctgccctggggtcccgggcgctcctggctctggaggcctggccatcggtccgaaaagcaaagggacattgtcgtggtcccctcggccgcttcgctccacccagagacgccctgaggagaagcgagcctttgtacgaaggcagagggctgactcctaagttctgtccccctcccgaaggccggccgctagggaagacttggccaccctctggaagtaccttcccccgggaaaaccgcagcaggaaagaccatgaaatactactgtgtgtgatccgctccgtttggggagtaggatgaggcatcccgcttggttaccaggcagaaaggggcgagtcgcggggatgggaagaccctgatctcttgcccattgctgcggccgtcggagatgccctcccccgcggccacggaggcggtaacctgagctgctccgcaggactggaaaccgcacaacctcgaaaccagctgcg

SEQ ID NO: 5488 - DNA, 544 bp, Homo sapiens
  source 1..544: mol_type = unassigned DNA
ccgaacctgggcggccgtcgggcagccccctcgtccgaccatggcgactgacagtgagtgcgctccggccgcggaggccaggggtggggggaggccgcggtgcccagggtgggaagttcgatttcagacgctgcctttgtgctggctcgcggcagcagcggccgggtccctctccgctcctcacccttggctgcctggcggggcttgaaagggcaggtggccctggcggcgcgccccgcgagggatgtggcagaagggcgtgcgcctggcgccgaggcggagggaccctcgatgccgtgtggcagcggggcctgccatcgcagcccttcgcgggcactgcccccaggcccagagccagccttcagcgagccgggcaaacgaaggcactgcgcgtttttggcgctgtgagttcaaggttcgcctcgagttctgggtcgggtttgtgcgtctgccttttggggatcagggtggcttgcatggctcggctgcccggtggcccacgggctgtattcgcagcgggcagcacaaggccggctggagaccg

SEQ ID NO: 5489 - DNA, 2002 bp, Homo sapiens
  source 1..2002: mol_type = unassigned DNA
ccggaggctgtgccggggctcgtcaaaggctacaaacaaaccggacgggtgggaagcacgtttcagcggcgactggatttttaaaaatctgctggtagagtgaaaacaaaaattgtcctccaagttggcaaaatcggcgtcccagacggtgcgcaggagggccctgcgaggcctgtccccggagccccgcgccagtcctgtaggcccggctgggtccgcagcccggtgttccactcgtgggtcgggcccggctgcggggtctttccgcagccgggacacccaggacagcagcggctggggagccggggccaggggcttccttgcaattccaatgatttttattattatcactcgcaaaggacaaacgcggccaaggccgggcctcacagtggctgtgctggtcatcgcgtggaggagtgtgcgctaacccaggggcgaggggggcgcgcccggtgtcccggggagagcttagaaggaagacgccccaccgtggtccctacagtcagggacagtctgggtgctagaaattcccagagagaactcgaggggctgatgtcctgggtcaccagtccctggtgcctgtggggcttcctgcgcgcccacccccatccccctcccccctctcaggttcgacggattctcccggaggcttaggacagtgatttacagtaagtggtgacagtggaataacgtgacagtccgctgcatttgccagctggctcctgggcaggcctacccgccgggcccgaccccagagtcgagtcctcggagccgccgggtaaagccccctcccccgccccggtgcagccccgcgttccccgcgcccggcgctgccggggaaaagtggcacaacaggaaagcctcgccagagggcccttcccagtcggcttcctcgccataaaaagccagactccagccgaggtcctgaccccttccaaatatacgttcccttgcccgcggcccgccactcccgcccgggcctcgggctgtgcagcttcctcctaggcctgcccgggcccatgcctcccccgaagcggcgggagtcggtgcagcctcaacttctactgcgtgtcccaggtcgccaaccagctttgctcgcgtgccgttggcccggaggctgccgcgccagtctctgcgtgcgcctgagcgcgctggagcatttgcgaggccagggctgccgacggcgagaggatactttgaggaacacggtgcttcagtcccgcccccgctctccgcccgagctggaggttggggcgcgctgagccgcagcgcctggacaagtgcgcgggccggagccgcccaggcctgcacccgggggctcgcggccgacgcatgcgcacgcgcggtggcgggtctgcaggcccgaaggcccggcccctccctcaaacccggagcggggaagcccaggggctgagagcctcggcccgggtcgcaggagctggggagcggggacgcgggcaggctaggtcttcccacctgccgtcggggctcctccccgcagcagcaaaggggtcccagtgcccgtggcagtgcatgccccagcggacacgctggctcccaaattcagagatcagaggggcggctgagaacggggcgtccgctgtgtgtgacccctgaccgtggaggaagggcgggagccgggagtaggcggtggggcccggggtcaggccgcggtcgtcggctcccggcaaaggcgctctggccggggaagggggcgagggtgggcggccggcctctgccgtcgtagtcatacctgggacgttgaaatgggctttggggatagagctcactcccagcgcgccccacaggagaagcccgcagctcaggcctgggccgtgcagaccgctgggcgggctcggggcccgaggagagcaacacggcgcgaggtccagtcgcgagtaataaccccgacagcacggcccctcgaagacgtgttccgggcaccggggttgtgagcgggggagcctcgggccttgggcccgcttggcacggggcgggggcg

SEQ ID NO: 5490 - DNA, 983 bp, Homo sapiens
  source 1..983: mol_type = unassigned DNA
ccgtttcctctcggcctcccgagcggagtgggcaagggaggggggtgaggaaggtacgcgatgcccccgccgcccggcgcctcaccggtcgcagcggctcatcgcccccgcgggctgcccgccggccgcagccgcgtccggggcatgtcagtccgccgccgccgccctcccgccggggttcgtgggctcgcagctgtcagggagctgcggggcagcgcatctggagcgcggggtctgggagggagggtgtctggggccagggcgaggggccccgggaggggtccttccgcacggatttcagaaagagggaaaccccgacccagagcggtgactggaatctacgcccgggagaggcccggagtcccggccgcgggcggcgggggattcctgcaggaaggggcaggaaggcaagcagcccggcgcgccctggcggctccgagggacctgggctcgggcttgcggtcgcgtcgcctgggctttccctgggctgggagcgcgccgggtctccgccttgcacgctgtcaccgcgggagacgtctcggcctcgccgcgcgcagaggggacgcgcggagaggctggtttctgggcgagcggagagctttgcccattaagctgccggaagaagccaaatcaaaaagccaatctccaagcctccaaacggaacgtcaccctatcagctgggagacagcgccgcactgactgacaagccgcgcatatttatcctcgcgcgcggaggggagactctcagaacgctcctcgaccagcagcgaggaagtcgagcccgcatcccgcatcccgcatcccgcatccagagcccccgagggacgaattcagatccaacccctgccccgcggccacccaccctagtcgttggagcctggcgcccgcgcctcccggccggcagcacgtcaaaacggcggcgcgtcctgacctggattccgccgagttgggagctccaggcagcaggcgggcgcgcggcaccg

SEQ ID NO: 5491 - DNA, 947 bp, Homo sapiens
  source 1..947: mol_type = unassigned DNA
gcggagcgcgccagagcgcgagggacggagggagaggaggagcgcgggagctgcggaggcgatcccgcgaattcattactgtaaacatatccgggggtgtcaggaggggtaggggtgggggccgcggcgcctacattagcccggccgcgtcggattgaggcagtagtgtggtctgagcagcctccagacccacgccgggcgggcgcagcacttggagcgagccctgcgcccgcccccgcgcagcgccgcacgcccggctccgagctgtccgcacacacgcgtcggaggagagcccgcctagctctcccgccgagtcccgggatcctccaaatccgaggagctccggcgccgcggggcagctttctgccgccttccccgctcgctgtacttcttttggggttcgttggcttggcgaagcggagagggggaggcggaggaggagagaaggcgggggtcgcggcggccgaagccaagagaaagtggcatgcccgaaccctggaggcggtggtggcggaggacgggggaagacgatgccgcagctccgtaggggacgtaggcgagagcaagcgaggcgagctgggcgccccggccccggcccgctgcggggaggcgcgcgccgctctgaggctccggcctccgcacccccgcgccccgacgctgcgggcgacagggcttggctccagcagccgccgccgtcgccgccgccgccacccggaggacccagcaaaagtttggatctgggggagggcgcggcgctgagcgggattaccaccagggctggaaggagacctcgagaacctttgcaggtaacgcgcgcccccaaccctcttcttccatgccccgccgctgcgctcccgcttcctcccagagcccttcctggccctcgcgggtctggcagaaagtaagagggaggcgaagttcaagatcccggggatgagcaccgagcg

SEQ ID NO: 5492 - DNA, 1362 bp, Homo sapiens
  source 1..1362: mol_type = unassigned DNA
gcgcctctttcacccgcgtccccaggtccccatgtacgccacgtgggtgggagcgtgtcccacacacccgcgcgcccaaagccacattcgccacgctcccgccggggcgggctcaccgcgcgcctctgggtgccgagcctccacaggccacatagccgccacctgctgctgcatccccactgcggggacaggggcactcagtgcctccctccgtcccccccgccccgcgaaggcctcccatcctccagggccaggcggaggccacgtctttcccgggccccctccccaacgcggagagggaagcggagggaggagcttggcccgcagccgccggccctccccgcactggagctccccctcccctccctccccgcccctcggctgccgcagcccggctcgcagcgcgcgtcagcgggggctccccggagcgagtcgctaggtaacggggctggctccgcagacgcggggccggggaagcccgcgcgcgtcatcagcagcggcgccgcggggcggggggcgcagagaccctccccaatcccggcctgccaccacctggctcgcgcgcagccccggcccagaatgccttaacctgcgccgattgctgccgccgaggtgcccctcccctgtagggaccccgacgccgccagccccttcctcctttcccgcaggtgcgcactgctgtgcttgcggccgggtgggcgccccgccgctgcggtcgcggtcgccgctggtaagctgcgctctggggcttggggcaggaagcagtggggggcgctcgaagagcagggcagctacggccaccgtggccgccggaccggccatgtgctaaagtttctggggctcggcgccccgctgggcgcgcagcgcggggagcagacgcgccgtgggtggggcagcgcggtgctgctggcgcccggcccccgcggggtgcagctctgcgcgttctcatgctgtctctctctctttccctccgcgctgcctctccgaggtcctcccgccgagccccggcgcggggcatgaggagcccccgggtgccgcccagagaccagcaggctgcgcgcacacctagccagcggcagacggggacatgagcagcgcgcacggggtcccgcgcccggcggccagccctatccggcggcggccagcgggtcaacgctgcccgggagaatgaggcaggagccggcggcagcctcctttttttccttctcctcgccttcctgcggctccggcgctccgggtccgggccgggctgcggctctgctgcgtgccccgcgcgcccctcaaccgcctccggatgcgcttctcggtaagccaggccctccgcctcgcgaacaaagctcccttcgcagggcccggaggccg

SEQ ID NO: 5493 - DNA, 1092 bp, Homo sapiens
  source 1..1092: mol_type = unassigned DNA
ccggactctgggaggagcgttggcgtggaaagccaggtcactccgatcttggtcctcaggctcgggataacgtgtcagccccaagagagcgctgcccacagccccgggtgggttgggttcaactgcacggggcggggcgccaacagctcaggacttgggttgcaggctggttcttgcaccaaccagcggggcggcctcgggcctcagtttccccatcccgcccacgaagggaggcgattgcgagcgcttggggtttctgacggaccccgccccgggggtggggcggggagtggtcacgtggaggggcgccccgtccgccgagccccgccccaccccgccccgcccgcccccgcgctcggggccctccgcctagtagagatctggagccagaagcccagagacagccgagtgcgccgtgcggtctccggacgctcgctgctcagcccgatccccgccaactgtgcaggcggctgacccgcagcggcagcggcagcagcgaggactcgagcgctggctgcagcgacaccatggatctctcctttatggccgcgcaggtaacggggcgtcccccccacgcgccccgggccgccaagtttggggaggttcggggccacggtctcgccctccacgctggggctgggcagtggcgcccgcccgcgatccgcgtcccggtcctttgtcccgagccggacacccccacttggtgcacgcgtcgggggcggcgatcgcggctctcccggggtggggcgggctgcgcgccccgcacccccgcggctcgagctgttcccgcccgggcccctctcgttggcaggaaggctgcgaggagcctgggcagcccgagtcgcccccttctgcccatcccccactgctgtcccccttctggggtcccggagccctccaaggccgggccagctcagacccgcgcgaacgtggatgggcacacagtctcgcccttccccactctgttttcccgaggcgccagtaatctgtctcttgccggtgacctcgggcgccccctttgccgccgcctgaggaaggctctgagacccgctttgtgaccgtgacccgccaagcgtcgacgcgccgcggtcg

SEQ ID NO: 5494 - DNA, 1092 bp, Homo sapiens; identical to SEQ ID NO: 5493
  source 1..1092: mol_type = unassigned DNA

SEQ ID NO: 5495 - DNA, 1092 bp, Homo sapiens; identical to SEQ ID NO: 5493
  source 1..1092: mol_type = unassigned DNA

SEQ ID NO: 5496 - DNA, 580 bp, Homo sapiens
  source 1..580: mol_type = unassigned DNA
ccgcccgggcccgcggattgccgggtcggttctcagtcaccgcacaggtgccctggagagtgcgaccaccccctgccctccgccccgcgccggccctcggctcagtgccccgcccttcctggagcacggcctgcgcatgcgcgcgccccagggcccagccctgttcctgctccggctcctgcggggatggatgcttcacgcagtaagcgagtaagcgagccctggagaccggggccctgggtgtgcggtcggctcagtgccacgcggtgagataggcatggttatcaacccacgccaaggcggttgtgtacctggcatagaaaacactgctgttgaatgttgtttccatagtcattcgccagcgtccactgatgagaggtgccaccacggacacccggccttgctccgtcgaagctttggtccattaggaccaaagtcaggccccagcgggcctccctgccattcctggacggcctcgcgtcctcccagagcctgaccttctcttatctctgcagcctaagtcgcggaagcgtagacacccggcttttcccgcgtgctctatcgggctcccctggacacg

SEQ ID NO: 5497 - DNA, 888 bp, Homo sapiens
  source 1..888: mol_type = unassigned DNA
ccgtgggaggtcagagcgggcgctgcccggcgtcacccctgcagcgtccggatcgctccgcataggcaggggtggtgccccctccccggggcacagaaacgccacatcccgggggcgccgcccagaggctgtctctgtttctgtgtcccttcatgaggctctgtcccacaaaggcagcctgagccaggaccctaaagaggcctggtcatcgggaccggagggagttccgcttcccaggccggctctgcaaacgcgagcctgcgccaaggcgccctgcgggtttgctggtggcatcgaggggcagcgcggggccagcgctgggagctccgaacccacacgctccggccagctgcccgggaagcgcccaagcacacgtcccgagtcccagattggattaagttgcccaactacctactttttctctctttaaggagaagcctaattggagaagattcggttttcttcgccatggcaggtccctttctcctgacccgcagttgcaggggctgagggtaggcgcaggtccgccctggggtcgaagccaccatcgggcctcgaggttgcccccctaacatccggcctgcacgcctggcgggggcgcaacagtgtctcacggctcgggagctcgtttttggcttctgagcaaggtatttttttcatctgccgtgtgtttagctgaattcagtatatttttctcgcacttctcgcttttttttttttctttctgaatctgctcttctgctttgcgggcccctaatctctcccgaatctcgggcgcccggcccggcccaggcgagcgctcgcggttggggacgcgggtggggacgcggcggtctgggcgctgcaggatgcgcctggccgcggaggagacgaccagggagcgggtcg

SEQ ID NO: 5498 - DNA, 1483 bp, Homo sapiens
  source 1..1483: mol_type = unassigned DNA
tcgaatactgatatcgccccaaagctgcaactctccggccccgccacggctccttatgtacaaagagagggaatcagtcgccggtgacctcgacggccctcggatcagggatgccccgagtccgagcgggcagggtgctcagcagggccaggtgatgggaatcatggggccatcgagcacggaccctggctcccccggtggcctctgtgagctctggggtcaggcggggactggaggagcgtccgcgccgggagggagcgcaccgcgccacgtgcccgcccggcgccccgcccccaccccggccacgcccctcgcgcttccctcaaagccccgcccctcagccccgccactctcgtccgccccgcccctcgcagcctcaagctcagcgctcccggaggcgcggacggtggggccccgcgccttttgtgtcgggctttgaccgccgcgcgcgctcattcacctcagcggccgcgggcggaggggcgcacgcgcgcgcagtcccctcggagggcggtggggcgaacagcaacgcgcgtaccctagctcttggctgctgtgctgagactagcccgcgcgcccgcgcgcctctccctcgaggactcggagccgcccgcgcactcgccaggggccgccgccccgagtctcaggcggacgcgcacgcgttcccgccgcccggaccccagccggctcgccccccgcccccccatcccccggcggcggcccccaggcacgcgcccgcgcacacgccggcccgggcacgcgcccgccaagatggcaggggccggggcccagctgtcagtcgccgccgccgcggcccttccccgcagctagcggccccgacgcccacccggagaagatgagcccccgctgccccccgcagcccagtcagacgcggagccgccgcgcccggggccggctcccccgctagcgcccgcgtcccgcgccccgccgccgccgccgccgccgccgggtcgcccctggcccggcgcgcccgtccccggcagcgacaatgaggtgagtcggggccggcgcctcgtgggaggtggcagcggccagcgtcggaggggctgggctgggggcccgcggtgcccccgagggcgggaggggggctccacgggcgcgggggcttccagagaaccgcgggggctctgcagagattcgggggcattcagagcgcgggaatggcttcgcgagagccgtgggggcgtctggagagccgggagggtctgcagggcttgtggggggcagtgttctgcaaggggcaggcggcgctggctttggctgcttgtggggtcctcttaggctccggggggcctgcggcggcctgggaggcagacccccgcgggcaggtgtggccgtgtcccgaccgcgcgaggaccgaagttggcggaagcccctgtgcggtgccttccagcccggaggaggctggcctgaagcccccaggcgttgccgaagcctccccctgccagcgcccagagccgcg

SEQ ID NO: 5499 - DNA, 3714 bp, Homo sapiens
  source 1..3714: mol_type = unassigned DNA
gcgcgcgaggctggggcagcccacaggaggagcgcgggacccgggcttgagtttgcacccaggcagagcgcccacccccgcccctagcttcggaccctgaaagtaaagtcgtcgtgcccggcagccagcccgaatcttccagccctcagggagtcggggtcggggcagggaaggccacgggtggcggcacaatcgggatcctggagtggaggcgcagactgcgggtcccgctgcgcacgctccgtggtccggttggggtgggccttggaggtccataggccaaggttgaacgggggctctggagcgtgggcggggtggagtgcacaggtcactgggctctgagcgtttccatgggccaggaccccaacgcgccgtgtcctcaggacagattggagggggaaggggctgcgattatgccccagtcggaagggttttacagcagccgcgctgccctctccctgccggatacccggcagtagacaccgacgtctgggggctagcgaggcaggtgggcgcggaccgcgacccgattctggcttccaacctccgcccagtggcgcgcggggccgtcgccccacacctccagtccgcgtggctggtgtctggctcgccgccggggcggaaggggcgctgtcggcgcaggcgggcggggccggagcgcgggggcgcgcggcgcggagcgagcgcagggctcgggggcgcggggcgcggaggaccgggggcttgacgggcggccctgcgcggtgcggggcgcggcggcggcgggcgcgcggccagtgaacgcgcgggcggggcggcggtggcgggaggcactaggggccgctccccgcgcttccctcttccatggcgctgccccagccgcccgagccgccccgcggcgcgccccgcaaggctcccagcctgctggagatgggggcgctctgcctggactcggagatcatcctgggcttcaccagccacctcctgcggcgacgaggcaaggtgagggctgtcgggaggggggcgggcggcgtaggcgccgtcccgttactttgccgcgcggctcgcgcggccgggggtgctgcgccgggaaggagacggcaggtccggagccgcgtcccgcagcccgggctgggactcgctgccgcactttcccccattagcgttgtccaagtctccctctgccttcaaggctgtgtcccaaccggacccacccggaggctgtggctagggcggagagcgcagcgcagggattctcgggctcaccttgcgccttgctaggatgggcgaagtagggggtcggggcccctgactgatcgtgagcccccgaggtgactccagccttgtgcaccccgtgttctgcggatatgggatgtgagcttgtgcttcccgaagcgccgcggcggtagaagcgctgaagttgcgggtgtggctggccaggggcgcaggaccggtgctcccgaccgctgcgtgcttctgtgttgcgtgtgtgggtggggggacgggatatagagagtgtgtgtcccggagcagtggagcggcgggaggcggtgctgtctgccggcagtgcggggtggggtttgggtgttgtcctcagtacccagatccagatgtgggctgacgcccgttttcattctccaggctgcgaagagacgggtaggggaagcgcttccggccccccaggctgggtggaaagcgactgcaggcttacggatctcagaaagagtggagagcccctgccactttattccatacccccttgcgttttcgaacccctaaggtcatcaacgacccggaaagccgggaggggatcacccaccccactttctggggagtgcgtgcgtgggcggggaggcttatccaagtaaaagggggtgggcaaaacggaaagggtcactttgacgtactgagtctctgcgaaggcctcaccgtatgtgccggcagccgcgtgtcctggtctccgccgggtcacgaccttcggagtttccgagtgcgcctcaggcctgggacgcgcggcgctgtctccccagtctcggagccgtgtgcgcagcggccggcagggggcactcgcgtcacggggagcccgcccgccgcgcccgcctggcttgacccgggctttggggctgacccggagcctggcccggagctgcctgcggccgcggatgccggcgacatttggggcccggctaggcacagagcaactggtcgccagggaagggcgggggggcggcctcccagccggagacaaacaagcaattaattccggagctgagttcccatctgccaggcctgctgacaacaggtccggcgcacgcccgcaggacctcccgcttcccgggcggcacggcgcgcacacccacttgcgggcacacgcgcggctgtaaagacacgtgccgttcgcagacgcgccgaggcacagatacgccggcgcggtcgctgcccggctcgaggcgcacaccgcggcgacactaacccacgcgcgacagttagacctaaagtggcccgcgacacgcagagtacgctgggcttgctggaaaggcgcctgggagtctcggggccggggtcccgccccttcctcggcccacctcgccgtgggccttgggcaagagcgtcccctccgcagcctcagttttcccgcctgtagagggaggggcgtcggcgcctcctgggagacgcgcagccctggtgtcccgggagaggggcgggaggcgcatgcgcgcgcgcaactagatcctcgccgccgcccccagcgcccctccccggggcagggactcacctaacaggttggggtccttggagtgcgcggggccgcgtggggaagcggggaccctaccccccccacgcgccgcccagcactgggcaagggcggggcactctctgggctcccgcccctcgccgcccgccccgggagcccgagccccgcccttccccggccccgccctcgcctcccgagcgcgcccaccggagccaccgcgctcctcgcgacactcgcaggctctgcgaacttccgagcggctgggccgggccatgggggcgcctcggggccggatcacgtagccgcggcgcccccggagagccagcgtggccgggagcgcctgccgggctcttcccgcgccccggccatggtcggccgcggcgtccctctgtgcgctgcgcagcccgcggtacgcgcggcccggcctggagagggaggcgggcggcgggggcccgggacggcgaagatactcgcggtgtgcgctggatccctgggggccgggcctcctgctgagggtagcggacccgcaggcgggacctccggggatggagggagtgggtgagcgccagggtcgtgcccagggctcctaactttggcaagagcgtcacgctggggcagggcgcgcaggggtctggatccgacggacgtcccaggctcactgtccgcttccgcccccacaccctgcaggtggccgagggcggcccggcccgcgagccgccgccgctgctggaggtgtccccccgaaagaggctacccgccgggcccgaccaggacccatgcggcagccgccctgctcccgaaggcgccggggccggcccagagcagggccactcggccggcggaggcggctggtgccgccactgccacacgaagctggtggagctcaagcgacaggcgtggaagctggtcagcgggcccgggaccaccctccgggtaagtgacacttccttaggccgacccctccgagcagggccacgccg

SEQ ID NO: 5500 - DNA, 1266 bp, Homo sapiens
  source 1..1266: mol_type = unassigned DNA
gcggcgaggagggctgtaggtgaagcgcggggagagggaggtcgcccgctccggcctctcccccaggggccctgcggctggccagcgctccggctgcacctcctggtgcgcgccgcggcggcgccacaggcccctcgaccctttgaccaccgccctcgggccgcgcgtccggcagccgggaccggtgatggcgcgggactgacggccgtctcctcccagacccctctgtcccgcctggggctcgctggggctgcggcgccgccccgagctgcatgtggggcgggcgcgcccgagcccagagcgagcggccctcggcgcccccgaggcggtgccccgccgcgccagagtacgaggaggagcggcgggccgggccaggctccccacgcgccgcagcctcggagcacgggctccccggaggggacttggggcgtcccagcccaggaggaaggacccggaagcagaagcggagccgcgagtcgagccgagccactgcccccgctgcccgcgggcgccgggtgggggtcccggcggctggatgggcagcggcggcgcgggccgcgggcggcgatgggcgaggagcagagcacggtgagcggcggcggcgggccccaggagtcgcagaccctggccagtggcactgcgggccaccctgagcccccgaggcctcagggggacagcgcccgggcgcccccgctgcgcgccgcctccgcggagccgagcggcggtggctgcggaagcgactggggctgcgcggacaccagcgccccagagcccgcgaggagcctggggcccccgggctggagtaagagccgagcaccggcgcagcctgcgggactggcactcaccgggcctctcaatccccagaccttgccactgcagttggagctggaggaggaagaggaggaagctggggatcgaaaagagggaggggatgaacagcaggaggcgccccccggcgaagagctggagcccaggacccgcgtgggggccgccgacggactggtcctggacgtgctgggtcagcggcgcccgtccctcgccaagagacaagtcttctgctccgtgtactgcgtggagagcgacctgcccgaggcccccgcctcggagcagctctcgccgcccgcgtcgccacctggggctccgccagtgttgaaccctcccagcacccgctcttccttccccagcccccgactgtccctcccaacggattccctctcccccgacggcggcagcatcgagctggagttctacctggcgcccgagccg

SEQ ID NO: 5501 - DNA, 1316 bp, Homo sapiens; identical to SEQ ID NO: 5378
  source 1..1316: mol_type = unassigned DNA

SEQ ID NO: 5502 - DNA, 10783 bp, Homo sapiens
  source 1..10783: mol_type = unassigned DNA
tcgcggagacatctcgagtcccgcaggtgtctgagctgcgctgcgcgccccagccgggaagccttttcttatccaaccgcgccgccccgcggaaagcctgggtactgcagacgccctcaccggcccaccgacagctggttttgaagcgggggcttagaaaagtaaaggggacagtgtttggagccacgatgcctttgatgtgaggcggttccacccaacaatcaacgaatcaagctggaactgcaggccctacttttgttggggggaggaccttaaggaatgtcacccccttgtcccctaccctctgccccacgcccagcctctcagaaggcaccaggcgtgagtagagtgcgaggcgtccacaccctcgtgtcccttccattcccggacacctttgcaccctagccgaggcctcagcacggagtgagggttgcctggggtgccctgctgtgtgtggggcgttcttgcctcccgggccctgaccccacggtctgggtcggcgaggcgtctctccctggcgtctggactgtgcgcctgccccgcttccaggcgacgaacggcaggagccgggggtccggcgggacccggatccagggcgggcggaaggcgagggtctctccttcccggaacccccgccccggaaacctgcaaccaaaccgggtccctcctccgcatcgctcccgcgctcccgggccgcctccccacgcgggcacccactctccgggccctcgcagcaccgccctctccgcgtccacccgcgcggccgacgccgccaggggccctgagatcgcggagacagcgcgccctggcgcctggtggggccctcccagtggccagagcgctcctggaccagtcggctgtggtctgtgcccaaacacgatggaaaccggggctgggacgggcggtggtacgcacgtggaggagaagaggcatggcgggaaaaccacagccgaacacaggtcgactcgcacctcccaggcacccgccgccgtctgactcgcggctctccccaaggttccgactcgccgccacctcttggcaccactcaccgggctccgacccgggccgcgagtccgctgatgcgcagctgcctccggcggctcccgggctctgcccggacccgcgcgcagagacgctcgggaacgctgggctcgggcgcctcctggcggcggcagcacgcggcacacgctcggttctccggcccgagggggcgcgtggagcgtacgcgggatccgcgcgcgggcctgggctgctggcccacatttccccgcttgctcggatggcggcgctgaggcctattcgcctctttattaataacgatgcctcgggagggaaaaaatagagcctttaaaaatcagagtgcgagagaggagtgtgtgtgtgtgtgtgtgtgtgtgtgtgtgtgtgtgtctcggggcgttggtgaaagcaataaaactcagatcgcttccttggcgagatagcggcggctataatgcgccggggggatcaggggtttatttgcagatcctggataaaagatgatatatcgacacggtttagagtgtcactgcgcttggcctctcagggagccacaagtacatatttcctgaaataccgcccagcacagtatctaatccgcccgccacttaacaccgggaggggaacttcagcagcgcacaagcgcgctcccggtttcctggttctgggtggggagagcccaaatgagaaggatctggtatgcctagacgccccctcccctggcctttgtcttcagtccaagtaatcacttagcgatgggccttaataaatacgtctgagaactgtccttatgctcggtaaatattggattagcttttcaatgaccaggctcttgaaaaggctcgagaaatacacaccaggtctcaactaagcccaacagtcaataggtaaggaaataagttatttccccatctgaggtggggaatgttgggaagggggacttccactcttaccaaattatctgattctactaaatatgaccgttgtactaaataggaaagggggcgcatccaagtttcccattagtcggaatttccaccagctcagttctgctcattaagggccgagtgactttgtggggaacatatctgggttccagtttttatttccacagagctcagcataaactatttttgtttagtacatatggtttatttggggactgcttatgggagttttgacctggcaattgcaggggagaaggcatgacccaaattatttccgactgcctcgcgccaatttggaccgcttagaggaggcaaaaaatgggcaaattccttggaagccctgctgtgtctccctggtactgaattttgtaagcacgcgatacaggagacattgaaaattaaagaggaagtatctccctcctccaacatggggagagacgctgttggaagaagtttctgaagtggtttcccatcgcaccaagaggccagtgggatggatccccgcgcataattcaaaggaacgcgcgcgtctttagctcttcggggttggtaaccaagtggtccggccgggcgcaagtcgccttggaaccggctgcagcccaagtctagctgggcccgggactgagcggcacccttggcctctcagaacctttctcgcggtgagtggaagggcggctccgcgcgcgggcgcttcggggccggtcggttgcgaaatcagggggtggattttcatctacccaggagccgctaagcccgtaggggaccgagcatcacccaggccctgggtaccctgagttgcctcctgagccccaggacggtccgatggtgcagagctcccaggcagaagttagtttcctgatacacacacagcagtgagcaaagtgcgcacaagtgagccaaaccctgaagacgcaggttcgcggactcccatcccagcgttagagtcaaggagacagaagagaggaaggagagaagtgaggaagggagagagattatgagaaaaagagattatgaaagtagagaaagagattatgagagcgagattatgagaagagagaaaaagagagattttgagagagagagacagaatgagagagatccaactttcagtgtcacggggcctaggcggggcaagcgccctccgaagccatcaaagacaggggtggctttttctcccctcctccagcctcctccccaatagatatagcacgaatttttaatgcgtcttcctttcacagacaacaatacagggtttgaaagccggacacaatttaggttttgtgcgggtccctcctcgcgctccctcggcccagctggccatatggaatccagcatggagcccgtggatgacaaagggacccagtgacaggcccaacaaaaccccaaggagacttctgcctgactccgggattcactgccggcgataagcgcgctgaatggtgcggggtggggcggggggtggggggcgggccccttctccttcttcccctctctctgtccccgcgatcctttctctgtccctttttaatatgcacgcctctaacatctccggctcccagctttcccattgtgcggttttgtaccgcccgctgtagattgggcgaagatagactgctgaagcggaccccgcgccgggtgcgctcccagggcgctggggttagggccacacagggctccgcaggcgcttttattgactccatggggacccgaggacagagagaggcgggcgccgggtccacctcccgggctcccggccggccacaggagcgcacacccagattgcaggcccgcggtcctggccacagctccaaatttgtcctcaatgagcaagtggtggaagcctgccagggtgaggaccttccacgcttcccccttcctctctggaaacctgagggtctcttgtgatcattctcaccctggaagccctggggcctggaaaagtcaaaatggcctcaggccttctgacagctccgctccaagagacttgaaaccctcacctttcctcccaagaggattttgggattaggggaagttgcaagtggatgttgagtggttagtaccagggcaggttgggcgttcaattattgcacaacaaactatttgggagaaattcgttggcctttaaaaacagtaagacataagcccccaaacattgccaagctagtgtggagaacaaagggagaccttttagcatttagaaaaactgccctttccccgaggatgagcccggagatgggaaaggacctttactggggtattagaaagacttccgagccctcaattatccaggggcggtgtggaacgcgggaataaagtgtcatcgcgtccctgggctgctgcgcagagtgctatcgacgcacagatttggtcgcacggataatcatgtttgctttagatattgaattaaacctgatcatcaactacagggagcgagaaagtcagctgggaccgctccttttgcccggcctcctcactgccacccaaccccccagccttgatggtgcagcttcggagagaacagagatacaatttccaaatgcgccgacgttcagtccctcagcgtctgcagcacccgctgggctctgagctagagtcccaagtatttttagaaacccgcgagatagaggagaaaggctcatcctccagttggccaggcttcctaagacgctcccccgcgtggccaagtgtgcgccagcatctgccaaggagatcttcctccagcaacaagggtgggacggaatccgttccccgccggaaagatggatgcgcccttcccgggcgtgcccggggctgtgtgcccacttcccatccggggagctcaccccacccccaaacctctacttcctagcaatccacccagttccacgctcaagggctgacctggggggaccgcacaccctggttcggaccgccgaacgctggagggaaggaggcccgggatccagtccccggagagaggcctggaagcccggaaaggatgggagcgtaagggaagggagaggcatggtttgctgggattgccaaagattctcgctccctggcttcctggggccaaagatcctagggagggctgcagtatcccctccctcccccgagcccagaaccccgcgtacttcccccaagccccctaagccaaagcctcgcgcgccctgaccgttcccacccccagccttagcggtctcctaggtcagcaccagcccgcagattttgaaaaggagtggggagtggggagaaggcagccagtcttaacctcagacccccacccacccactttcttagcgtgaggtaagtcaaatgtaacaaagtgaaagtcatcgagtgtagtggcttcaacagcttctcaggctgaaggagccactcatagatttgggccagcgaggggggtttgctctcctcgcctttgcggctcccgaagtcacttttcctcccgtagccggacgctgccgcccggggttcagacagcgcgcgagaccaggggagatgcgggggagggtgggcggccctgggcttccggccgaccgctcgcaggccggaggccgagcgttctcctccccgccccaatcctaggcgcggggtgcagcctgtggtcggaggggcctgcaccgggagccccgcccgccccagggccccggtacccccggcctccccgcccgagaggaaccgcctgtgggagccccgcgggcggccgggcccggctcccaggcccaggcctccggcccggcgcagtaggacaaacgggagggcagggattttttctttttttcttttttaaacacaggatttttattaaaattcttatttaaaaaatcgaaagctttctgcgcccggcgctgttggggaaccgcgccgaatagctgagctccaagttcggggctgaaggcccggaggacagggcagagggctccctgcctacagggttttcttttccatatttgagaaatgtttgcacaataaaataaaaagagaaaggaagaaagcaggggaaaacgcaaaaacaaaaacaaaacaaaaaacaaacccaaacaagccacaaagaaaggagttggacccagacgggaaacaggccggtcctgaaggtcattttggcaacaatcaccaccgatatttacaacgaaaagcgaaatctgccaccagttgtcagaacgtttacatggccataaatatttagcattttcttatttttttttaaaaaaaggaagaaattctctgtatttttaaagtgttctccacttgctttagaagacggctgacaatatcgctactcacacaaacatattttacaaaatgcacgaaagcaggggtggggggtcggtctttttctcgttttcaagtgacgacattaacgctgggacggtttggtccccccggggagaggcaaagaagcgaagctgcgcaaacattctgtaaacacggcgtagagttcagccctctcccaaggttcagaaggagaggcatgggcagagctgggtgggtggaatctgccactccaaggagacgcaggcaacctcccggcgcctccctagtggagccgagagtcaactcgactccataataataattataataataataataaccaccataaggaccgaggcctcctcgccgccaccgccgccggggtggggcctgggcctggggccgcgagtctcgttggggcggcgctcaccaagtccactgctgggcctggaccagggggtgtgctgtcgggtactggggggtgctggccgagctgtactgggcgttgtactgcatgtgctgcagcgactgcgcgctgtaggcagaaaagggaatgcccgcctggaaggtggcggctgccaggtcctgggctttgagcgcgtgacatggtttgccgtccctgaccaagacgggcacggccacccggcgcggcgagggcaggggcgtcacctccatacctttctcggcccgggcgcgcttcatcttgtagcggtggttctggaaccagatcttgacctgcgtgggcgtgaggcggatgaggctggccaggtgttcgcgctcgggcgccgacaggtaccgctgctgccgaaagcgccgctccagctcgtaggtctgcgccttggagaaaagcactcgccgctttcgcttcttgccggcgtcccccccgccgcccggggtctccttgtcattgtccggtgactcgtcggccgagggctccggggacttggagcttgagtcctgagggggcgccccggcagccagaccgtgcactggggggagggggagagagaagcgcgtcaggcgtctggaggccgcgcgcagcctgcaccagactcggagcaccctggatcctccgtgcgaccctggacctccgcgcctggcagcccagccccgctgcctttgccatgacccctgccttcctctacgcctgacgaagacgtcgggacctcccagggtaaagagggaaatccgtaggagtgggggctaggggctcgcctttcaaggggctcacatagtgtgggtgagaatttggggggggaagtggcactgaagatcatcgcgggttaagggctccggcgcccttaagcggtttcctctccggcgagacgtgggcagatttttaaaagaaataccccacaatcccagcattgatcggctcggccatttaaggcaggtttttgggggctttcgtttctgctttcgggccttctagacaccccctgcactgcacaaagcgtcctctatgatcgcgcagggggcagggtgagctatttatacccgggccacccgaagcctccccaccctccacccgtacccggacgaggctcgctggctacctccagggcgccaggccagtccctcccagcggccggagtccgggggctgcggctggagccatcggtccgggttgacatcatataccagcccctgggaggtatagcccttctccctctttctccttaacttctcgcattgaaaaaaattttggagaccaagttctttcccggaactaaggaggcttgaagaggagggcagaggacatcctatacaggtgttaaaaatctttctacggatccgagtgagggggtccgggcttacatggccccttcccctttcactcccagcgtccaacccgggctgcggctgcaggaatggaggggaccacggcctcggcagccaagttttgctacttacgggagtactgaaggccctcggtgctggccagccagcgcgtgtacgggttgtcgctgctgtcgtagaaggggttcttcaggggcaggctctgcaccgcgtccagggcgccctgccccagcggcccggccctcttggctggctcgggcccctcgttctcttcctccggaccttcggccacagagccctcctcatcgttggtgtccggcaggtctaagatgtccttgaccgaaaaccccgtctttgtgttggtcagcgacatggttcgagaccccaaaatttatgtcgcaaagttgtagcttcacttggtcaattcgtggcgctcccctgccccggcgggcgggggaggggggagttggggggagggactgggggaggggaggggggaattggctttaattattgggataattattatttttaaaaagagaaagaaactggggatggggaggaaaaaaatgaagcccaacccagtgcctctctctgtcttctttgaaagcacgcggaaatggacgcaggaagccgggcggcctgcgcgccgagcgccgcgggccccggccttagtttctaactccaggaggggtgccaaggcggcgtcagctcgggctccggcggccgctcggcgcgcggtggcggctggtggcgaggaaaaaatgggccattgcccgagcgatcagtccatataaggctgggctccactcacgaacctggggaggcggggagagggggagaaagagagggagggagggaaagaaagagggagggagggggagcgagagagggagcgggagaagggtggaaaaaagggggaagagacattaaaaacgcaaaggttggccacgtgtgggcgggtcttgggagtcaagtggatgaagacagtatttgcagatgtgaaattgtgggttttggggagctccgcgctcccagccaacggccctctagagcaagatgagaggtgtaacgtgtcaattaattgcaaagacggggcgagcctttttttttttaaacccagtatttacatacaaagggccaccgcgtcgctcgcgagtccacacacttgaaagggccgttttaacaaattgcatcttaaaaaaggtgggggtggggaggaggaggggagaaaacaaaacagaaaccaggaggagggaaaaaatcctctttaacattcaccggttcctacctccccgcccccgcgcgcccacccccggcaagccggaaaattggcgatttgtggcgcctttggaaaagggggagggggcgaaggccgagctgcggaaatctctcctttccatcgttggtggttgcctaaacaagatccggttcaaatggcaagagcccaacttctgtaagcctcctaggtcaatattttggttgaggcttaaggatgagtgctagaaatgacaaggcaagtaattgattccagttaaccgcgagagagcccaaaacccaggagagagctccgctccgggccggccagagccaccaccaagcgacccgcccccttccagccgccctttatttgctaaagactcatttatttccttcactccgcctccccccacctcccacccccaaccccccgcctccacctctctgcggccaaggaggacgcgcagttcactttctgctttgcgggcggtcccggggagggcggggtaagagtgaggagctccaacttcgtctggggtcggaccctggccctgctgcctctgggctctgcgggcctctttccccgggtggaggaaagggcagacggccctgctctttcctgccctctattatccctccctctccggccccctccctctccagcctctggctagaggtggagcagcgggaaggcggcggggcgggattgcgggggtgggggtgggggttgtgtctccagcctgggtgaagacccagaaagctgcgggggaggggggtcgctgggtggcccgacgatgcctcgttttctccccagttttcttctcccacgcgagttctttagtgtggtctctttttggacgccttgggtgcgttcggagtacgcgctccacgtttccaggttaagtcaggttagtgtgaagtttccagccactctcggctctgggaactgaactttcccgggacttgcacttcctcctcggcgctggggttggaaaagaccacgccgcatttgccaccccttcttctagttaaaacttttttggggggggggtgcaggggtgtagattggctacctgatgctcgttcgccccagaggagtgtcaggaaggagctttgtctgggggcggggaggggcacagaaggccacccctgcggggtccaggtctagtcttcccacaacctgggctcctccgcgcgggccaagctgagcgcgcgggcaccgggtcctcctcgcgcgcagctgcagcggacgccgccgcgccccagctgcccccgggttgccagcgctgggtgagggcacctctccccgagccgctcggcggctttctgcagccctagctgcctcgcccccagtatgtgacgtgggtgacaatggcccaggttagagcaagcccctcgtcggcgcgtcctgggtggtcggacccgggcaaacacaaatacaaaccgattgctaagctgcggacaatgagcgaaatgtagacaaatgtcccgctcccgttggaagcctttgtcccggctcg

SEQ ID NO: 5503 - DNA, 810 bp, Homo sapiens
  source 1..810: mol_type = unassigned DNA
gcgcacgggtcggggagggggctaccggacctggatcccgggacaccccgggggtctggggggcgggccgcgcgcttacctgcgtcctcgtcgtcgaaggagttcatgcacgggaagtagatggcgagcgcctcgaaggaggcggacagactgaggcggctctgcgagcgctccatgcccgcgccggcgccgggcgcctcggccgcggcggcggcggcggcggcgggcggcttgggcagcttggccgccccattcttgacgcggagtacggcgcgcggcgtggtggcggcggcccggggccgggccgaggctccgctgcggggctggcgggcgcggcggggccggcgggcgggccaggagctggcggcgcgcggagcccgaggcgcgctgtgctgctggcggcggcggcggcggcggcggtggcggcggcggtggcggcgcagcgcgctctggtccgcggcgccccccgccggcagcgcgaggcgggcttggagcggcgccgcagccaatccgtgccgccgggggagggggcgccgctgcggggcgtgggagcccggagggcgcgggctgcggcctcttctagcagcccccgggcccggcaggtgcgcgcggggaggcaggcgccgggcgaggttgtctgggccctggtccgagggctgttcccgaccccgcctcggcccccaccctcagccggccgacttgcggagaggccggcgtccagtccctcacccagacaggcctctcccagagacactggcgcgctcggaggggatgcgctcaaagggtcccgcccaggcgggtcggcactcg

SEQ ID NO: 5504 - DNA, 1142 bp, Homo sapiens
  source 1..1142: mol_type = unassigned DNA
tcgggggagaaacctcggcccacagccgggatgcgcccccgccggggtcaccgcggcggcgaacgtcccggacttcgcatcccggtgaccccttgggatgaaccgaagccggacccgcaccttggccgtaacaagcgcgctccacgccgccacgcaccagcggtgactcccgagtcctctgtcgccctggcctccccgcaggcgggtttcgaggcccccgcagggagttcagggccacggccacgtgcagccgcccccgagcccgagtttgcaggctcggggtccggttcgcgctttggtggcgcccggcgaggctgcagcgcgcaaagttcccacctcaagttcccgtcgcggcgtccccgcctcggagttggcccggccgcggcttccgttccccccggctgcccacgggtccggggcgaggacgcgagaggggcctggaagtcgcccggggagcccgctctgcctcccggagccgccgccaaacttcggtcccggggcccggctcagctcccgccctcggagccacggccgccccgtctctgcctcccggtccccgccgggctccgagtgcgccgggagcgcggcgcagcagccgccgagggagggagcgaggcaggaggcgggacggagggaggggactgagcgcggggcggggagaaggggcgggcagccgaaagcgcagcgcctggcctcgcctcgcttcgggacagtggcagcggcgccaccgtcacggggcgtccaggcgcccaatcgggaccccgcaccttggatccgggggccctggcgcgcctgctggattgcgctcctcgcggccagttcctgagcccgcgtccgggactgctcgcgctacgccctccctcccgttgccttcttccccgtctgctctcccaggagcgaccaccctgcggccccttcgcctgcacgcgacagccttcaaggtccccgcgctccgctgccctggagcttcacgcaccaggcggcgcggcagcctcctagggtcgcgcgccctgtcagctttccccgcggtgcaagtgctccggtggtcccgggtccgcgcccctagcagcaccgccccagggtctacatgtgctagatattaaaaccccactctccgctgccccggggccgcgctccacgcg

SEQ ID NO: 5505 - DNA, 2885 bp, Homo sapiens
  source 1..2885: mol_type = unassigned DNA
acgctgtagacaggcgcgttgcagggcggcggccctctccccttggcattaccgacagccgaggaaattgggttaataaagccggatactgcggcggggccgcggggcgcaaaccggcgcggacagatgggtccccgggggcaccctgcccggctccctggatcccggatggtggcagagctgggagctgcgcaggacgggcactgcgcagcgcatctccgttcacacccggcggggcacggggcccgcagcagcttactcacccgtagcccggcctcctccctcggaagggagaggggatcggtggggagggggtttgctggacaccagggctagacggggccctcccctgaccgtcagggttaagtagggcgcgggctgtgaggaccctcctccacgcagccccccgaggcagagggcccgcaaagcggtctccatccaactccaccccgcggacgtcccaggcagcggatggcggcgggggggggaggccaggggacatttaggggacaaattcctcagacttcgaggcagccggcgacggcgtccaattcccaaataaatagaacaaactcctacttggaaaaggccttccccggggtcttcctgcgcccgcggtccagctcctctgcagacggccatcgtgggctctccgcagggctgcggagtctcggagtcaccgaggtgggaggtgccggccacgcgcgtcctcaggaacagagcactgccctgcagtttagcacgaagggccggctggagcgggagcgcgaggcccactgcaagaggatcaggagccagtaagtccggcttttcttcgtctccacctttcgtgcgcccggggccaggaccgcctgtccggaatctgaccagtgcccgtcctcgccgtggccctgggaccccgcggtggtcttcttttggggacgaacggcagtgcccgaaggatgctctacccacccccgttcctagacttgctgggtcccgacaatacccagtgggtgccgcgagttcccgggcgcagagtccagcgtccggctctcgagctcaatcccgcgccccgacggccttggcgcttcccgctgcgctaaactgtccaccgcgcacaggctggaagcgaagtcgggccccctcctcctggtctgcagggtccctccaggcctttcctgtccgggcagagagacagtcacaggggcgatcggaggacgcgtgcgggagggccgggggcccgcgcggtcacggcttctcgtgacagtgtttgcaaagcgcggagggcgtcccggagaaggcggcgcacttgtcagggcagggccccagggcggcgcctgcggagaaggggcacacagtggcctggccgaagggcgtcaagggcgcggcgtttacgggcgcggccaggccctggccctggttgaggaaggccaccaggcgccgcatctcgtccagggcctgcgcctgcatgaggatatagttcttggcgagcagcagcgtggcgatcttggagagcttgcgcaccgacgggctgtgcgcgtaggggatgacggctcgcagcccgtccagcgcgtcgtttaggtcgtgcatgcgccgccgctcgcgcgcgttgatgctgagccgcagagaccgctgctctcgcggccgccgccgcccgtccgccgcgctccctggcccgcgccgccgccgccgctgctcgaaggcgtcgtcctcgtccccgctctgttcgccgctgctctccgccgcctgagctggggcgcgaggtgcaggcgccgcggggaggtcgccgcccgggcccggagtgccgtagccgcgggccgcttcgggttctcgcgccgccccgtaggcgagacccgcagccgccgccgcgtagccgtggcttagtgccaggtacgcgtcccccgacagcgacttgagctcggccatggccgcgccgcctgggctcgggggctcgccgggtgggcggatgctcatgtgggtgagcagcccccgaggccggcccgagcccgccgctgccgctgccgctgcgatgaggctcccggctctgcgcgtcggtctggcttgcctgcgggtcccagagcctcggcgcccgctgcctcctccgcctcttccttctctcccacctcctctccctcccagccgcgacgcgcagggggcgggctctacctccccctcgcccccgcttcggttttaagccgcggaggcgcccggtgggacctcgctgctgtccaatcaggggggaccgggtgagctcctcttcctggagccgggctccaccagcgccgcaggctcacaggccgggggtgggggctctggaccgaggggcggcgcggggcggcgcggggcggcgcgcgcggtcctggagcgctagtacttgcttctcgactccccggccgccgcctccggccgccccggggattccgccaccaaacgcacgcgtcccaggtgggcacccgcctcggtccgtctttgagtctgaccctagcgcaagagtccctggcgacacgcaggggccagagcgggggggcgcgccgcaatagcagcagcgccagcgccaacaccctgtcccgctgaggggccgcttcgggtcggggtcagggtcgtgggcgctctggtgcagccgcggcgcagcgtgtacccggagcccgcacactccctgctcggggcgccctgtggccaggcttgaggggcagagtgagagggagtttctagaacctgttgaaaaacgccacgagcgttgcaggccggggagggcgggaaggtggagggcagcgcggcctggggctccccgggggtgggaggggagctctgtgagctgcaggaccgcctcttccctgccagccgcttcctgggcatctatcagcgaaacgcgtgaggcttggtgggctttcccggagcctccg

SEQ ID NO: 5506 - DNA, 1460 bp, Homo sapiens
  source 1..1460: mol_type = unassigned DNA
acgcgtatgagagagcagagcggcagcgacgcggtcggatcggtcgcgggggctgcgggaggaagcgctgcagggacccgggcggcgccggcggcctagccggagatgcacgcgctgtaatagaccgcgctgctggcgtccgacagcgcggagatcaggctgctctcctctgggcaggacatggcgcgcgggcccagtttggccagtgccacgtggtacgggagcccgggggcgtcgggccgagtccggctgcagttgaggtactggtcgaactcggtgaggtccacgtcggcccacagatcggcggcgggccccagcggctcggcgctctccagcggcggggcctcgggcggcggcgacagcgggccggggtacgggccgggcgtgcccagggtgccgtagtacaggccagcgagcggcgccgcggggggcgcggtcctgagcgcctccgccaggggagccccgtagcaaccgccggggtcccgcgacaactcggtgggcgcgtagggcgcgcggaagggccgcagcgcgcagtcctcgggcgccgcgggcggtgggaagaaggcagcctcgccgggctccaggccgtccagaggcgagcgctcgggcgtgggcagccccaggccgtcgaactcggcgcccagcgggggcagctcgcggaaggcgcgagccgagccagacgccgcggggaaaggctcgggcggtggctgcgggggcgctaatcccgggagcaggaggccgggctccagccgccgggccttgcgcgcctgcttcttgcggcgcggccggtacttgtagttggggtggtcgcgcaagtgctgcacgcgcagccgttcggcttcctccacgaagggccgcttctccgccgcgttcagctccttccacgctttgcctgcgggccgtgggcgccagtgagtggaacgccgtcgggcgggtgggcgccgagccctccgtgcgcccgggacgccccgcgagggtttggcgcagcccccgcaccccgcggcccgggacccctgccccccccgccccaccccggcccgagccccccccgccctctcccccttctctgccgccctcccgccgctcacccagcatcttgctgagcaccgcgttgtgcaggtccgggttctgctgagccagccgcttgcgctcgtcctttgcccacaccatgaaggcgttcatgggccgccggatgcgcgactcgtctgccgcctggcgttccccgcggccggccgggctgaggccatagcgccccggctcggggctgcgcgggggactgcgctgcgggctgggcggcgaggcgggcgcggcgggcgcggcgagggcggcggggccggcggcgaggccgcgcgtgtcagcggcggccccgtgtcccggggcccatgcacagtcgcggcgggcgggcgggtcgtcctgtgcgccgtagccgggcggcgatctctgcattccagctgggcgcg

SEQ ID NO: 5507 - DNA, 1560 bp, Homo sapiens
  source 1..1560: mol_type = unassigned DNA
acgccttgcagtgccgggtcctgcggcgaccactgagccccttcgtcctcgccctcagtcccttcgtcctcgtcttcggtctccgctttcccagtcggccggggctcgtcgtccacgaccccgcacgtgccgccgacgtcgccctgccgattccgccgcaggaggtggaactgtagtggtgccggcggcttctcccctggggcggcggtggcgaggcgctcgctggcggcgggcagcggctggatgaaatacgcctcccccagcaggtagaaggcgccgcgcacgccctcgcagaggctgagggcggcagccgagctgggatcgccattcacggtgccggagtagaagcagtgcgccaggtcggtttccggaagcggcgtctcggacccggatttgcgccccacgttctggagcgtgaagccgggcgccaaaaagctgctgtcgggccgcagctccagatccagctgctggtcaaaggcgtgcaggcggaggcgcgtggtcccgtgtcccggggcgcgctccagctccggcaccactagctcctcgtcctcctcggaggggcgcccgagtgcgtccgacacggccagtagcgccgcggcgagcagcagcagcgtgggtactggcccaaagctccgagaccccggagcccgctccgcgttccccatgtcgctgcccagcttgcgccttccgaacccctcgggcacagctcgctgcattggagccccaggagacaccgctcgtagcagcgcacggagcgagggacctttagttcgggtcgggagagcaaagcctcgttggcctgctctggattgttaaaattaacaatttctattattcgttggaagggcgcgcagagccggctacagccgaagctcccggagtcactaaaaggaggcgctgcagttctgccggcgcgcgggaagtttttcttccagcgcaaagttggagacactgagaggcaggcgcaggcagagtggctctgctgggacaagaagcgctctggggcgcctccggggctgaggcaacgcggagattggtgcctggcgcccctcttcggcctccgccttggctgcgatgttgctcactctgctcagggctctcccctctccgtccggtagcgcaccctggctttgcaatagcccctggctcggagccgctttccagcgagtgcaagaaccgggcagccgagcggtccttttatagtggaccagtgaaacccccacccccaccccactcctcccctttggcccttttccatcccaaagacgccgcccccggctccgttggtgctaaaccgcgctccgcgctgcgggctcgggagggggagggggcagcctccgcgctggctccacgccactgctcgtcaatctaggggcggaaggggcgctgtgaccagcactttgtactgctggggccgctccagggagaagactctcccttccaccgcttttctccctcgccggtttcctggaccacccttcctccccaccgcccggttgcggtaactcagttaccgcgctgggctgcggttcccaggagggagggttcggttggagaacg

SEQ ID NO: 5508 - DNA, 5118 bp, Homo sapiens
  source 1..5118: mol_type = unassigned DNA
ccggtgccgggagccttgcctcccgccgccacccctggtcagctctgcgcaagaacgtcgttctgtttggcagccaggccgagacgcagcctgaatgtgagcaggaactcggagaagggaagggagagaatcagaaagaaggcccgggagggacccgggaagcagtgggaggtctgcgccctggagccccgcgagagcccgccggtttggcacgggctcctcccgggccgcccggcggtccaacaaaggccggccccgacacgcacccggtcttttgtgggagagaaacacaaagaagagggaaaaacacggaggaggccaacagcaccaggacgcgggggccaaccaggaactcccggagccggggcccattagcctctgcaaatgagcactccattccccaggaaggggccccagctgcgcgcgctggtgggaaccgcagtgcctgggacccgcccaggtcgcccaccccgggcgccgggcgcaggacccggacaagtcctggggacgcctccaggacgcaccagggcaagcttgggcaccgggatctaatttctagttattcctgggacggggtggggaggcataggagacacaccgagaggtactcagcatccgattggcaccagggccaagggagcccaggggcgacacagacctccccgacctcccaagctactccggcgacgggaggatgttgagggaagcctgccaggtgaagaaggggccagcagcagcacagagcttccgactttgccttccaggctctagactcgcgccatgccaagacgggcccctcgactttcacccctgactcccaactccagccactggaccgagcgcgcaaagaacctgagaccgcttgctctcaccgccgcaagtcggtcgcaggacagacaccagtgggcagcaacaaaaaaagaaaccgggttccgggacacgtgccggcggctggactaacctcagcggctgcaaccaaggagcgcgcacgttgcgcctgctggtgtttattagctacactggcaggcgcacaactccgcgccccgactggtggccccacagcgcgcaccacacatggcctcgctgctgttggcggggtaggcccgaaggaggcatctacaaatgcccgagccctttctgatccccacccccccgctccctgcgtcgtccgagtgacagattctactaattgaacggttatgggtcatccttgtaaccgttggacgacataacaccacgcttcagttcttcatgttttaaatacatatttaacggatggctgcagagccagctgggaaacacgcggattgaaaaataatgctccagaaggcacgagactggggcgaaggcgagagcgggctgggcttctagcggagaccgcagagggagacatatctcagaactaggggcaataacgtgggtttctctttgtatttgtttattttgtaactttgctacttgaagaccaattatttactatgctaatttgtttgcttgtttttaaaaccgtacttgcacagtaaaagttccccaacaacggaagtaacccgacgttcctcacactccctaggagactgtgtgcgtgtgtgcccgcgcgtgcgctcacagtgtcaagtgctagcatccgagatctgcagaaacaaatgtctgaattcgaaatgtatgggtgtgagaaattcagctcggggaagagattagggactgggggagacaggtggctgcctgtactataaggaaccgccaacgccagcatctgtagtccaagcagggctgctctgtaaaggcttagcaattttttctgtaggcttgctgcacacggtctctggcttttcccatctgtaaaatgggtgaatgcatccgtacctcagctacctccgtgaggtgcttctccagttcgggcttaattcctcatcgtcaagagttttcaggtttcagagccagcctgcaatcggtaaaacatgtcccaacgcggtcgcgagtggttccatctcgctgtctggcccacagcgtggagaagccttgcccaggcctgaaacttctctttgcagttccagaaagcaggcgactgggacggaaggctctttgctaaccttttacagcggagccctgcttggactacagatgccagcgttgcccctgccccaaggcgtgtggtgatcacaaagacgacactgaaaatacttactatcatccggctcccctgctaataaatggaggggtgtttaactacaggcacgaccctgcccttgtgctagcgcggttaccgtgcggaaataactcgtccctgtacccacaccatcctcaacctaaaggagagttgtgaattctttcaaaacactcttctggagtccgtcccctccctccttgcccgccctctacccctcaagtccctgcccccagctgggggcgctaccggctgccgtcggagctgcagccacggccatctcctagacgcgcgagtagagcaccaagatagtggggactttgtgcctgggcatcgtttacatttggggcgccaaatgcccacgtgttgatgaaaccagtgagatgggaacaggcggcgggaaaccagacagaggaagagctagggaggagaccccagccccggatcctgggtcgccagggttttccgcgcgcatcccaaaaggtgcggctgcgtggggcatcaggttagtttgttagactctgcagagtctccaaaccatcccatcccccaacctgactctgtggtggccgtattttttacagaaatttgaccacgttccctttctcccttggtcccaagcgcgctcagccctccctccatcccccttgagccgcccttctcctccccctcgcctcctcgggtccctcctccagtccctccccaagaatctcccggccacgggcgcccattggttgtgcgcagggaggaggcgtgtgcccggcctggcgagtttcattgagcggaattagcccggatgacatcagcttcccagccccccggcgggcccagctcattggcgaggcagcccctccaggacacgcacattgttccccgcccccgcccccgccaccgctgccgccgtcgccgctgccaccgggctataaaaaccggccgagcccctaaaggtgcggatgcttattatagatcgacgcgacaccagcgcccggtgccaggttctcccctgaggcttttcggagcgagctcctcaaatcgcatccagagtaagtgtccccgccccacagcagccgcagcctagatcccagggacagactctcctcaactcggctgtgacccagaatgctccgatacagggggtctggatccctactctgcgggccatttctccagagcgactttgctcttctgtcctccccacactcaccgctgcatctccctcaccaaaagcgagaagtcggagcgacaacagctctttctgcccaagccccagtcagctggtgagctccccgtggtctccagatgcagcacatggactctgggccccgcgccggctctgggtgcatgtgcgtgtgcgtgtgtttgctgcgtggtgtcgatggagataaggtggatccgtttgaggaaccaaatcattagttctctatctagatctccattctccccaaagaaaggccctcacttcccactcgtttattccagcccgggggctcagttttcccacacctaactgaaagcccgaagcctctagaatgccacccgcaccccgagggtcaccaacgctccctgaaataacctgttgcatgagagcagaggggagatagagagagcttaattataggtacccgcgtgcagctaaaaggagggccagagatagtagcgagggggacgaggagccacgggccacctgtgccgggaccccgcgctgtggtactgcggtgcaggcgggagcagcttttctgtctctcactgactcactctctctctctctccctctctctctctctcattctctctcttttctcctcctctcctggaagttttcgggtccgagggaaggaggaccctgcgaaagctgcgacgactatcttcccctggggccatggactcggacgccagcctggtgtccagccgcccgtcgtcgccagagcccgatgacctttttctgccggcccggagtaagggcagcagcggcagcgccttcactgggggcaccgtgtcctcgtccaccccgagtgactgcccgccggagctgagcgccgagctgcgcggcgctatgggctctgcgggcgcgcatcctggggacaagctaggaggcagtggcttcaagtcatcctcgtccagcacctcgtcgtctacgtcgtcggcggctgcgtcgtccaccaagaaggacaagaagcaaatgacagagccggagctgcagcagctgcgtctcaagatcaacagccgcgagcgcaagcgcatgcacgacctcaacatcgccatggatggcctccgcgaggtcatgccgtacgcacacggcccttcggtgcgcaagctttccaagatcgccacgctgctgctggcgcgcaactacatcctcatgctcaccaactcgctggaggagatgaagcgactggtgagcgagatctacgggggccaccacgctggcttccacccgtcggcctgcggcggcctggcgcactccgcgcccctgcccgccgccaccgcgcacccggcagcagcagcgcacgccgcacatcaccccgcggtgcaccaccccatcctgccgcccgccgccgcagcggctgctgccgccgctgcagccgcggctgtgtccagcgcctctctgcccggatccgggctgccgtcggtcggctccatccgtccaccgcacggcctactcaagtctccgtctgctgccgcggccgccccgctggggggcgggggcggcggcagtggggcgagcgggggcttccagcactggggcggcatgccctgcccctgcagcatgtgccaggtgccgccgccgcaccaccacgtgtcggctatgggcgccggcagcctgccgcgcctcacctccgacgccaagtgagccgactggcgccggcgcgttctggcgacaggggagccaggggccgcggggaagcgaggactggcctgcgctgggctcgggagctctgtcgcgaggaggggcg

SEQ ID NO: 5509 - DNA, 1423 bp, Homo sapiens
  source 1..1423: mol_type = unassigned DNA
ccgcacccgactgcacgcgcctccctgggaccccgcactggcgagccgtccctcccggcgctggacgccccacctgtcccggcgccgtcggaagagccctgcagagtgagcccctagggccaccccgctgccttcctccccgtccccgcagccgctgtagccagcgtgggagccgggcaggtcgcgtggggcgctggacttaccgagaggttagcgccgccgtcgggggagggcgtgtcccgcacgtgtgtgtccgcgcgtgtccgcgcccgcgtgtgccagcgcgcgtgccttggccgtgcgcgccgagccgggtcgcactaactccctcggcgccgacgggctcagcccatggtgtgggcgccgggttcagggaggctccggctcccgccaatcgcggagcagggcggccgccccgacgcgcgacttgcgaacccggagtgcgcgccgggggcggggcagggacgcgtgggcgggaatgcacgcgcgtggccaggtgcgcgtgggtgcgagcgcgcgggagtcttcgagtgcgcgcgtgtccgtgtgcgcgtgggtgtgggtgtgctcgcgtgtccgtgcgcgcgccctcggggccaagagcgcgggccgcgcgggcaggtttggacactacgcgccctgctcgggtttaggacgcggctggcggctccgggaggaagaggaggaggaagaggaggaggcggaggaggaggaagaggaggagggaggcggaggagcagaggctgggacggccggaggagagagtccggccccagcaggaaaggaacccagcacgcgactactggaggggcgaggagcaagggaaggaccagaggggaggagagggggtcaggggagggaaagtgtgggagggggagccgcgggggtgcgcgctcctcctaactcggggtcgcttttagcgagaagtgatatttttccagcctcattgaaaaccgttgcaaacattgaaaatagtaaaagtgaaaacggttgcgacactaagacgtttataaaatgaccgcggactgccctcgatgctgatgagaactgggacgacgtcgcgcagagcgtccggagggagaggcgcggtgcccgggacctcggtcgtggggaggagccggatacagccgccgggacgcggggatgccgagggcaccgcggcctggtctgaccgacgcacgcggtgacagccgcccttgggagacgacggcgtctgcaaccagcagcctccaaagggtgcagccaggaggctcagcttgtccgcctccggggctcggggctaagccccttccagaagttttcgtttctacgcgaattccgaccgcaaaatccagcttacctgagcgccgctcctcttctctcatgtccctcgggggccgtcacgaccgtcccggagcgatctctaggaacctgtcccgcagcg

SEQ ID NO: 5510 - DNA, 1384 bp, Homo sapiens
  source 1..1384: mol_type = unassigned DNA
gcgccgcgcacagaaaaggaaacttcattccgtctgttaagggcagggccgggctagtggcaggagaaggtcagctgcgggcgcaggcaggagcggatccaggagccgcgtcggggcgcagagccggacgttccgaggagcctgcgcgccgcgctacccggcggaagccgcggtccatgcggggctccccaggcttatccaacgcctcgcaggcgtggctggcaggaggggcccggccgtgcccagcgccctcagacgtagttcttcttgtcgtagtcgccggtggccgtgggccgccgcggcgctgagtacttcacggggaagctgaggtcgggacggccggtgcagacccaggcgccgcagcacaagaggcagccgcctaccatgagcagcgcggtggccgcccagccgatgtacagcgctgcgcccagctcgtacttctgcgacacgggcacagacgggtcgtaaaactcgcggacgacaatgttggcgaaccagcagagtggcacgagcgccagcagcccgcaaaacaggtagagcacgcctcccgtgagggccacacgcgccttggccgggcccggggccacgcaggtggtgcactgcgcgcccgccagggtcacgaagagcgcaacgaacgccagcagcacggcgctcacggtgagcgcccgcgccgcctgcacctcggtgctcagagccagcaccgagtcgtacactttgcactgcatgtgcccggtgctctgcaccacgcacgacatccacagccccttccaggtggtctgcgccgtcacgatgttgtggtccaggaaggcggtcacctgccacatgggcagcccgcacgccaggatcagacccccccagcccaccaggcacagcaccaggcccaggatctccaacgctgcggaccccatggctagaggcgagacgcgcacccgaaggcccgcagaacccccaaggccgtgctgcgcggcgccctgggcgggccctggtgcctttgcgcccgcgctcccggctcttggccccagtccgtttgccccgcgggtctgtcgcacctcctgggtctgccagctcctgccggggggtaccctctttgaaggttcgggggcggattctgtcccccgggcccggccccccggcccgaagcagccaatccgtgcgcgggtcatcgtgccgcagccaatcacagagcctctggcagctgaagttagggaaacaacggctcttgaggggtagctgagggcgcgggaccgctccccgcccggcagccgcccccagccccacccgccgttgtcctagtcgcggccgagcgcattctgggctggcctagggcgcgcttcttgggccgcctccctgcgcgtcccggccccgtcacttcagaaggcgctcg

SEQ ID NO: 5511 - DNA, 1361 bp, Homo sapiens
  source 1..1361: mol_type = unassigned DNA
gcgcccccgacccccgccgctgggatttcccgccgcagctcctgctccagtctgtgctgcgggtggggtcgggttgagcagcccggcgccccccaccgcgccccccaccgcaccgccctcgatctaaccccgcccccgggcgctcattggcctgcagcaccccctccccagcctgtgaagtgagcagggggaggcggtggtcggtcgcctccctccagcgcccagcctggcttcgcggcggaggcggcgcctctcccgcaggacggagccaagctggactgccgcgccgcgcggggcgggcaaagggggcgctgcgctcggccccgggcagggagtgacggcggcggcggcggctccgggcgagcgtggtccccgcgtgcgcacacgcacacgccgccgcgcagggacacacggaccccggccgccagccggccacacaggcgcggagacccggctcggcgcgcgctcctcggcgcacacgctccccatccccgcgccgcgcgggccgcggacttgcaggctgcgcgtcctttgcggagtctgccccggccccacggacaggccccgcagtgagcaggtaagggtcgccccgccgcggctgcccctccacgcctcggccgtcttctccccctccagaaccttcgcccagccgggacctcggatcccctcctctggcttggcggtctccgccagccgcgacctccaccgacggagagcgggcgagggccggcgccaggcaagcctcccagatctgaaatgaagccccctcccgccgctgcgcccttcctgcgcgtcaggctgacaccccccaacccaagtgtctggcgctgcgctcggggcggccgatcgccgcagactgccggggtgggggtcgacctagctatctcacgcccctcctgatgcggagaagggagaccaggggggcaggcaagccatgcggccggagggacccggagggacatgcctccctacccttaggtggacggacgcacctacgcggatcgggaaggcagggctggagggtcccccggggctaggtaccgcaatccgcacggggtttgaggggtgggcaagcaatgtgctaggtgggggttggggtaggggccagtgtagaatgcccctctgtggtgacacatccgggattgttcaaaagagtgtcgtcttcgtttcccgtggcgcggaggggctggggttggggatgccagggcttcagtggtccccagaagaaacgccctgcggggtctgtggggaaacgcaccggccttcccaggttgaagtgggcccgctgagacccctgcctgccgctttagaggcagaagctcctgcggcggctgcggggggcggaggccacatcctcggcg

SEQ ID NO: 5512 - DNA, 1175 bp, Homo sapiens
  source 1..1175: mol_type = unassigned DNA
acgctgtctggtcggagcgctccataactcggccaatggggagggagtcgcccgctaagcgcctgtcaggcctcgaccaacgggatgggcccttcccgccagagcacactgctccaatccaggagcggctgcaggacctgagccaatgagacgcaacctccgctagccgcgcggtgcccggccaataggaggccgcccgtgcccggtagcgtgggaggtgtggggtggcgggcggcgctgcgaagctgagggagctgcgcgcggacgagccacagcctgctacagggtgggtgcgcccgccctgcccagctcgcccgccgcctcccggctcttcttgcgcggcggcttctggatgggggtcttcttccggggggtctcaggcgcgggcaagtcggtcgccgccttctcaggccccggggtttcggtcgctgggggcgcgcgggcgggcgaggctggcggcacggagcgcttggctttctgtgggggcgccggcttttccctggggccctgcgcgcccagggccacctcggcgcggcccaggctgcgagtcttgccgcgcacgtcagcggccaacatggaggcagcctcggcgcgcttcgcgggggaccgccggcgtccgtgggctccaagaggccggggcgcggcgcgcgctcgggccctgggcggcgagggcgcagcgagggctgtcgcctcctcgggcagccccggggggcgcggcgttgggtcgcgggtccgggggctgccgtgttcgaccgtatgcgccgatttgtcgctgggcgtccgtttcctcttgctggggctgggcgcggcctcggagcctggcggcggtggtgagggcgcacggccagctgcagcggcgctgtgcttgccgtggatccaggacaccttaggcttggtggcggggtcaggtggcggcggtttcctgcgctcgggcgatggcgacagcgacaggcccccaatctcgccccgggcccgggccggccgggcctcgcgtcgggccacgcgcgcgtacagagcccctccgggcccctccacgctggacgccgaccgctcgctgtcggaggacgcggggaggggtatcgcctcctcggcggaggctggcgtggtcaagggcacaggggacggcgccggcgcctcggcagggacagtggggacttcggggtcccggctctccg

SEQ ID NO: 5513 - DNA, 1087 bp, Homo sapiens
  source 1..1087: mol_type = unassigned DNA
tcggcacccgcgtccctgtgcttctggtggttccggcgcttcctcggagcgcgcggcatgtctgctcctacacgtccagcacctctgtccccagagcaaacccacctcccagggcacacgcagaggggcagtcaggcaccgcctccaccctgccccacccaggccgcgcgcaccccggaaacctggactccgcgaccagctccctcctgttcttttccgaggaccccagcggcagtgtgtcctggacccacctgtagcctccaagctcccccacctctgcgtccttcctaggcgcttctgagcctgcagagcctacgacccccaacaggctgctccgaagtgcctctccctacatcgctccaggaatgactcccctacacccgttccccgcaaaaaaaagttggcccaagatccaggcgtcccaaggatcagcccaggtccccatccgacgcgggccagggggtgctgctctggcagctccggagccccggcaaagagcaacctgcagggaggcgccacgcgcggttcccactacccgccagagacccggtccatggggccaaacggaggggcctgtgccggtcgacaccccaagccctgtcgcgccccccccgccgcctaccgtatgggaccggcggaggagaaggcgcggtcgcgggctccctgaggcagcgtgttccgtcccgggaggaaagtttgtgccatacagaggaggcggcgcggggaggacttgggcgccggtgggtggaggcgtgggcggtggcgccgcgtggtcgtgtgtctgtccctccggcgatcggtgcgtctgtccctcgccggagcccgcggccgccgcgctctcgctcgctgcgcccagcgcccggcgcgctccggctccagccccgacgcgcccccgccgccgccgccgcgcgtccgccggctacacttcctcttcctctgaactcatgtgcaaaatatgctacgctgcatcttcagggaaagcctcgcggcccctgacagcagccgctggagcggtgggcccgcccagctctccccgcgccccctcggagttccgcccggtcacctccacgcggccgagctgcaagcg

SEQ ID NO: 5514 - DNA, 693 bp, Homo sapiens
  source 1..693: mol_type = unassigned DNA
ccggcagccaacgctcagcccccgcctcctctctccattccggaccccgcaaccgcgaggcgagagagcagcgccggcgaggcactggctgggctctgactgtcacgttaattccctgctgctttttctagtccccagccgcctcgcccctcctccctcattcccagcctgggtttggaggcgatttccctctattgactgagccgactgcatctctgggcaagcggcgctttgcctctctcctgtctttgtctgctcttcctgcaaggctacggcgcctggagcagggtctgcagcggccgccgcagcaacgcgagccaagtcgtgccccgcacggccgcccggggccgcaccctcgctcggtggcggcgcccgaagacgccagccgcgccacgcactgcctgcgtcccgcgccccagccgccgcgcaccaacgccgccgccttcgccgggagccaagcccgccgggccggcccggtcccaggtgggcagctcggcttgcagctggttggaggtggcggccgctgcagccctggcagcgggcacacccctaagcatacgcacccaacgcctcctccctgagccacgaggatggagcagccaccccggcccgggactggcgcaaggtaaggtgcagccgcctgttgcttttcgcagagcgcgggatcatccctctgcccgggtacctaggccg

SEQ ID NO: 5515 - DNA, 5065 bp, Homo sapiens; identical to SEQ ID NO: 5483
  source 1..5065: mol_type = unassigned DNA

SEQ ID NO: 5516 - DNA, 307 bp, Homo sapiens
  source 1..307: mol_type = unassigned DNA
gcgcgggggccggaccatgagccgctgagccgggcaaaccccaggccaccgagccagcggaccctcggagcgcagccctgcgccgcggagcaggctccaaccaggcggcgaggcggccacacgcaccgagccagcgacccccgggcgacgcgcggggccagggagcgctacgatggaggcgctaatggcccggggcgcgctcacgggtcccctgagggcgctctgtctcctgggctgcctgctgagccacgccgccgccgcgccgtcgcccatcatcaagttccccggcgatgtcgcccccaaaacg

SEQ ID NO: 5517 - DNA, 1563 bp, Homo sapiens
  source 1..1563: mol_type = unassigned DNA
tcgggctccgaaaacggggggagggggacgacgccccagaggcccctgagcccctggttcttcccgaccctaagggcttttctccctcggttcccaggcggcgacggcgggtagcgcgaagcagcaggcgcaggggcgctgggatggggatgtctctgcaggtctaaggttccccttgggagtctaaacaaagactacggcagcgccgtcccctcccccgggaacccgacgccgcgcggccacagggggcctggaggggcgggcagggcctcgcagcgcacccagcacagtccgcgcggcggagcgggtgagaagtcggcgggggcgcggatcgaccggggtgtcccccaggctccgcgtcgcggtccccgctcgccctcccgcccgcccaccgggcaccccagccgcgcagaaggcggaagccacgcgcgagggaccgcggtccgtccgggactagccccaggcccggcaccgccccgcgggccgagcgcccacacccgccaaacccacgcgggcacgcccccgcggcgcaccgcccccagcccggcctccgcccctgcagccgcgggcacgcggaggggctcctggctgcccgcacctgcacccgcgcgtcggcggcgccgaagccccgctccccgcctgcgcgtctgtctcgtccgcatctccgcggtgagtcggcggcgccctcgcccctgagcccagggccagcttctctcgccgccgcggctgctgcgcgcgtccccgcccagcccagcccagccccgagcacgaccccagccccacgcacgaccctagccccgcgagtcccgcaccgactcgctcccgccccatttcgcctccgcgggggcggcgccccctcctccccgcggctcccgctctccttcctcgccttcccggccgcgctggggacccccagccgccgtccgcgaccccccaccgcgacgcccggaggcggcggggtctctttgttcgggcggcgggcacgggggaccacctcccacggtgtcaccgcacccaccccgcgcccttcctccgcctcctggagttcaccgggaccaggtggcggcgggtgcctttttgggggtgcgcggccatgcaattggtggatttttttaaaccgttttggaggggggagcgcggcgttgggggcgggagagcgctcctggctgtgagctgctcctgccgcttcgctccgcgctctcctgccgctccgctccgggtctcccgcgctcctctccccggctcggccgagcgcgctgccccgacgccgccacccagagccgggccgcgccgggcgccgagatgaaggtgctgggacaccggctggagctgctcacaggtaccgcccgcctgccccgcagccggccgccactttccgagttggagcggactccgggcgcggcggccggggactggggcggctcgggtctgagcaggaaggggtgcggaccccaactaagtcctagttttgtgctacctgtttgtgtgcggagcccagccccgggagaggacttgaggttgtggcgagtccctggcgctggcgtccgggctgcgggagcaccg

SEQ ID NO: 5518 - DNA, 512 bp, Homo sapiens
  source 1..512: mol_type = unassigned DNA
ccggcccaagtcagcgcaccccgccgactccctgcccagtccaaactccgaggctgggcaaggcactggatccacggctggaccgacccggggcagcctctgggtgaacagcagcgtgtccgtcggcagagaaccgagaccagcgagccgaccatgcggctgcacagacttcacgcgcggccgagcgcggtggcctgtgggctcctgctgcttctcctccagggtcactatgaggctcccgcggaggggtgacagggaccgggctcagatctgccaaatgctgcggaggcagaacctgacagtgcgggagggcaggcgcctgggaggtaggagctggtggagatgacagcgtggaactcgtgagccccacgcaacgcctccctgccgcccagggtgggctcctagaagcacagaaatggtcgggctgcgggacaccacagcgaggaaccagcggagtacaggggccccaggagcgccgggacatgccaggccgggtagacagcctcgggtcg

SEQ ID NO: 5519 - DNA, 1070 bp, Homo sapiens
  source 1..1070: mol_type = unassigned DNA
tcgcgagaagcacaaaaggggaggggcgggccgtgtagccaagaggacggccaaacggggaggcctcctctttgtcctcgcagatgctggagcagcgactggcccgggagatccgtgccctggagagaagcaaggagcagctgctctcggagagtgagcctcccgcgccaggtgggcggggggagggggatgtgcccgggcctcggccctgcccctgacgcccgcccaccgacagggaggctggtgcgcgccaagctgcgggaggtggagcggcggctgcactcgccgcctgaggtcgagggcgccatggcggtgaatgacgggtgagaggggaagggaggagtgggcgaggagggcaggggcagggcggaggggaacccgcccaggtcccccgctccgcccccgactgccgcttccccggcctgtgcctccctcggcgtcgtcgggtctccgcgtctcggtggcttcctcctcgtcccctggactctcgctctcttcctcctgtctcctcggccccttctccgcaggctgaaggcggagctggagatattcggggagcaggtccggagcgcccccgaggtcggggccggcgagggagaggtagggagcccgaggaagggaggcggggcgggcagggaccgagtcaggagagagcgggcgggggtcctgggagcggcccccgagagtggggtctgtggggagcagggcggccccggggacagaggaagccgcggtggaggcctagggcagacgcgggcggacgcgaggagcgtaggaacctggtccgcagcctcacccagcccccggcaggccggacctgagctcccccgcgctcgcgacgaggaggatcccgagccgccggtggctgcccctgacgccctctaggccagcaggacccgcccgttcccgaccttccctcgagacccgccaagaaataaaggcgatgatttccgaccatgctcgcgttctccgcggagtctgtgctacaccgtggagcggggcggggcgtgctgggatctcgaggcggggcctctgccggacccctcccaccagtcgagccccgggcgccg

SEQ ID NO: 5520 - DNA, 766 bp, Homo sapiens
  source 1..766: mol_type = unassigned DNA
acgaaccatcatttaatccgctggcgccgctgctgctgtcactggctaaggccgcggcgaccgacgcacagcagaggcagcacagctggagcgcctgcaagagaaaaggtgacatcgcgcgtgaggggcgcggcggggctggcgtcgggcgccccctgccacccgctctcggagctccgctcggcggcacctgccttggccacgcgccccagtcccgccaggcccctcggcgggcccgaacccgcagccgggaaggcacacgcgagcaggagggcgcactccatggtcaggtgcggacgcggcggctgcgggtggccagacgcggcaggcggagcgcacgggcggcgcgcattctttccgcggccccggagctcggcgccccaggtgcggctccaggtgagagccgccgccgttcacatcgcagcgggggcgcgctgggacctcccctcctccggccgcctgcgcgccctcccttctcccggcgcgggcctgccgagctgcagtttgcggcaccccagagggtacggggggctccctgggccgggactggagcgcaaacggttgggagactgtcggtgtctgcccgcccgtctgtgcgtctgtctgtgtcggtgtgagcgtctgaggcgatggggaagacagcgccagctggctcccccagcgcgccggagccgagcgcccgcctctccaccgcgcggtgattggcgaccagcggctcccgggctcgtccgagcccccgggctggtgcaagggcgtgggattcccg

SEQ ID NO: 5521 - DNA, 363 bp, Homo sapiens; identical to SEQ ID NO: 5294
  source 1..363: mol_type = unassigned DNA

SEQ ID NO: 5522 - DNA, 2919 bp, Homo sapiens
  source 1..2919: mol_type = unassigned DNA
ccgagccggacccccgcggagcacttatcagggtggctagctggaatcgcgtgtcagactcacatgaaaaactcgggagaggacgggttgtcgctgctcgagccgttttctcggaagccgctgctcaccaacttctcgtatttctccttgtacgcgtccctctcgcgcaccagcctggagatctcctgcttgaggtggtcgacttgctgcagcagctggttcttctccgactccaggacgtgtctctgctgcaccctcttgaagcggcaggactgggcatagccgcggtttttcagggtccgcctcttctgcttcagccggatcacctcctccttgctgaccccgcgcagctgccggttcagctcgcgcacagacatggtcaccagctgctcgtcggagaagcggtcgtcgaagtgcaggccgccggcggcgtggtgcgggtgcagggcgccccccgcccccgccgcgcccccgccgcctccgccgccgccgccgccgccgccgcccccagcgctggccgggccaccgccgcccgcgcccccagcgccaccggccgaggcggccgcgctgcccgcggcgccgggcgcgccggccgtcgggtggtggtggtggccggcggcgtggtggtggtggtggtggtagtgcgggcccgcgccgctctgcgcggcggccgcggcgatcacggcggacaccacggcggcggcggggcccatctcctcgccgctgccgcccaaggaggcgccggcaccggccccggccgccgcggccagctgctgcgccccgcgcgcgtagccatcgaagccgccctggagctggtggctgttgctgatgagcgcctcgaccgcgtcctcggggctgaagcccagcgcctcggggttcagctgctgcgggtagccggtcatccagtagtagtcttccaggtgcgccttctgctcgctgcccgagcccgggctgggcgccgagaagctgggggaagggggcaccgagctgcacggcgtgctcatgggggtggaggacagcgagcccccggcgatgagacggccgcactggctgatgatgcggtcggtctccaccggttcctttttcacttcaaacttcatcagatcgaagtcattaacatattccatggccaggggactggtgggcaggtcggagttgctcattgccagttctgatgccattctcctgccgccgccgccgccgccgccgccgctccgccagatgggctgcaggagaggggccagcgggctgtgctgggtggccagcgggtgagccagcttgccgggctggggcgcttctagcttgcgcggcggtggctggcccgaaacctccgagcgcgctcacacacacacccccccgccctgcccgcgccccccgcgcccgccctccctcccccctgctcacgccaatgtgctccctcgctcgccccggcccctccttgctcgctcgcctccttgcgcgccgagccggcggcttcaggctcgggaagatcctccgcgagctgcggtggcggcggtggtggctgcggcggcgaagctggaggagcccggcccggtgcgcggcgtcccccgctcgccgctccgctgcgcgctttgcataaggaagggctcgcctcgccggcccgggctgcaggcagggcgcgcgcggcgtccgctcggggctggaggcgcggcgggcgtctgtccgggcggcgcgggccttggcacgggggagttaacacttcatgcttctcgcctcctcttctgcttggctctctttattattttttttctttcctctctctccctcgcgcgctctctacctctgtgcaaagtgcaaggcagaggtgcagcccgactggaggagagggaggggggagtttagttctttcttgcctttttttaaaaaagcaaaatagcgaagtcctggggaaagacgaggcagagagcaaaggggggagggggaggccaagccgacaagcagcccgagctacagctagaagatgaaaaaagattttaaagcctctgatccagcaagaagagtttaaagcaattgctgagttttatagcactcgtgacgtcaggtccaaatgagaaattgactggcactccgggccaatgggaggcggcgagagcggccgcgattagcataatagtatagaaacaaggaaacttttcggagctgtcaatcagggcccaatcagctgactgtcagctgggacgggctggcttaacccttcctgcgccgctgcctacccgggagggaacgaggcccggcgcaaagtttggtgtaagaggggaaggagtttttccagaggggcttcggcaatccgggcggacctgggagggcggtttgcttttctttggagcgcgagacaggcctcccatccggagccccagctcgctgggggctcactcggctgggattggcctgattcccctcccctgcctgccctccacccccaggattgtgaattcgcctcccagcttttcctcctcgcaccaactctggtacccaggtgtctgccggggaccttccttccctgagcctggccgtgcccggcgctcaaacttggccccaactctttgtccgtctctcgggcgcccgtgcggggaagggaccgggaagggagggatgcagtggggtgtccggatcggggctgcgggctgggcgccgcccggccatgcgcctgcccagaaggctgggcatccgtggagagggaaagcccattttatccctctctttacaacgaggtaaaataagttgtttagaggccattcttcacggagaccggctgcccgctggcgtcgcgtgcccttggacagagcgagcgcctatgcgagataactccggggaagctcaaagtcaggtcagccgggctcagccttccggctcctgactggccggagtttggcctttgagactcatattgcgcgctcg

SEQ ID NO: 5523 - DNA, 2267 bp, Homo sapiens
  source 1..2267: mol_type = unassigned DNA
ccgaaaaaccggcccccgccccttatccccggccgacccgtccgccgaggtggctgccctgggaacctcctgttcctcgtccaggagaggaaacgcacacccgggccggacgcacagaagccgcaccctggctggggccacaagcctgacagctaccgacaagcccccacccacaggagcacgcgacgtgctctcttttcaagggaaaggtttttcttcctgggccctggaatgggcctgaagtcagccggcctcagcccacagggtgaatgaggggtgggcacagcccggccgcggccccagcacacacgggcggacgcaggggcgggggagcgccagccccgcagtgtgttcggagcccagcggctctgagtcgccgccaccagcctggccgccttctgctccacgtaagtgaagtcagccgtctagggctgcgtttccagccatctgtccctccacagaggctcacacctccctccccgctgttcccacagcctggctcggggcctgcccaacacagatggacgcttcccaaaggctgtgcgcgccatcgctgccacccggctgtgccgaggcccgcggccgtcaggaccccagggaccgcatgccaggcagggtccaggacccccagcgcggaccacctttagcctgcggggcagcgccggggacccgggcaggagggagaggagcaggagggagctctggacccccctccccagaccggccgccgccacctctgcctctcccagggccgccctcggcctccccactcccgggtctccgtcacgcgggccgcggggcctttgttaggaaaaccgggcggccccaggggagcccgcgagactcccagcgcccgggcgcgtcgttcccctcgaagtttcgccgcagcccccgcaggtcaggctctgctcacggggggctgcgctcagcccggatgggtgggcgctgggcgggttggctccaccctgccgtgggcaccaactttgaaaacggcccgtgcgctcggcgcggctgcggcgcagatccgggaacggcagccgcgggcggagtcggggtagagcggcggcggcgcgcggggcggacacggcacttacggtcggggggtccgggggatccggcgggcggcggacggcgcacactcgcgactcggtccgggagtcgctgctccttccagcttggtccccgcctccacgactcaggggcggctgcgcgctgtcttctggcgccgcaccgggctcaggcgcgcggcggggctggggcgcgcggggcggccgcctgggccatgccggggactcggctccggccaccccgcgcgggaacaaagcgcgcaccccgcccggggcggtctccggcctccgcggcccgcgccgggtccagccgccgcgcctgtggctccaacgccgcgcgctcgcccgagagtctcacggggccccgcggcccccgccccgcgcgctccgcctccgcctcctgccccccgccgccgccgctgcgccacctgcctcccgcccggcgcccatggcgctcagctccgccccggggcgccggcctggagaggggctccccgccgccgagagccgcccccaacgcctccgccaccggggcggcgccctaagaactggccgtgggggccggggctgtgcggagcgccgggagcagggagaggggagaggggcgcggggagggggcgacgggcgcgccgcctcctgcggggggcggcgcggggaggcgcaggcgggggcgagcgaagaggttgaggggtgcgggcgccgtggagggggcgcggctctggggggcggcccccgcctgcgcccaccctctccccctccgcaggccgcgcacacccacctcgcagcagtcggcggccgcgggcctcgcagctttagaaccgcggcttctggcggccgcgcgggaggctgaacgggagttggggggtgtggggggggtggggaggtggggagttgggggggaggtcgctccttcggccgccgcccccgccccctgccccgcgctcgcccccagcgcggcgcctggcccggcccggggccacctccgtgcgtggccggcaggggtcgcgctccccccgctcagcctcccgggcgggtccgatgcgaagccctcgcttcccgcgggtcccggggccaggtcatttgcatacactttgcattcatttgcatatcgtgcgtttcatgtccacctgcagaaacgccccgagccgctgctctgccctctccgcactttctctgccggcaggccccctcccccgcccg

SEQ ID NO: 5524 - DNA, 265 bp, Homo sapiens
  source 1..265: mol_type = unassigned DNA
tcgcggctcgcgtgggccccaggcgcgggatggcggcgtccagcagcgcgggtccgcgcagggcgcgcagcgctgggggcaacagcgtggggtccggtcggcagtggggcgcgggctgcgcggtaagcagctcctcggagctcagcaccagccccagcactatgcagggtacccacgaggcggaggccagcaggcgccgggcccggccaaagccgcccgcagctctcagcacccgcgcctcctgctccatcggtcgcaggctgcg

SEQ ID NO: 5525 - DNA, 374 bp, Homo sapiens
  source 1..374: mol_type = unassigned DNA
tcggggagggcagccgcccgccctcctcggcgctgggagctttcggctggtactgcgggaggagctcccgggtgacccgcgggttctgaaaccgccgctcgggagctcggggcctgcgctgcgtctacggggcgagcgagggagaactgacgcctttcgcccggatccttctccccttccgagaaccaggtaggtcgcgtttattttcaagtccgactgttttcgcggtaacatttgtgggaaacatcacggtggatcctgtgggtcgctgagttttctgactcccggtttgtcttattttgctttgtcagtgggctctgcgctcgcgttaacaattcgaatgggcacgtttctgcgtttcagaacgctgttcg

SEQ ID NO: 5526 - DNA, 1133 bp, Homo sapiens
  source 1..1133: mol_type = unassigned DNA
ccggcgcgggccgccctcgccttcagctccaatgctgctgcgccccaggccgccccgctcctggcaggccccagcctctgactcagccccccgcctagcccctgagagcagcctctccgcgggactggcctgtgcgcgcgcgtctgcggcaccgtcggaccaggggccgcccccgagcggggagcccaggaggacggccaggtggcctgaggcagaggcgccagggaggatggagaagggacacccagggcctaggcggggtgggggcagggagggcggcgggacagcaaggaagtgggtgcacctgggtgacccagctgcgcatgagcgggcaggggctcggggcgcgcggactccaggcgctggactgcggcgtggagcagcgctggggaaaccgcgccgggttcagcgaggattgctgggcggggcgcgcgaggagcgaagctggccgggggcggggcctgagtcgtgtcggggcggggcctagacccgggctggccgtggtgggcggggcctgagtcgtgaaggggcgggccttgcaggggcggggcctcgaggggcggagcttgcggtgaccagcgagggggcggggcttagagccactaagaagcgggacccagtgagggctaaacgtggggcgccgggggcgtggcgcggggcgcaggtgcacgcaggttggccgcgggcgcgcggggtccggcgggagtcccggggtggtccccgcgtggggccgggggcgtccgcgcgggcggggcgaggtcggggagggcagctgcccgccctcctcggcactgggagctttcggctggtactgcgggaggagctcccgggtgacccgcgggttctgaaaccgccgctcgggagctcggggcctgcgcggcgtctacggggcgagcgagggagaactgacgcctttcgctcggatccttctccccttccgagaaccaggtaggtcgcgtttattttcaagtccgactgttttcgcggtaacatttgtgagaaacatcacggtggatcctgtgggtcgctgagttttctgactcccggtttgtcttattttgctttgtcagtgggctctgcgctcgcgttaacaattcgaatgggcacgtttctgagtttaagaacgctgttcg

SEQ ID NO: 5527 - DNA, 2358 bp, Homo sapiens
  source 1..2358: mol_type = unassigned DNA
acgacacctcggtctgttgccatggaaacaggggcggattaaggctggagcgtggagcgcagggatcaggcccctcggctacctgagctcccgcctcagccgctcccgcagggccggggcagccagccgcaggcgccgcggcttctcagcctcctggccgggccaggcgcgggggggatcccggcggggcgccacagcctgctcgggcctgggaggggagaggcagacgcagaggctggaacagctggtggcggggcccgtgggctcccggcgtgatcacctgccctcccagggcccgggggacggcgccccgcgtggcaaccacgtgggggcgcggcgggacttccccggtgcccgcaccaactttgccgcgctccgtaccgggccgggctgctggggcgtctagctacggtggtcgcgaagccagctgtcctcaagttgagctgtgcaccggtcgcgcacactggcggcacggctttcgcgtccctccgctcccagcataatgaaagtttgaggaactggacatcaggcgctggccgctccccaccctcagccgctgggtgcccagagcccatccctagcgatcagagcagaactgcagagaagacgtccgcgtccgggccccgtctggggagctagggcgcgcggggagcgcccgggccgcgcggtcactgaccgctggctgcacgggggcgccgtgcggactcggcctccacaaagcggcagaagcaagggcgtgtgcccgcgcagggaatggaggctgcaagtgcaaaactttatcccagcaaagcaaaggtcccaggaggccggctccccttccaccaccggccgctcactctggtctccgactgacccctccgggccggatctctaggcctggccactcgatccatggagaaaaccccgtgtctcacaactggccgctgacgggagctgagccccagcagcagcccctcggcgggtgcgcccggcaaaacccaccagcccgccgggggctacttcccagaccgggagccccggcgccgggcggcgcccgggctcgcggctctttccggagcgcattcaacttcaacttgcccctgcggctccaactcacctttgcgaagcatgttggccacggggccgccgctccgaggtcggcctaggcgcactccctcccggggtccagattcaaatccctgggcgccagctgcagctaatccgagcgcgtcgaggcgggggcaagccggggatccgctcgtgcccggtggcccggccccgcaggggcatggtgagctccagccccgcgccgagggcaccggcgcccgcaagcaaccgtggtgctgcccggcagccccgcgcgcttgctcagccccggggcgagcggcttgctccgcggagccggcggcctgcttctgccacccggagcacttcgcaggcggttttgaggggggacgccgccccctggccggccggccgcagccccctcctctccgccccctcggaccaccgccgccgcggctgcagcaaaagggcgctcgcacgcaccgccgagctccggggaaagcgcccggcgcgcgtttgcaggaccgagcgatcggcggagcggggcgcctcccttcctccccccggcttccccctcctctcctcctccctccctcccttgctctctagctccctccctctcgctccgctccccgcccccgctcacggagcgcctcccatacaaaatttatgaaagtgctctcagctcgcagtgccgagcgccgtcctattcccaaggcagcagcgctcagccgcgcggcgccgcctcccaaggtgttttcactgcgcccgcccccggggaagatgctcggcccgcgtccgtccaggcacctgcccccagtccccaagccggtcctcggaccactccacgcccctccccggccccgcaggcctcctggagcccgaacccgcagcccagcccccgcccgctcgcccttcgcggctggaggtcatcgggagacgcggctgggacgcgaggaccgccgcccagagtacggatcgcgagtccgctccctgccccgtctcctccctggccagcgccccttctcccagtctcgacggctcttccccgcactgaacagctccagcgaacccggctgccccgcaccccgagtcccaggacactgttctttcgtggggagaggaggggagcaagcattcggaaagggccagctgcaaattccagggagaaggaaggacccgtgcgggttcgggtgggccgtctccgcctgggtggggtggcggcggggggtctctgatctcccttggtccacacagaccccgccggggggttcgcggaaaatggaggaggcgccgcttggaaagcgggtcccg

SEQ ID NO: 5528 - DNA, 1050 bp, Homo sapiens
  source 1..1050: mol_type = unassigned DNA
gcgcgcgccccgggagagctgtgctccccgcgaaatccgtgcgctccagctcagggctcccgggatcggtgcccgttagtgggcacaggacgccgggtgtccgaagggctgcctggagatgcaactgaccttggcgggcatcagaatgacgagtggcagcagcaggagcggggtgacgaacaagatcacgaaggacttgaacttggagacatagctcagcgccgaggccatcgcgcgggagggagactggcgggcgagacgagtgaggggcagctagaggcgccgcgggcttaagaaggggccacagtccccggggattggggagggggcggtgacaactccgccccgcacgggggcgcctccccgcggccctggggcggggccacccctcggggtctgtgggacgcgcctgcccccaattctgccacccggcggcggtgggaggcgtctttggactccaacgcttcgggccagccctctaggggcagcctgggccctagcatctcgcgctgtccaagcctctcctgcgctgccgaggcagaggtgcgtcccggggctgccaagcggggcgtgttttggtcactggtgctgcccgctttggcgtaaggcgccctcccgcgtccgcatctgctctttcctgggctctgaagggtcccggatgaaactctctgcaggcctctgggtctctcaggtctatctccccgatctccctctcctttccatctccttacttccgcccctccggtgtctctccgagaggtgtccccccacgccccgcgccctccgcaccgcgggcctcgcttcccggtcccccctggcttcctcgccacgtccgccccactctaggtgcaggaccccttttccccgctcgcactctccggcccggagctcctgggcgatcgcacagggaagcgaggccactgtcctcctctgtcccaggggctgtcgcgctccagtggacgctgcaccccgcagacgcccggcgggcagatgcggacacgcgtcttggaggggccccaccgagcctcagcagccgcagctgcccgcccg

SEQ ID NO: 5529 - DNA, 1731 bp, Homo sapiens
  source 1..1731: mol_type = unassigned DNA
ccgggcccgccccgctcaccggtaccaggcgaggcccttgtcgtagctgcggtcgaagaagtggggctcggcgcccacggcgcgcacgtcggggtgcacgcgcaggaactccagcagcgcccgcgtgccgcccttcttcactccgatgatgatggcctgcggcagctgcttgctgccttcgtccaggagcagcgccagggtccccggcggggcctcggccacggtgcttccggccccggagccgcccggaccccctgacaggccaggggactcttcttcccaggccgcctcctcgccgtcgtcgcggggcgcgggcggccggcgcctccgccactgcggcagttgcaggaggcgctttctctgtgccgccgccggccacaccgccagctccctcgggcctccggccaggacgccgccaccaggggcccccgcctcctcgccgccgccggacagccccacgacggggccggacagggtctggcagcgctcggccaggcagtagaagacgtaaagggacgtgagcagggagcagagcatcagcaagaacttccggaagatgctgcgggacagcggctcggccgaggtggagagggcactggccgggcccggaggggccatcctagccggaggcgacgtcgggcaacgcgccggccatgctaggcctggaccccgacaggtgccagagcatccccccggcgggccagcgcgctggacggaggccacatcgccgtgcgcccctgtggccgtgcgaactgtcccgggaggcagcggccggggctccgcggggaaacggaatcccgggggccccgcgcaggatccctgcctccagtcgagggagcgggaaggggaacgcgggtccgtgcttaagaaaccatcgtcttagactcgcccaagtcctgagcttggggcagccttggcccctcggttccccgcaagagtcgccggaatcggggtcttggcagcggtgtcgaaggcgtgcgtctcagccccggccccgagagacttctcggcgcggatctccgctcagcgatcctgcatcactggctcggtccccgtgagggcacgcgcggctgccgggcctctgcgctccgtgcgctccagacagtggcgagcgacagtgacttccagccccggctttctctggtccccttgcccgcctgggcgcgttctctccgcccgagttcaggttctctcagccaaggagcgaggtccccccgagtccctctgcccgagcgggagacaggaggcccgtgcagagccgtccacccctctccgtagcgccgggttgctccaaactgctcttggaccccacctgtgagccgcgtggctgggctgggctgggctgcgcgggacctgtcagcggcccccgccactctgctcgcaggcgctcaccggctgcctcctgggccgccgctggccgccgccacacgtgggacgccgagggcagcaaacttgctggtgacgtcaaaggcccgggccggaccagcccccggacgagcgcagcggggcgcggaccagcggccaggcggggccagacgggcggggtgggatggagaaaaggtggcgcgggctccgcagcagccgcccaatggcactggagagggcgggggcggcaggggcgacgccccttccccagtgtcccccattcctccccgcggcttcgcccccttccagtggatccggtgtctgcggcggctccggggttgcctgagtgacagctaaggccggccg

SEQ ID NO: 5530 - DNA, 3535 bp, Homo sapiens
  source 1..3535: mol_type = unassigned DNA
ccgcccctttgggcccgccccttgttccgaagccaatagcaacccctgaccgccctacaccgcccagaagcctttccacaccccctcgtcctgggagcgggttggctgctgagctctcggagaagcgcctgtatttgcatggcgttcggggtttttggtaggtagagcagcccgtcactctggaaggccgggaccgcccactccacctcggtccacagctctcttcctgcgcagttcgcctctgcagcctctgcggggaagtgccggggctgctcgaggctcagttcttaggactgcaaggaggcagccccggcgtgcggcggtgcgcacagtctagagtggccagggcgcgagagtgcaacgtcctcctggccccgagcgcgtcgtcgcgccccgggagcagaccctcgcccagcagttaccgccgtcccgactttccgttccagttgcagctcctgccgggcaacatgtcaagagccgccgccgctacagctgccgccgccacctggggaagagcagcagcagcagcggcggccgcgggcacacgggggcaataaaccgagccacccgggcgtccagcgtgccggggaaccctctctgcgctcactgcccggcgggacccacgccatgtgctgagccatgtccctggccgcgcccgcgggcagcgcatggggcagcgcctgagtggcggcagatcttgcctcgatgtccccggccggctcctaccgcagccgccgccgcccccgccgccggtgaggaggaagctcgcgctgctcttcgccatgctctgcgtctggctctatatgttcctgtactcgtgcgccggctcctgcgccgccgcgccggggctgctgctcctgggctctgggtcccgcgccgcacacgacccgccagccctggccacagctccggacgggacgccccccaggctgccgttccgggcgccgccagccaccccactggcttcaggcaaggagatggccgagggcgctgcgagcccggaggagcagagtcccgaggtgccggactccccaagccccatctccagctttttcagtgggtctgggagcaagcagctgccgcaggccatcatcatcggcgtgaagaagggcggcacgcgggcgctgctggagtttctgcgcgtgcaccccgacgtgcgcgccgtgggcgccgagccccatttcttcgatcgcagctacgacaagggcctcgcttggtaccggtgagtttccctgccaggggcagggtctccatcgtcgattcagaccctgagctaagggagacatggcgtatgatagggaattggcagggttacagcttcggaccacccggggtagggcagggaaactacggcagattgcgcagcgcatcctgtccgggtgcggtgagggttgcgctccgcttggttctcgtcacaacccacagaaagttctcgcggagcactggtgcccttgaattcatcaggcgacctcgccgcaaagaagaagggcagcgactgagaccgccctcagcaaagcgagccaccctctaaccatgggggtatccgactcgaatcgtattttatgactcgttttaaattttttcctcccggagcccgagacgctgggaatgttctgagcccctttggtcggtctccgccctcaaggaacttctagagcagcttctgcttcccagatggggagagggggtgggggccgcggcgtcccggcgaggccgcagagtctgttaactttttgttacagtccgcctggttaccggaaccccaagggtgtcagacccgcctcgctcgcgagccgcctgggctcgggagggtgagccgggcgggtggcccggcgcctccgcctggcgggcgggcggcgcgcggagcgtggagctgtgctggtccctgtcgggcaaaggcgcgcactgcaaccggctggagcggcgcgaggctttgaaggcgtccgggcctccgggcaccgccgcccgtttccgcctccctgccctcggtgctgggatagggaaagcaaggacgcgtgtctccgcggggcttttacacgtccggagcaaagaatattcggggcccattgattgagaaatgagggttgcttcgaggtcgcggcttccggaaattctgttctcgagtcgggttgcgggtcaggttccaaagggacagtggccccggggtcacaatcactacctctgcccactgctttccgcagctgctggtctttggggtgagctgttgggttgcccgagcttcgggtaaggcgcgagtgggcaggaggtctagatttcggcctccgataactgtcttcgactaggggcccaggtaacgacccccacattttcgttggggtctccacccgtaaccccagccagcacgacattcagacacccctccaggcccaattagcttcacagacgctcaagacttgggaaaacaaaagaggagaagataactgaacccctctccctgtgcccaccccactgtcgggacctgggtgggttggagaataaaagagggctgaccccgcggattaaaacggctcccttcccagcctcgtcctaccccttcccctttgtccttaatggttttttattattgtcaggagttgcccaagtctcgaggtttagccaaccgtgacagtcatctttcccaccgttcccgggctgtgacccattctcgggacactggtggataagaatggggtctctggagtccgacgcctggattcacgtcctggctagtcgcgtgaaccttggtgctctcatctgtgcagtgggaataatgcaggttctgggcagggatgggaagagtgaatgcgctggtacggtaaggtgcctcgcaggcacgtgagggcctctctaatcgttagctattgtcaccgattgtattgttatgacttctaccaccaccactccccctcctcctgggatggtgattccagggccaggcggcaggctataactagcgcccttccaggtggaacccgccagagccccgaggcagcctaggattttctgagatcagacacacttgggccgggttgggaggaactggcaggaaaaggactgaacccttaatgtcaggcggttttgaagcacctggggcaagctatggaaatccccacaggaaggctcacgcagtctcttaggcggctgccctccacctgccacgttctttttgattgactaaaaaacgctgaatgaagaacgaagtcgcgtggaaaccctcgccgcgcgcctgcagcggacagcgcagcccgggaggttcggctgccgacttgcgcccgggggctgcgctgcgagcggccacgcatggcggctggacccgggcggccgcaagggcttggctgggccgcgggaggcgggaggttcttcgtcctcccgagccatctccctgaactgacaagcaggactcccgggtccagggggcacagggcccggggcggtgacccggcggatcgggctgccggaggagcccactgtaaatgccgcaactggccccaaacactgcgttcctggactgcaccagcagctcctggcgcggccg

SEQ ID NO: 5531 - DNA, 2896 bp, Homo sapiens
  source 1..2896: mol_type = unassigned DNA
gcgtgggcggtgagcggccgggagaggggcgggccagctgagcgctcaatcacagccccggggctcggcgcccgccagctgcactcagaacccccctcaccgtggccctgccctgtggcgcctaattacgtgcccccagggctctggagcggctgctgggactgcagcgaagaggggcccgcgccacctccgccaggctccacgcgccggccttgagtgcgctcccctcggccgccgggaaacctagaggcgcggtttggccccaaggtccccggtcccgctcttctttgtctcggcctagttctcggctgtctccgggccgcgacccacctctcctggcggtccttgccgcatgcttctgtgctgcgccagaatcatcgagtctcagttctcgctgccttcccggccagtaggcgtctcccccagctggggagggtcccccaaaccctgtgcttctaggaccgcggggccggcaagcggcaggatctccaagctgcgtctctgatgcggctaggggaggcgcgcgatgaaggcccccctcttctccgccttctctctacgccccaccgctactacacgtcgcgctgcgccgcgaccccggcgctgcctgttggcgccttaagcggctcttctgccgcggtgcgatccccgacgccaggaggactaacccccacccgccaggcctcagaccccacgcagatccagccacacacgcaaccgcctgcagatacccaccacagccctttaagttaacccaaagccccgtacaggcgcactgcccctacatgcgcagccccacggccccacacacccaccagcccactcgcaaacaggcccacatggccacacaactgccctctggacactcagccccacgcaggcacaatcccatatacacacaaccgcacacaggcgcaatcccacccacgcagtacctcacggagtcacacaacccccctataaacaatcgcacagacacagccccacgcagcgccacatcattcagtcaaactgagacccagaaacacattcactagcttgtatccagacccccccccccaagccccgtgacattcactcgtaggacagaccagaaatatacagccacattgatacacacacggacctaaacgcacagccaagacctcacccgcaggctcgtaagtcactggaaaaatattaaagcgttccctccctcccctcctctatctttgacatacacacgcctgcgcgcgcgcgcactcttacactcacaccccccgtccctaagcgcgtcggagcctcgcagcgggtgaccccgaggccccgcggtgagagccaagggagcgtctccccggcgccccctcctcccgctcccttcccgagctcatctctcgcccccccgcccgcctcctccttccctgccccctcctcctcctcccttcccccgagtctggggcgcgggctgcgcgcagccaagccccctcatcgcgcgcccctccccgcgcgcgccccgcgccagcatcgcgcttaccgagtggatgcggccacggggccgtctctaattacctcctgacccccggcggcctgtgaataatggctactgagggcgctcgcaggggctgctaagaaggaaacgcggggcgcgagaggcgcggcgcgcgcgggagcgcgagggaaaggagcgagcctggggccgttgcaagcggctggcgagagaaaggattcgtgcgagcgctcacatttgtttctcccaaggatctcatctggccaccgcgttctggaagaggcgagagggagagcgtgcgcgagaggagagagacggcgggggaaagggagacggcgagacgcgcagcgccggcgcccgggagacccaggaggagcccgcaggtattgttggcggcggagctttgtgttttcggcgggctgctgtgggcgccagggctccccgagcccccggcccgccgccgcgcgcagacctgcccggagtccggggctgcaggctggggtcgccgcccgccgcggacacccctcccgcggcgccaggatcttggctggagttgcggatttgcatgtttgggggttttccacgctggttgagggaatcggtctcagaagaaggaatttctttctttcctttttttttttttttttttggccgcttttggccacagtttggttgtgctggggattcccccctcccctttcctccacaaagcattggtgagcggtcttgacgaatgtggtattggcggaaggcatggggctgagatggcggggctggtggccacggatggggaggcgagagatgccagagaaggaaggagttctgttcaagttcgcaatctgcgccccgaagctggtcggaccggggagggcgatccgcgcgtccgatcctgctccgggcaaccgatgggaaacttcccgagagcgcggcctccctggggactcggcgcccctgacgcctccaggcgcttcctcgggccgctgcggcccctcctcgccgcccgccagcgcttaaggtcgcgctctccccacccccgccttcctcccttcctcggcggcttccggatctggacagagctgcaggagtggcttcaaacacttcccctggagacccctccccactccccgcacgagagcctgcccagtggcccccctgccctgcgccccagtctcacgcgcggtcgagtggccaggctgacaatgaaatctcgcacctctgccggggggagtggggtggggaggaggtccctcctggggctgctgaccctgggcctcgggcagggggagggggctcctgggggaggggcttgttttggttagagacgtcgacctgggatggcgccggggcagggagggggctggggggtgggcgcggcgaaggcggcaggcttgggttcgcggccgggggtcg

SEQ ID NO: 5532 - DNA, 2567 bp, Homo sapiens
  source 1..2567: mol_type = unassigned DNA
cgtccccaacgcgggagcgcagtgcatcccagtggacaaactcgagaaccgcacgctgctctccgcctccacctctgtcctccccgctcgcggttccaacccgggacccaaatgcacgagctcggtgaatgccccggcaggagggcgagggctcagaggcagcctgcccagcaaaaacgacagctgtgctctggtgggccctgggccaccccaggcagaagccagagaagcccgagaaccccggcgggctggcaaagtttgccgagaagggtctttctggacacccccaccacgggctctaggctcgaaccccctcttccatctggccctggagtcccagacacagacaagccccgggcgcgccggcgggcgtatgtgcgtgtgtgtttacagcggggtggccgccggagctccccaagaaccccagctctcccgccccagctgcccgccagctgtgagcgcccgtcgggcccggaggtcacccgcaaacagctgggtcggcagctgggagcctgggaggcccctgctcagccccggggccccgagaaaggagaagggggagcggagtggctgtttggctgtggtttcctccaactccgcctgcgaagctctcgctgggagcccggagctttagctttccccggcagccccggcccccgcgcccgccgcgcccagcggccggcgcctcgccccgggccccggggaggaggcgcgccggggcagccggccaggacactgcgctgctggctcctagagctgcgggcgcgcctggccggccccacttcccgggttgctggggcgggcgccgctgccccgaccccggacgcgcggaaccctggagacccggccgctccccgccagggccgcggtgctgctccaggctccgggcgggcgcccctttccggctaccggtgcaccccgttgcccgcttgcgggaagcgaagaggggtcccttgatttgcaacatagaggaaagcgccgcttccgcccagcctggcacccacgcgcccacacgcacccggcgccggccgggtcgctcacctgagtcctaaaagctgttgaatccacatggtcacgtttcggggagcggggcctcagacctggctcgcccaggccatctgcgcggcgcccgcgcccgctcgcttccgtcccgcggcgccggtctccggctctcggtccgccgcctcccgccgcccgccggccgcggggcgcacagcgagtcagagcgcggccgcgcggggctccatgccggccggcgcgccgccgccgttggggcgcatggctcaggctgggcggcccgcgggggcgcacatcctccggccggggcgcggggctcgcggccccctccgccggcggcacagcgaaggcggcagcgaggcggggcgtgttccggcgctgtcgcggcgcagcaaagggctggggagccgcggcttcgccctccggggcggcgaggagggaggccggcggcgctgccgctcacggtgcgtgtctcccggcgcgcggctcttgcctccagccggagctccgcgccgatggggcggcgctgcttagggtttggggtgacgcgacgcggacggacgcgagtcccctccgcgctgccgggtcggggggctctgccagaggctccgccgccgatcggcgccactcaagttgcccgggggctccgtctgagcgctcgctctgcagacggccgcggcccggagactggcaggaggcgggcacgagaggcgcgcggggcgagggcgccgtggagcgcggggcgtggggacgcgcggcggcggcgccgcgcggaggaggcgcgcggggatcccggggccccgccgcccgcgcccaccgcgcccgccgcagagccgcccgcgctgctcagccgcctccctcctcgcgtctgcctctccgcgcgctcgcccccgcctcccggagccggtcccaactccgcccgcccggcccggctcacgtcacccgccttccccgcccctcgaacgggagctcgagcccctggcctggccccggctcctgctcgccgccccaccttgcgggggccggggtcgccgcgggtggtggggggcgctgtgcccagcaggggcgacagcgcaggcggggcctcctgcagcccccttccccatccccggtcgcgtcccggtccccaccttgcgaaaggctcgagagaggccgcaggctaggattggaccgccgggcgccgccggatggtgttgccagggtaaccggatggcacgcgaagccgttcgaggttccgacccggttacgggggcgcccagtggacccggagagctactttggggagggggcggccccgaagaaggactgggtgggggcgcatggagcgggggctgcgcgaaaagtttcctggggcggagctgagccacgcgggccgcgcaggagcgtctgtccgagggtcgcctacgagggactcctctgctcggctgcgcgggcttctgcgttgatgaagtcaccgcgttccgggtcggagcttcggcgcttctgccccgaacccagcgaagcccggtcctatgcccccaattacccaacggtccctcatcgcccagcgc

SEQ ID NO: 5533 - DNA, 573 bp, Homo sapiens
  source 1..573: mol_type = unassigned DNA
cgctgtccgccgggccggtggcgttcaccccgcaccgcgctgccccgcccggggcactatggcctggggctggactatgccctccccacctcagccggcgccccccacccacgcgcgctgagggtgcggtgagctgagtgcggggccaagcatgttctggcgtcgacttcgcccaggggcccaggacctggcgcccaaggggctccctggcgacggagacttccgacgcagcagcgacccgcggctgcccaagctgaccccgcccgcgctccgagcggctctgggcgcgcggggctccggggactggaggatcccggggggcggcgccgcgtggtggccggaaggggacgccaagcccggggtgggcgtcggacgcctcccgccgcgcctgcccgccttgctcaccgcgacccggcgggccgtgcggaagcgggggctgctgcggtccctgctgccgcctcccctgctgtcggccggcgcgtcccgggaatcggcgcccaggcagccagggcctggagagcgcgagcgcccccggaggcgcgtggccagggaggaccccgacttcttgggcgc

SEQ ID NO: 5534 - DNA, 383 bp, Homo sapiens
  source 1..383: mol_type = unassigned DNA
cgcccgtcggctcctacaggggcgaaatcaggcacccaccgtgacggcgagcgtgacagcgtccggctcgaccttgcccagatgtccacagaagatggagctgacgaggctgattataaagatcatcaactgcgcaagaaactgcggaggcgcggaaagcaaggcgcgttcacagccgccctccctcctggaagcccgcgcccacccctgcgcggcggccgctccggaggcgtcgggctgggcgtgaggacgccgcactcaccactgggcccgcgagcgccgccagctcagccgcctccccccgcaggtccgggggcagcgcaccccgcaggccccacaagccgtcacgccatccgagggcccggagccgctatgggggccgg

SEQ ID NO: 5535 - DNA, 853 bp, Homo sapiens
  source 1..853: mol_type = unassigned DNA
cggcgcggggtgaggtccgggggccgccttattgctgaggtccggccggttggggccgccgctaggcgcgctggctgggcagctcctgggagatgaagcgacgcaggcgctccaggtactggctgtagagctcgatgtcgttgtgcccggcgccctccacccacagcggctccaccgccttggggcagcgctcgtagagcgccagcccgtgcgagaagtcgatcacctcgtcctccgtgccgtggatgatgagcacgggcgacgtgatctaggacaccttctcgatgctgcgggaggggcgtggagcgggtgagacttagcgcccggcccgggccccgccccgcctccgtccccgccccgcctccgtccccgcccgggccgctcacttagggaaggcgtcgaagcagtaggtcgtcttggtgtcagggaaggcgacgcgcatgcccgaggtgagcggcgagtgcagcaccaccgcggcacactcgtagcgcgaggccaggtccacggtgggcaccgtgccgatgctctgccggtacaggatgatgctgtccgggctgatgccgtacctggcagcgccggagcagggtcagccgcggcctccgacgcgcgcacacccttcccaccagcgggcgtccccgggcccagctccggatgcgaccctccagtctccccactcagccaagtcagtgggtcaggcccaggctccacaccagtcccgagggccacccccagcccccaacaccgcggcggtgggcgaagccagcggccccgccccgttccctgcgctgccgttcactggcgtttcctagctaggatctgcagggatctcgcctacggagtgcccctggggcgg

SEQ ID NO: 5536 - DNA, 1062 bp, Homo sapiens
  source 1..1062: mol_type = unassigned DNA
cgaggaaggaaggtgggcgcagaagccaccctaggcgtgacgcgtgacgctcggggcacgggcgccggggggcggaaagcgagggcccggctgggccagggatacccggggggggccgaggtcctgggctccggcggagggaggggattgggagggaggccaccgcctcgggccacgcgggtgacccggcgggggagctgggggaggggcggcggggctgggctggggtccccgggccgggactggggtcgggccagcttacctcctcgccctggccgaagcgcagtccgagcgccgcgacgcgctccacgcgcaggaagccgtcggggtcgcggccgcacacctcgaacacctcgcgcaggcggcgcacggagcgcagcagagccgcgggggcgcccgaccagcccgcgccgcccgccatccgggccggcccgcagctcagcccggacccctcgcccgccgcgcccgccgcctgcccgccgccgccatcgccgcgcgccctccggggccgcccgtctgggtctgcgccgcgcagcctccgcccggtggcggccgcggccgatccgtgtcagcagcggcgccgcagccccagccgctccggaggggaagggaggggaggggagggaaggagaagagtggggaggggaaggaggaggggcaatagggggcggggaggggaggggcgggggccgcggcgaaaatgggagggagagggggaggcggcgggggcggcggcggcggggacgctgcagacaaaaggagcccgcgtcctcccgagtggggcggcccacgcggggccggcaggcgcagcgagctgccaacggccgcgtcctccgcgacctcagtttccctccgcgtccccagtttccctccgcgtccccgagcccaccccttcctctggacacccggagccacccaaaggccctgccctgccggaggattccgcggggtcgcgcccctttccgctatccgtgcccgctgccgcgcctggcgtctcccgagcgctcaggatgtcctgggggcctcctgcattggcgcgttccgtgactgcattcatcccgg

SEQ ID NO: 5537 - DNA, 918 bp, Homo sapiens
  source 1..918: mol_type = unassigned DNA
cgcgaagtttccgcggcggagagcgctgcgcggggagacaaagggaagggacagggatcgcagggacagggacaggagcggctgccgggctctgggtccccgatcgccaccagacatgtctccgagcagccgaggcaaagggaacggatgggaaaggaaaacagaggagcggcccagaagggcggctcgctgcggtggtggggcgcggactcgggaactcggggcgggcagggcacgggcgcaccccctcctctcccctccctcgctcgaggccggcagcgccccccgccccgcgccatgcacacccattgtggtgatgagagctcgcgccccgtgcccgtcacggtcactgtgcgtccaataaaaacaaacactgccgaggagccgccgcgatgcggggcggacgcgcggcccggaaaggggagggggccctaggaagagctacacccgcgagccgggcctgggccaggggcgaggggagagcgccaagactgccccgccgccgagggcgccgatggaggcacaggggttcccgtggggcgccccgagagacaccgtgcctggccggcgggacgtgggctggcttctcacccgacggagagaagcggcactctcatcttcgggcaccgggtctgggctccgagcgggggctcctggaacacaaggcagtgggggcagacgggcctgggcccaccccaggctgggaaggggtctgagcggggcgtcctgactggacccggccctggcggaccgaaggctccaaaagatcttgcattctcaaagacttctgcagatcgtcaccgcctaaggcgccccaggcccggctccactcatgggaagggtaggaaagaaagctgggagcgctctggggcgcggggcagagacagcggtgttggaggcgcgctgtggaggcggcgg

SEQ ID NO: 5538 - DNA, 865 bp, Homo sapiens
  source 1..865: mol_type = unassigned DNA
cgagttgtgccggcctccgcgttctcctcacctcccctctcctccggacctccgccccctcgcggagaggccttgccgctttaagagccgggctagcgattgacaagcaataaacgctgagcgcccggctgcgctggagccgcccggagctaggggcttcccggggcgcaggtaggcgtcccccggcccccgggccagctcctatcccaagacctccgccttcttttcgtcctgacacggcacttaggaccctattcactgggtttaaactccacaggcccctttcacccaggcccgttccctccctgtccacccgcccccgcccctgggccctctttctggggtgctggttgggagaaccaagccccgctgcccattgacactggtccccgcccctgcggtaggggctccaaagtggcttcaggcaccaaggtggtgagctgtgaggggccccggtatctgcgcggcctccccgggggctgtgcgggttgggggtacttagaagcccggcattacgtaagaaccgtgctgttagcgcttccgggggttggggagcgagacagaggttgcgctgggtcccggtggccccctggtccccctaggcagctaacaccacaatcttccctgggagggggtccgcagaagggcgcgcgctgcttctcccgcttcccaagctgtagcggggcgggtcgggagccagggttagggtctggagacttgggaggggaccggtgccagaagcgaagagctagggttagaaagttaggtcaattaaggggggggcggtgcggataaagacggggtgggggttggccggggcagtcatttagtgacctcatccctggtctccggcgggcgcgcacgt

SEQ ID NO: 5539 - DNA, 408 bp, Homo sapiens
  source 1..408: mol_type = unassigned DNA
cgaagcggggagaatccggctgggctgacggagacgccacaccgcgccaggggagcaggagctttttcggagcgggaggcggggcgccgtgtggctgcgagcgcgcctcttggatgccccggccggcgcgggggtgggtgggcgctcccgccccatccttggccccgggcggccagccgcggtgtgcccggagggctctgcgagggctgtgggtggcgggcgagccccagcggcgtagcagaggaggggcccccgagcgagcgtactagggagaagggggtccgtgcaaatcccaggctgacgaccgcgcacgcgcccctcgggtcaccagccctgtcgctcttggtggggcacaccgaggagaccgccgtggggaaccggggaccggattgcctgacagccgagcgc

SEQ ID NO: 5540 - DNA, 2245 bp, Homo sapiens
  source 1..2245: mol_type = unassigned DNA
cggaccctgcggagtcccgagccccgggtgaggcgatgcccagactggcgcgaagcggggtgtcccggcagcagcgcagaggcccacccgcctctccggccggctgcagcgggcgcgcctataccctgcaaaaccaaaacgctctggaaagcgcttggggctgcaagtgacgcctgacacgagcggcgggccggactgccggcctcccggcccttccctggctcacacaacccgcgggccgcccccaccgcccacgaacttcagcgggcagacgctggacgtgcggtctggctactttcctaaactccagcgcccgatccgcgtcgcagggtcggccgcgcagcgcggggatcgcgggtgcccaggctcggagaacgagcgtcgcgctcccagccgcggtcggggaacaggaactgccgccagaggcaccgtctcctcccccgagactgcgatattgatcaagggctcgcaggcgcgggcggcattcatctctccggactcgcagctcgccgcggaggggaaggggcaggacgcgctcccaagactagggcgggggcgtgcggagtcggggagctgtttgggggcgctggggcgaggtgggaaccccgcttcagagtctccagtcccggggccgaggtctgcaggaagggcgtgggaggtggaacctcccctcccctaggcgtctgcccgagagcctagagcgattcttggcgcggagccggctacccgggtgggcggaccccctcctccgccaacatcccggcggcttcgccacgatttcttttctcacctgagtctccccctgcctacccaaccctggctccaaaggtccagagagttaggctgccccggagcccagccttccccgacctaagcacggctctcccagcgcccccgcccccatcacacccacagcccagccccgtcccgcgtccgccaggggccgggggcgccagcgctcgagggatggccggcgggctgttaccttgacgagacggagctgcgggtgccctcccatcctcgggctcgctcggctaccgtcctgaatgcccgggtcctacggacatcccagagggaccggcgggcggctgcgggctcgggcggcacggggtgggcggccgggctcctcggtcgctgcctggtgaggagatgcccggctcggcgcttcccggccccgcggcccggcccggcccggcccggctctcgctcgccccttcccggggaagtctggccgccgtttcccgacgcagcccggcccgcggccgcctcttgccggcctcgcccccgccacctcccccacggtccgcgccgctcctcgcctcggctccccgccccctcgcccagctcgtcccctccccttcctccccctccctctcccctccgctccccttcggtccctcctccgcgcctcgcccctcggctccctcccagctcctcctcgcctcctccgttccctccccttcccccggcccgctctctgtgtcccgccgccaggatcccctttccctgcgcccggggtttgcggcagtcctcggggcgcgctggcagcagtggcggccgccgcagcccggggagaagccgggaatgggggaagggggccgcggtaaaggatcagcctcccgcccggccgaggtcggggcctgggaagtcccagggatctggggtgacttgggccagggtgctcaggtgaatttatgagggcgaggctattgggggctagggaacagggcggtccctactgagcggagccgccgcggaacccagtgaggctgcgacctgcgtttgggcagttcccgccctgcggctggctaggaggagctcctcgccgcccccattccagccgcgccgggcgctgggcccgacccccagcacctttggcactgatgtgcctggtgcgcgctgagacgcgaacgctctgcaagatgagcccttattcattcgttccttctttccttcatttgttcatcttacaaactgagtgcctggccactttggttcaggcaagaggctggatctgggaaccctttggacctgggagccccaggatgaaagggagacggcggtgccctgcaggacaagcgggcactgaacgctgcccaggggaaagccgggcgcgcattgcgttgcagcgcggcgaacgctgctaggagcccgcgggcagggcgtggggaggacacagcgccccctcccggccggccgagccctctgggcagcggtgggcctccccgccagaccccggggccgt

SEQ ID NO: 5541 - DNA, 2972 bp, Homo sapiens
  source 1..2972: mol_type = unassigned DNA
cgattattcccgcctccccacgcggtcccccagggaagaagcgaggcgcttgagccagactgggctggaacagtgcggtaggggcccgtcccccgcggagctgcctccccatccaccatccacccagctcagcccggccgctcacgcacgcccatttgctgccctcgttccatccctattaggcgcattagccagcccggcggctctggttacagacgtctgaatgacaaagtgcctccattaccggcgcggcccgccagccgacccgccgggacgcgctctggtttcagccctctctctctcaccgcggcccaggaagaaactcggaccgcgcacagccatcccagaccgagcagccgcgcgccgaggcggaggcgggagccgcaggggctgcagacggcaggttcctgtcggggtacaccttcccaagcgcccaggtcctccacgcccagctcccctccttccttgggtcttcgcgcggggaccctcgctcttgcccagacccggagcccaagtcgttgcccctctgggatccggtccctcctccccgctctcctggtctacgctcgcccacccgcgtctgagcagcgtctctaaccagcggcgttagtcagcagacgtgcccgcggtcgctcccaaatccccggacgcagccacaggtcctgacagctccagggaactggggctgagctttcgggctggggcccgcacccggacagaatctctgcccacctcacccgcaggctctaccgccgacggactctggggacagtgtcaaccccccccgccctgctgggaaacgcagccgtgaccccgagctgggacagcggctgccccctgaaaaggtgggggagtaccgagctgggaatcaggtcggggagtctagccacgactctggcccaacttgctgtgagatcttggccaagtcgtttaaactctcagagcctcagtctccgtatctgtaaagccggaatttggggcgcagtgctctgatgaaagatgctggcggggagagtgaagacgcctcctccgttgccagaccttccagggcattcggttcatggccataaagcaggccacatctgacaatctcgtcggaccacccggaggacccgccgacctttgccgagtcggtggcccgggataccgcgctacagaatccgaggcgtccgggcgcccccgtctcgttaggtgcccagcggcttgcaccgagagccaggagaggctcagaccggatcccgacccttcgaggcgcgggagcccacggagcgcggtgggcgcggcgctcgggtcgcgcagctaggtggggagcggcgcgcagccccagactcgcaggcaggcagcggcggactgcacttgcctcgccccgcagcgccccctgcctgccgcctcccgcctgcgtagccagagctgcgcgcggccaggaagggtccccgcctagtgcgccccggcgctctgcaccccgagacgtagccaccgccagcccgggtaggggcacacccgctccgtccctcgcgatccgctgcgctgcttcaagccgtgagaacacgcgcgtcggaggagcccgccggccgtgggggaaccccgggagcgggttcgccccggcgaagtgggcactcccctcccagccttagatccgcagccccaattccgggactgggagaggccgcgagcaggagcgcggggacaggcgctggaaatgtccaagcctctgctctctcttctcgtctcactgtccctcagcgggcaggcgggaccccgaccacttcagggtccgcgccccgctctgtctcctttccttctgcttccatctctctgccgccctcgccgtcgcccctcttctgccctccctaacccacttctcaacctctctcccgctccccaacctctccctccgacgcccctcccccccattgtctggccggtccccattgtccttgccgggtcccctctgcctccagtccctccgacctcctccattgttccatcccgtcgtcccgggctccccgccccagcccagctcgcccctctcatctctagtccccgtccagttccccctccttctctcgccttggttctgtcccacgactctccagagaccgagatgctgaggggaaagtcccttcgggatcccggcattcgagtgtcctcttccgaagaacctgggcatcggagagccccatgccccctcttgaaagacccctcccagctcccccaccgccccctgcggtacctgaggaccggcatccgtgctccggtcttgccctcatctccaccctggagagtcgcctctgcgctccgggaaccctagaccctccttcgtggtcccggcatcagaggtcctttcccaccacccaccctcagtatctgggaccccaatgctctgttctgtttccttggtggcggcgcccggctcttctcggagttctgatcccgggaaagggagcgggccccctccggctaacactcacccccagaagcagcaacagcagcaggcgcggcccgtccatggcgcggccggtggcacctgcccccatcgcccgcctcccgcggcagcgctcgacttccagctcggtccgctttgcggactgatggggctgcgctgcgctgcgctccagcgccccccctgcccgccggagctggccgcggctcggctcgctctggctgcgggcgggagaggctgggtgaagccagtgctgcggccccgcctccgccccgcccagcccgcccacccccggaaccgcgcccgcccgccctgccgcctcggggtgggaagcagaggcaaagggagggcgtgcggttccccgcaccccgctgcgcttctccctgccttgtcccttagagcctctcacccatcccgccctggtacccagttcccggcccgcgctactgcgcgtccgtcccggatgctgtgggcccggggaccagggcgtccccactgcggttcctgttcctctccggctgcggcccgc

SEQ ID NO: 5542 - DNA, 1026 bp, Homo sapiens
  source 1..1026: mol_type = unassigned DNA
cgaccgcccgggtccgagcagcgggggcgctttcagcggcggcaggcgcgggtgcgggggagaggagcagaaaagagagcagtttgaggggccgagggagccgcgtccgaggccggcgcggtggggaccgcgggcccaccaccagccaagcccagctacttaactatttgtagagctgctgcaggcacaggtccaggctttcgccctccacctcctcgcgggtgatgcgctctgacagcggtcgcgggagcgggggcaaaggcggcagctggggcggcggcggcggcacggccgagtgccccggggctgccgccgccgtcgccgcgccctcctcctcctcctcaccctcaaccgccgcctcctcctcgggctccgggtcttgctcctggtccccctcctccgtcgcggctaccgtggccgcctcctccccgggttcctctaccgaagcctcggccgcctcagcttctaccagttcaggttcgggctcgggctcggactcgggttcgggttcgggttcgggttcgggttccggctccggctcgccgccgccgcacggtccgcgaaactcgcccaggaatagctccaggaagcgccggtaagttttctcctcagggatgcagccggccatcgctgctcatgccccagggcagaccgggaaaggggttgggggaagcccaggaagggtaaggggctgcttttgagcctagggctccggcaagggcggttaacggccgcaccggcacgagcgatcagcactaggttgcctggagagggctcccgcaggcgtgcgcgccgccgagcaccgacgtgcgcggcccgggggcggagcgcgccgcccctctcggatctggagggaaagttggtggcgggcgcgcgcagggtccagcggcggcccaccctttattcctacggagagctcagcccacgctgcctagagactgtcgccatggcaaccggttctaattaagcattgcagggtccctcccgtcgagtccgcggagtctaaaggacactccactcgcccgc

SEQ ID NO: 5543 - DNA, 10207 bp, Homo sapiens
  source 1..10207: mol_type = unassigned DNA
cgctggcctcgccgccagctccctgggccttctccctcgctggcgctgccgcggggtcacaggccttacctgagatgccagcatgtgctgggagaggtggaacgggaagggcgcggcggtgcttgctgcgctggccgcgggacccagcccgcctgcgtccagccccgcggcggtcccaggcccgccacctccgccgttgccgccgcctgccaccgaggccagtaggtgacccatgcccatggcggagaaggcgccagggcccatggtgaactgtccagggtgcaggaagagcggctggccggctcccagcggcccaaagaactgctgcccgtgcaagtggctggaaaaggccaggccgggcaggtgtccggcgcccaggggggacgcactgtctgtctgcaccaccagcggcgccaggccctgctccttgccctcggccgcctccttgcgcccctcgtccttcctccgagcttcggcgcgctccttctccaggctcctcaggccgaacgggccgtccccgccgctctcggccggctccttgcccctctcgggactacgccgctcccgggcgcgctcgggttcggtcaagcgagtggggctggcgctgtctggagccgggctgcggcctagcggcgcccccgcacgctcctcgctcaaccgctcaggctccgggtcgctgtccgcggcgcacgacttctcctcagctgcggggagagggcgcgcggattacaggggcctgggcggaggccgacgagcaggatcagggacactcgggaagggctgctctcggggaggccgagtcggaggagctgctggagtcgggcaaagggcagctgcaggtcacctaatccaagaccccagatttacagtggaaggaacccagccctggagaggaaaccctacagctatagaattacacggcgcccaaggggccaggctcggagtccggccggatcttctggctaccggggaccgccctcgtaggggagtcccgggacggaaaccccatcccagacactcgccgacgtttccttcctggcctttcaggttagcgggtggctcagcaaaagaccagcccagcgacctgaggaccccccgccgccacctccctgtccctcctccggtccgaccctcacctcgggcccggtgcaggcgcagcggactgggcgctgcgcccggggaggtgggtggttcccgcgcggggggagggtcgcacgacgaggcgtctgactccgcgccatcgcgctcgggtttgcagtgctcctcgtacaagcgtagagacggcagcgtcagctgcttcctggggatgagcggatgaaccaggtcagcggggagcccatccctccatccctcctgctcgctgctcccgcgggcacccgccacagggctgctgtcctcggcctctcaccttttctcccgccggccgttcccggtgtcccggaagcccttggcaaacgggttgttgtcgatcttcagctgtgtgatctgcggggaccaagggggcggcgctaagtcaggccgtggctcttccagcgtggtcggtggcaccccgaggtcagcgggtgctggccgcagagggaagacccggggagcgtccacttggtacccacccgcctgggatgggacgccccgagctgaggccggtgggagggcctcgcggaaagcgacggggtctgtcctccaaaagcttcattcgaggaattatccctagacaggcctagacagccccacacaggcctaaagcagtgccacagtgtcggaaccagcccaagcatgcacacccgcccgcgggcttgcgcaagttaaacgactccgcacccgagcaggcgcgaacagagactgcagttcacacgcaaggctgcaggtacacacaaagccaaatcacactcacgggctcgcacacacgcaagtgtgcacagacataacaaacgcctacggaaccaaacgaattcacatgcctccacaggtatccaacacaccccaaacggggcacgcacagcccagcgtacaccttggttcacaaagccacaacgaccggcacggacactcgtaccctctctttcactcgacagtggcgcacaagggcacaggcctagaggggtgatgctctgccccactagaacaagggtggagaagccgcaagcagaaaaagccctttgattggaaggtaattctctaagcgcctcccaaggggtctggggcctagactgacccagagcagtagccaggagtgctttggggggctgtgtcacctgtcccaccctctggctccccccgagagagtgaaaactgggccccgggttctgagcatcggtagagcctgggcagattgcctcgggcgccctctcttcacttacattctcattcctgagccaagaaataaacgaataaaatgtaaaaatgtcagcgcgggcccggagtctcagctaattgttaagtaaacatctccatcagaacgacggcccagctgttcgctcgccccaggggagcctgtgtgtgcgcgcggtgggattgagagggcgccttgaggacttccgtgagtgctgcgcgtatggatgcgaggctcggtgctcgggggcgggccgcaagagcgcggatcccgtgcagggggcttcgaggggcgatgaacggacggttgggcctgcacgtgttgaggggcgtcagtgcaggggcttagcccaccgcccgccgcgcgcaccttgtcattctggtaggcagtgacggcgatgaagtcggtctccgggaacacgtaggtgcggaaggtgctgtaaggcagcttcaggatgtcgttggctcgcactatgtggaagcgcggctggtacttgtgcatggagtttaggatggtctgcggggagggtgggggtcagccggcagccaccagccccggcccgagcttttctattctttgggtacctgacctcttcctctccactttctctctctctctctctctctctctctctctctctctctctatcggttcttcctcttccccattttctcctgtctctgctcttttctcacccttatttctttttcttctacttttcctctcgcttttctcttttcacagcttctttttctcttgccattaaaaaaaatttcccagttggaaacagaaatgagacagagcaaaaacaaaacaaaacaaaaaacaaaacaaaaaaaccaaccaaaaaacaacccctccccacaaaagaaacccaaacaaaataaaacaaaacagagccctacaattccactcttaacactctcttcctttctggcactggtaaaccccctaaccccacaaagaggagattccaaccttcgggggctcaccaactgccctacctcagaatgggcagttccttttaccctatgaaacaccacccccgttcgctggggccttgctcaggcataaatggagagaacccccaaaccctctcctcctagttgggcatctgcctgtgggaggagggaaaggtcttagggaggctgggggggtgggtggggagggtggtttaacttttaaatcccctagtcttgggggagggccagggacgcgggtcttggcagaagggtgatggacaagttgaggtcatgggcaggtcttccaagctcggcacctacaggccaagagcagggtgacctccgtggtccagcactgcagacccagtcctggcagcacctgcctccctattgacggtacaagggaccctccacggcctgaggaactgagattgtgagctgccagccactgaccccaccatttcccaggcttgcaaaggagagcgctggggcccaggcccaggcccagcccacgtagaccacagggcagtgacccgggcaggggcactctgggggtttgcccagcgcttccccctgggagatcctgccgccctgctctcctgctcagctgcagtgctgggtcaacaagctcctgcaccgtccccaccctgccccaacactcacgaagccgtgcttgtcagagatgttgttggtcagcttcagcttgtggaaggccacaggcttagccatccactgctcccccgtggctgggctgtctgggtggatgtacatgcgtttgggcatctcagggtcggccttgcccgccaccatccagcgcgagttgtggaacttatagcggcaatcgtcagcggctacaatgtccatcagcaggatatacttggccttcttgtccaggccgctgactcgcaccttgaagggggggaacatccgcctgggagggagggaagggaggagatcccattggaaccggctgttctaggttccaggaccccactcctcctttatttatccctcctcgttgcgcacaccgctgccgcctggctgtttcccctgtggtcggctgctctgccctctcatcactgcccggacgaccccacctgtggttgttgctcccaggagatcccatttctgcctgtcagaccctctcctaaacagcctcctttaggccttgtgctcagatctggggaccctctttctccctgatctgagatgaaagctgatgcccaggagagaagtctaggccctctagaaatattctcgcttctccttaatctccccgaaattcgttcaggggaaatacccacttgggacggaagctcccagaaataaatctggagggtgtttgtattgggaactgggctacagagcctgataagacatcctggccgtgcagttcgggggaagagggtgaacccgaggcctggattctcggtggctgagtcgaagggtggaggggccggggctgtggctttcttcaggctttaaggcctggggcggcggatgcgtccagggctcggatgcccgcggtggagaaagggctcccagcccggtgaggcggagggctcggctgacccggggctcgctgccaggaaccgagcaaccagcgtggggttagctgggcccaggtcccactaggggcttcggggtcggagcagagtctgagagaggctgaatttcccccgagctcggagacggacccggacgcagaagagcgagagcgcggggcggaggagaccgccagggccaagccgcggggcctcctctgcgctgggactcagaacggttggggctattctttagcagtatgttttcgttttatttcattcggaggattttagcgtttttgttttaaaaaaaaatcgctccggtgccaaacgagaaaagtcaacttggttgtccgtgggagcgaagcgtggcgtcagggccagaacctggagccgggagccgggagccgggagtccccagctctgctctgatccgtgcagtcccgtgccccagcccgcccgcccgcccgcgcgccttccagccggccggcagccctacctcccggacttggtgatgaccatctccgtgcctagcttgtggaactggtcccacagctccttggcctccagcgtcaccttggggtcgtcctccacctcgtcctcgggctccaggctcttgagggagcgcagatgcgcggcgggcgggtgcgggcccagtgccgagacgtgcagccccgcctcggccgctgctgccgccgccgccgccgcggccgccgcccccgccaggcccgggtcgggcagcggcttggccagcgcgccgggcggcagcgcgagtgccgggaagaaggagggctgcgccgccgccagaaaggcggacatggggaagtcggcgggccgtggcgcgtggaacgggtggtaagccatggcgctggccgccagcgccggctctctcatcgggacatccggcccaggcgcccgggggccggggccggggccgggggcgcgcggctcggacccccggcccgggcggcggcgcgcgcggtggacggacgacccgggtggcgggcgcagcagctgctcctcggggcttcccgtccggcgcaccgcaaggggcacccggctctgtgcgcgggggcggcgggggctctgcgcggggccgggctgggccgggctgagctggcccgctccggcgccggggaccacgcgcgactggttagatcttgtcgtgatctctggaaaactgtgactatctcacatgtcctgcccagctcggatcccctgcgctaacgagccaggccccccttgattgctgattttacgctttttggaccaattgtgggtctccgggggcggggttttgacagctcaggccaagctccggccgggagggggggcctgggagaaggtgtcggaagcctcagcagtaagaaaacatgtcaacagaataaaatattaaccaatgacgggccgccgggccccgagacccctcctcctgccccggcccccaccgcccgcccgcgcctgcggctgcctgcgccggactggagagcgcggagggccgacctgacccgccgaaagggcctgaggcgaggggagcccgggtcccggggccttggggaaggacccgcagccgcacgccggccccaagtgcaaagcattgacacgaccccgagcggagagggggcgccctccttctcccgcgcccagaggcccggccgctctggcccgagccccagcctggcctccgacccagctccgggtcgtggcgccgcctgggggtccctgcgccccggaaagagacagcaggcactggaaagcgaggccggtgggcgggcgagtcgggaggctcgggcggccgaggtccgggagcggatcccaggtggcgggagctggtgagtggagccatggccgagccctgctggggccggcgcgggcgggagcgggacgcggccttgcgctggggaaacgcggggaccccctacccgcgcccgccttcaccggaagactcggaaggaacctggagttctccgcaggcccgggccccgccctgagctttccagcggccgggaggagcggatcctcggggccaggaaggtgagcgcacctttcgctgagcacagggcggcaccgcgcgggcggaccccggattctccacccgcgacccaacgaattttcgccctatccggtaccggagacgaaagtctccttcttccgaaataccggcttcctctcttcgccctgccaaccacttttttagtttcttctcatctctcggaagcgcacgtctcctaagttaaggagtgctgagtaacgcgtgagggagttggggtgtctgcgagcacctgtgattgaagccccctcttctgtgatcagtcttcgttttctgtcttccggcagcctcagtttcccccccatgaagtgatggtgtgtgtgtgtgtgtgtgtgtgtgtgtgtgtgtgtgtgtgtgtgtcgggccccgtgtggtgccctctgtgcgcagcgagagctataactcaaggtgtgcacggggagagtgaagcgaccacgcacctgcttccaatcgggctcgggcgcgaacactcaggctgattcctgaaggtcgttttctgaaggaaaagacagagcatgcactagccacgggtgacattcccacccgtacaaccgcgtggtgggcgcgtacatccaacattgacccatgcaggcgcccgcccactgcgcacaccggtcgcagggcacttcgttgttgaacgttgggagcagcgtttgaaggccggatctctcctggcagtgcggattcgggaccggcggaagcagtatggcctctgcgaccgttatccctacttttcggggccgaccccagggccctcacaactcctcatcaccgcatatgtgagcgccgcccccacagggttttctccacgacctcgttcttggctaggtcgcacctctcttagtacctcctctctggccagaacgaatctttgactccgagctgcgcagtctacgcagacggggcaggatccactgcagttttccacaggcaaatacctgctggctccaccttaggcgagatgtggcctctcggggagggacccgttgtggacacgtttgcgcagccggtgaggtgaccagataataaccagggcagctttccttagccgggaacccaggtaccggcctaggaatccgtgaatacattcgcaaagtcgcgcgcgcgcgcgcgcgcgtgtgtgtgtgtgtgtgtgtgtgtgtgtgtgtagacacatacttttgtccttgtaagagtatgtgtacatctaaatgtgtgcgttttagacattagtccatttcattagtccatccatagctggtccaggggtccgaggcctgaagagtttgaaacactcaggcctgggttatttgaccgagaaacctggcggcgacagtgcagcggctgcatctggggacggcgaccccacctacagtggcaccgaccttccctctggctttccggggctctgtccgggccaggatcccaccactcgccccgccccgcggtcccgcgatcaccctgaggtcctgctgcagccgctctgaagagtctgtagcgacccccagccaaactctccagctaggaatgcccgaggctcaccgaaagctggcgctggggaggcctgggaggccctggagcggcgccgtgaggcctccgctgggcccctcccccacctaggccggccccctcccccttcccaggaaccccctcccctggcggagccccgggggccgagtgtgcgtgttcctttaagaggccccggggggcgcctcgcgggccgcccggggctggagggggagggcgcgggcgggggcggctggcgccaggcggccgaggctccacaacaaagctccggcccctgtcacttcgcatcggccaggtcccgcagacaggcgggggacgcgcgctcggccgcccctccctctcgcaggcggtctccggccagggcgtcgggcgggcttgggctggtggcgcgcggtctgtgcgccccgcgcttcccgcaacagtgaaatggggcgggagcggggacggcctgggccgggtggggccgcggtcctgagcctggcgtggctgcccttccgtcctccggccccgtcacctctcgcagggttaaggggcactgctgggaccttccccgggttgagcctccaggtggcagggggtccccgccgcttcctcctctgtgtgcagggccggggttgcgtgaccccgcgggcagtgggcagcaggaagctcgggctgtgcggccgcgtggcagagcggacgacggacttgcgtccgagtgacggggcgcgggctgcagactggcttaagccctcggtggcagacgaatgtgcccaggctaagctcaggggacgtgtgtggccccgtgctatgggcccgctgtgagggtgccgccaggccgtcgatcactgcctggacgtgaggagtgtggtggtgaaggacactccctggacagagtcgcttcccatcacggcttccccgccggaccgcacctcccggagccctggcgccagccagcccggtttagcggccggaccgggctcccccgcggtcccaggtctggttggggtgggggccgcggcctcggtgaccccagcccgcagcggcccggcccgtcccgtccacttaaacaaattgccgctgacaggcgcgcagtctctctggagccgccgccctcccgtcgcctccctcccgtcccaattatcccgcgcagggtggggccaactggctgggatggggcgggggacgcggggagagcgggcggctcgactccctcctggtcgcggggtggcccggggaagcgtctccgcagccacggcctgtgtggccccgtccctggtcttcccgggggatgcgagggcaaggcccagcctggcagctgtgggccctggaagggcgtcgttctgcacctaagggcgagatcacgcggccgagaaccaaggccgcatcccggatggacttcgggtgactttcccggagttctggggaatcccctaacccggggagctgcagacgactcactggccccgggccgcggttccgcgggtggccgctgtacgcttgagacacctggtccgcagaagtcaggtgcacgtctgtgcaccgtcgtgcgttggatgtgcatggaggcgagatcgtggttatggatgtctgggatcacgggagcgtgaacggggcgatcgactgagtgacttgagagacggggtagagcgcaggaaggacccctaggacgggcccacctgcgacgggcggcggtgggggagtggggggcttgccggcgcgttcacaggctctgggttcgcgttcggaaacgctttcgcagggagcgggtcgggattccccggagcagcacggtgacggcgtgccacaatccgggctccagctgtgccgcctccgc

SEQ ID NO: 5544 - DNA, 2392 bp, Homo sapiens
  source 1..2392: mol_type = unassigned DNA
cgaggcgcacttgccccgagtgtcaggtctggggacgcggttccggagaggggagaggggcccgggaatgcggcgggaggggcctcgaggggcagcgggccgggccgggccggggcggaggtggcgggccccggcggggcgggccctcgcgggcggcggtgagagctcccgcacagtcggctgcgagctctgggagcaggaggcgcggtgcgcagcccagcccgggacggagccgggcgccgtgcgagcctcgggagggtcgcggggcgcaggggcgggtcggggccagcggaccaggccgcgccacccgcccccgcccccgccccgccgcgcccgggctccggcgcccgcggagctgagactgagcgcgccagccctccggggccgaggctctgggacagacaccgcgagggaggcggccggcgcgggctctcgtcgcgggcgcagcgccccttcccctcggtaagtggcgagcggcgggcgaggggcaccaacttcgccgccaacttggggctgggttcccgcggcgcgcgagcaaggacggcggagacagaggcgggacacccggggggttggacccacgcaggactctcggggctcaaggagggggcggctggaggacccggaccctcaagaacctggccttgggttttgacccgggcggccggagagaaggcgaagaagaggccgagcagacaggcgcgcggcggacgcgagagaaggacgcgggcgaagcgtccaagacgttcgtccccagggtcgccgagccctcctcctccttcgcttggcgcggcagcaccgcgggaccaggggagtctgggctgccgcggacccaaactgttgctgctggaagccgccggggcggagagcggggaacagggccgggagtgggggccggggctgggatccaccagagcgaggggttggaaaggagtcgagaaggtgaaagggggctgtgcggctccccagcccagtgccccagtttccctaggtctgctgggcacctgctgcgcactcgcctcggcgcccagaccccttcccccgccgcgagtcccgcttcttccccttccagctctgccccatctcctttgccccagcctagctctctccttcctgcgacctgggagaatcggagtgggcttccagagtagtggcatcttgcagatgctggcccgtgcccggctcccgggcttccagagcgcaaagggaagggtaggcagagagggcactgggcgagcaagacctggcgctgggccctggctgcgcaccagccgcctgcgccggtctctgggggcttcgcccaggatccccgacggcggggaggggaagccccgagtctcctgtttcctgcctacgcgggcagggcggggacacgcggagcaaaggcacccggcaacctgaacccccaggtgcgtcccgcgaccctgcaaggagctgctgggtgagcaagacgggaattcccgccaggccctgatgcccaccccattcgtccactcggtttcccagccctggtcgtccaaggggacttctggctcggtcccccagccctcggatggtggcgttatcttagttcagtccctgaccccgggccacaggaaaatcgaggaaagacacttatttggggagggtaccattccgctggctgtatttcagagcccgtccaggtcttggcggtgctagtgactttgagcctgtttctaaactcccgaagaataagagcgtgccaggggcaggtaggcaggtccgggacacctgggttcgcccagggcccccgggcgggcctgggatggtactggggccgcctgccaggctggcttggtccccccactgcgggactcggggtcacgacccagcttgggggagtgggggtgggggccccggagccgcggacgccggcggggggcagcgtggggcggggggcgccgggtgcgtggtgctcagcttggccgccaggaggcgtggcgcgggtccccgcccggagccgccgccgccgccgccgccgccgcatcgcgagtgtccttgagccgcgggtgacggtggctctcgctgctcgcgccccctcctcccgcggggggagcctgatgccacgttccctatgaattatttatcgccggcctaaaaataccccgaacttcacagcccgagtgtaagagattgctgcggaggggagggggcggggcgtcccggtggccagggggagtccgggcggggtccgcggagacgggggccgtagccttggaggagcaagaactccgtgcccccagcagtggggcaagctagaacggcggtcctctcccctggcgcctgggttcgggttttggctgggcaaaagggagggagggaaacccgacggcaaaggaggggcggctcaccggaagggcagggggtccgg

SEQ ID NO: 5545 - DNA, 564 bp, Homo sapiens
  source 1..564: mol_type = unassigned DNA
cgcctccaaaccgcccatctgcgacggccccgcgagcgtgcgcagcccagcccctcccggacgtcctcgcccccgcccgggcacatcgtgctccgcaccgaggcagagaggggcacgcggatcccagcccctgcgagcccctctgcccgccgccacttcacaccccgcattgcctcagctgccgttccagaagatgcatcgtctggcgcgcaaagcggtgcacggtccccagcccgcgcgcagcagcctggaggggcgccagagtccccgtcccacttcctggcggcactgcccccgggcagctccctcctcccctctctccctccatgcccccaccccatcttgggacgcttccaggaccgaagaggcaggagggggatcgcgaggggaaggcgcggagctggggaaggaggagcagcgccgggcgcagcagctcagggcggtccgggaggctgcgcggcgctcgcggacccacgccccaggacagaggacgcagctccgagcatcgcacgtggcttccagattcctcccacccctaccctggcgaccacgagagggggtcgg

SEQ ID NO: 5546 - DNA, 3277 bp, Homo sapiens
  source 1..3277: mol_type = unassigned DNA
cgcggcatggtggccctcgcgtgtgtgtgcagcgcctgcaggtgtcccgcccagcgcctcctgcacaacagttgcaggctggacccgagggtctcctctcctggggccccacagtgcccagaggtcccgctagccccagacaccgccccaggctcccctccctttctgacgccgtccactcccttcctctgcggaagggggacacgctcctctgtgccgaggtgccaggccgctgagatctgctgccctggaggaaaagccaggcagggtccctggccttgggcggctaggaaggctccacggctgctggggatagagacgcggggccaggctaagggttcccgccccgtctaaacagcctgccctgggcagggcagggctcctctcccgcgcccgcgcgctctcggctgggcacggtccggctccaggcctgacgggcgcggcctccccactggacgcgtgcgggagggcggcgaggccaaagcgctggggccaggagggcacccgcctagcggctccctacgggagttggggcagaagacgccgcgaccccgcgcgggtaatttctcccgaggcgcgttccagcccgtggcgctgccggcgcagaccccgcgtggggaccggcgaggctaacccctcctgcggcccggggtcggcagagcacgcaaggggccgcgggccgcgtgggtttgggcgcgccgtggtgggcaagcggggccagcggagcgggaacccgcacaccctccgagcggagccgaggacaggcccgtgcgggccgcggggtccctctggcgccaggaagcggcggccgaaggagacaacgagaacgcagccccggctcagggaggcttaaaagctgagatgctgaacgcagacggcgggcgctcgggggctggggggcgggtagaggccgccatttctcaaaaaggtctccatcgagccggcctctgctcccgcccgaggggcggacgcccgatcccggcacccgggactgcccgtgggtccctgctggctggggacccccagcccccggctgcgcgcagggaaaggctgcagaacgcagagaccagagaagccgggggcggcggggaggggtcggggggccacggctgtagcccggccccgcagtctcggagcctcagtttccttctctgtaccacgggagcgtggacggagggatttccgaggctttgaccgctctgatagccccggggcggggcggggcggggcggctgcgccagccctggtcctgagcccccagcccggcgccggaacccggaccgcgatctcgggagccgagccccgcggtccagatgaaggcgcgagtgcgcgggtgccgggtggggtgtctgagcgagagcggagcttctcaggtggacgcccccagccacctccgggacccttcctgctggcctttgggcctgagaagtgggcgcggctggacagacgggaaacagccccccacgcacaggtggacacccggggataccgggcgcgcgcggcgcctggcaaggggaagctgctggagacgcgggcggctgctcccgcggggcccccttccgaagcgccgctgcgaacgtccagccccggcgacgccgcctgcccgcgatcgggccggcgccgcggacaggaaaggctcgatcagctaggtctgcctccgagaagtccccagcgccccgcccgcacggggtggggactgacagtcccccggggacggggccgggtccacagagcccgggagctgggggaggggaggcgccgggggccccgacccgtgggaagtccctgtacccaggctgcccggcggcttctcaatagcacacggacatctaagaaacgcggggcggcccggtgacccccgctctggacttagtggcgccgcgaggccccactccgagccgttgaccaccgggcactcgggtgttgacgacctgggtccttgggcacccagcccggctccaaacgaccccggcccaagggtgttcagtgcagccaggagggccgaaccgaattctatctcccggacgcggtggtttcccgcccgcctggagccccgtcggaggttcggggacaccacgcaggtggtccatcctcgagtccggggccggagcccgacttccttccccctgagctctcggagccttcggggcagcagcgccggcccaggcgggggcgggggaggagggggccgcggcagctcccagaagggcgggggggacgcgagcggaggcagccccggtggcgcgctcgtgagacccccgccgcgccgcgggcccgggccgcggacaattaaagcgggattcctcccccgctgacgtcggcggctcgaggcccctcccgcggcggcataaaaggcgcgggctccgcagcgcaggcggcagtgggggcctgatagcgcggcggtgtggaccgcgcggccgaagagcgcggcgcccagagcgcgggccgctcgcggagccacagcccgagccgggtcccagccggagccgagccccagccgagccgagccgggcccggagcgcccggtgcccgcagccatgccggccggccgcgccgcgcgcacctgtgcgctgctcgccctctgcctcctgggcgccggggcccaggatttcgggccgacgcgcttcatctgcacctcggtgcccgtggacgccgacatgtgcgccgcgtccgtggccgccggcggcgccgaggagctccggagcagcgtgctgcagctccgcgagacggtgctgcagcagaaggagaccatcctgagccagaaggagaccatccgcgagctgaccgccaagctgggccgctgcgagagccagagcacgctggaccccggagccggcgaggcccgggcgggcggcggccgcaagcagcccggctcgggcaagaacaccatgggcgacctgtcccggacaccggccgccgagacgctcagccaactcgggcaaactttgcaatcgctcaaaacccgcctggagaacctcgaggtccgcgcgcgccctcggctccggttccccctccggctcgctcgcccctctgccctcccccaccccgttccctacccggccaggcatcccccgccctcgcctcagccgcgcgggtgcccggccggtgcctccccgcgcctgcgaggccccgcggcggccactcgccccagctccctgccaggccgcccccgcagtcgcccagaggggaccgcgccgcgggccttccagcacggtccccgcgcctcgcctaacggtgtggtttcccccgcccttgcaccccgcagcagtacagccgc

SEQ ID NO: 5547 - DNA, 5692 bp, Homo sapiens
  source 1..5692: mol_type = unassigned DNA
cggacgccaatcccacgaaccctgcccgggctgggggcctgggacgctttccctggactccaggatccgtttgtacggagtcacagaacacagcgttatcgctcgtccgagcccaggtaccctccttccttcccggggcctgcgtcgcctgcacgtctctccgcagatcctcgcggaaacgtgcacagtagggctctgaacagaacccaggctgctctgagccgaaccctctccggcccggggctgaccgtgtccatccaagccgccgtcccgctccccgcacccccgacgcggggccacctcctcccacctccctccccactcaggcgcttctcccgacagcggagggagagtcaaaaacccacaacccggcggcgggatcctgccggctctagctgggcgacctgggcgcacccgccggcgacgcagtctcgggtctcagcgcatagaacccggccgcccgcagcccctcccgccagccacgccccctgggccttccattggccaagccgcccgcgcctccgcgtgattccattggcctgcgccgggggctcagacaaagggagcagccgcggagggcggtgattgggcggggttgggggcgggtcgggcgggcgcgcgggtcgggcgggagccgcgcgctggagaggcggggagcacggcgctgggggaggggcgcggtgtttcgggcccgggaccgggaggcgcgggtgtgcggcgaggctcgggtgccttccctcgtgggggcggggcggcgggggcggggcggttccacgtgggtggggctgggcgccccggagggcggcggccgcggggcgcggggcgctgggatcccgcccgctcctccgccctgcacccctcccgccccggggctcctgcccggacggcggccgccgccgcctcgtcttccccgagggctccgcgtccgtctccgcagctcggccgggaacctgggaactcggacgcagaaggacgcgcccgagccaggacccgccgcggggtccctctggtgggccgtggccggggagaggacgcgggccctggcggtcgaagacggacgcagcgcccggaaaggcgagccaggtctccggctcctggcgcttcctgtgagctggctcggcggggtgcgtcgccggggagggagggactggccgtggggcgagcagccgggcggggagtggcttctgggggccttcgccagcggagggcccgcgaggccgccctcggagcgccgccaggtacgtgcgttttccttgtttcccgcgctcccagagcgcactctcggtagggaacgaataaaatcccggctggtgtgtaagagcctttcgctgcaaacgtgtctttctgcgggattcggggagccgccgaacgcggggtagaccccggcccaaagtgttcctgcagcttccaccagggacccttctccaccctcaccttgggctcggagcgggtgccagtttggaaatgcttgtctcttctgcagctccgattgaattcgcccaggaggaggtgcgccctgcctcggcctcagagctgggaggaccgggctttgttccccgaagctctcccaccccgtcctcctggaaaatgcggattttttctagtagggatgctcagttttgagggggttgttttcggaggaagcttgggttgggaaagcccgatattggccccaatctggcgggcagcttcccttgtcttggagcagcccctcctagcccccggagccccggacttacacggttaggagacgcccatgggctttgggggtattctgcggggtccgaggaggccgggtggcctgggcggggtccgaggaggccgggtggcctgagcggggtccgaggaggccgggtggcctgagcggggtccgaggaggccgggtggcctgagcgggctccttcccctcccccatgtgcacgtcaaacaaaagaatcttcgaacagttttggggacagaactcttcggaatgtgagcctgtcctccccgccccccttcctaggaaggacaggggtctttcaacaaaggcaaggctgcggttggagcgggctgaagggaaggagcgctgttattttggggtacttgatgaaagagaaactcactttctctttctcctcccaaaattagaggcagctgagtcagagctctccctactttcttacctgattaatggggtttcacacgatgtttgcatttggggtgactgggtttgaagactttcagaagtgggaaaggatcctgcttgtgtgggagattggaaagctggcctccacccggtgggggatagaacccctatggagtgaaatggattccaggccattttgcggaagattggaaatttaaggatttgacgggggggcggtgattttgtgtccttttctctcccccctcccccctccccagtttagaacaaagggcggaggcgaaggaggcaagatgggtggtgggctcggaagccggagtcgaaagaagaatgttataaaagtccctcacttcccagtccccgcgcactcccaaatagctcatcagagtttgggtggggacaaagtgaatgaccgcctagagtcgggtttggtacccatggcccggttttcggcgcgggcgtccggagcccgggggaagctcctccagctcgtcccaagtcgcggttggccagggcgagagaggtcggggcacagcgcgcggtttctcctgccgccttcgaggaccgagactcggggttcgcggctccctgactgcgcaagtctcctcgcccctcctgctcccccctcccccccgccgaaagacgctcggagcgcacacccgcctgcaccaaagccagggatctcatttctctcaaaataaaacaacaagccataaaggctcctgattccagtggaaaaggcgccgcagatttatggtccctccaaatccccacactctaattatccctgtttttagtttacttatgggtggtgaccaataaaatgattttccattttgaatttttttttcaacataaaaaatgcaagcttcgcttccctcttacccgcttggatggatcttttccgtgcgggaagcaaagaaatcccgtttccctcggccttatcggcccagggctgagctgctgcctccggttgagcgaacccggcctgccgcagcaccccccaagcacccccgccccgcacacccttaattgcaatttaagggagaatattctttccgtcctctcttcgcccaagggcatttgcagggacccctccctagaagtcctgtcgtgggcctagcggctagaagggccaccccgcagagcgggtctccgacagccccagcccggtcacctttcaaactgcgccctcctgggccccgcattgggcgcgagcctggggcgcccaagggcccccactgaggaggaaggttgccggaccgagccctcgccaccgcttggcgcccccatcccccatcctcctccctttgttcgcctttccggacgccgacttggagatggcaggaaaaaaaaaataatcagatggaaatcaaagattagcctgggtgcgcgggcggcctccgccgggccgggccatgctcggcccgcgcctcataaatcttcctcgcgacgtgacaacagccgcggcctcgtttccctgggaactcaggaacgcatcgatcctcctcgccgtccgcgcaagtcccctcttcgggagcgagaacggagagtccctggtgaccctgacttctggccagcgcaggacgccccaggccccagccagggtatcatgcacaggagtggaggaaggtggaagggaaggggcccaaccctcacccaagaaagcgcagcaaatacccacaccccgcaggttaaaccaaacacattattaggggccgcatcttctctcctccgcgccgcctgagaagggggcggaaggaaggacggagaagggtgaggggcggattaacccctccctggcgactcctttgtctggcccggacattgctgagccgagtggggcgcccaggagccagcgaggggctcccgaggcggccccggctcggcccaggtgtgcgggccgcggtggggcgcaggttcgcagcggagccacgagatccccgcgcctccggctgacgtccgggcgcccagggtctgcggccccacgtgcgatccatccgggagctgcgcctcagacgcctcgtggagcgggggagaacctgaaggaagtcgtggcgcgtttagatattttaaaaactcgaattaattgggaaaataggaagggcgcttccaaacgcggagaagacatcccggggtggggaaggatgtcttttaaaaattatatccccttgttgtggcggttgtttttgacctttcctactattaaaagaaatgttgccacgtttaatttttgttgccatgagatatggagggggtagcccagcattttgaagtaatttgataagccttcaagtagtaaatccgaaagggaggccggcggcccaggtatagtttctttgtaacctgaatttacaatgaaagcattctcctttatggatataatagattagatttcacaacttaattcaccggaatggctccgtttaagggagctccggctgattttattacgccaagccaaattggatgtttgtggtcttaacgaaaagcgatcgtgacataaaatatataatttttaaagtaaaaaaccagcgggttggatcctgtcccctcccctatccttgctccttactcccaatcccccagtgtgggaaatacggataattatttgtgtgtgttggtttctaccggggagacaggcgctctgggctccttccccggcgggccagaggcctcgccggccagtgcgcacgcggcgccggttcccgaccaaggctccggcccgctctgctggctcgtttgaaacgtcgacattctcagcgcacgatccggggtctcgggggcacccatggggcccgaagcctctgcctgccggcggcgaccggacagctcccccgggcgcgcagggtagaggaagcgccctcgaaagcccccgcacgcattcacgagccggccctgcgcgggcacagcggcagccgcggcgggacacccggcagggtcttcggcgctactttgtgccaaaaactgcgctcccggagacccgggcaccgccggcgtcggcagctagagcgggacccagctcccaccgcgtcctccactggagcccctttcggcccctcggcgagtgcggcccgtggggagtgggcgtcggcgcgaggaagttccccggcccgggcgaccccggcttctgagcggcccctccccacgtcgccgcccgccaggccgacggaggaccggggcggggacgggggtctcagcggcccattctgctgtcacttctgacctattctccagcaacggcgcgtccccccctcggctttttcgcgaggtttgttgaagacggatttagcccccgcagagctggggaaggacggatggacggaaggcccagcgcggcccaccccttcccctcgtcgtctcccggctggcaggagccgcagcgacagcttcggggagcggggcctgccccaagacccccttcgcggcatcgggagccaggcgtggccggaggcaccgcggctgctccacgtggctcccgccggccgccaccccgcgcggggaggacgcgtgcgtgcggtgcgtggccggcgggctgcggggacgcgc

SEQ ID NO: 5548 - DNA, 7937 bp, Homo sapiens
  source 1..7937: mol_type = unassigned DNA
cggcgggtccctagcgcagccctgcgcgcttcccccgaatctacccgcgccgcctggtgacctctagggcttcaggcgtggtagctgcccctaccctgacctccctcgacactcatatcaaagccaccgggaagagggctgccctggaggcctgggcccgctctgccaaggactgatcctctcgggcagggagtcagaggggaccgcccgagaggatccgtccctgcgaggcccagcacggcgccccacgctctcctcttggagcaaatccgcctcgctctcctcttggagcaaatccgccgcactctcgcctgcaccgaaatcctgagcgccgccccgcgccacccccagcccgcgcccgcgctgccctcctccccgggccgcaggctgagaggctgggccgcactctggccacgctttgtccggctttagcgggataccagaggcactcgttaaggcaaatgcatccctgcaaacccattctcgccctgacactttaaggctttatatagaaacaggatttgctcgtcttacaccagcagtccctattaacgctcgcccggcgcacacaccactctaatccgcgaggccgcggcgtaccctggtcccctccccccgccacaacagccgttttgtttccgcagaaagcgcctcgttgtcccagccccggaacgtcttagggaggtgaatgcagaatgcagaaaagaggtttccgtggaatttagatctgcaggagggggcgggggagggtggcgaggcgcggaaaggctttaatttcagccggctccggggctgcccctccgagacccccgggggagggtggccagggaagggcctctctaagccgcggcgacgcagcttggggggctggcgggacgcgcggccccgctcagcgcccaggcagccaccgcggccggggccgggaaatgaaaccaaagcttctctgctcccgggagcggaggggtgggcgccctgttccgctctcgaacgctcccgtcccgcgcccgccccggccgagcactgacctgtgtgcgaagccatgggcaacggcgacgggaagtactttcccggctggaagtgtgcggggggctgcgcggcgggcccagccggggcgagacgcgcggcggcagcggcgctgcggtggcccaggctcccgcgctccgacagcagatgcggcggcggcgcaaagtcgcggccatccatgccgggccccggccccggtccgccgccgcttcctcggagcagcgcggccggggcccgggggcggctcggcgcgcgggcggcgcagaggcggcggcgtccggggtcacaggcggtggtggcggcggggccggtcagcacgcgggaggactgggcttctcggcgggcggccgcgcaccgagccagcggccgctgtgcgggtccatggtctgtggaggcaaaagcagaggagacacgggtgactggggggctcggctcgcccgggggtccccgccccgcccgctcacccactccccccaccccccacccccgccggcccgagcgagcggcggccaggccgggtggcggggccggggcgctcggtgtctccccgccgcacgcgcgcgcagcccagcacccggggccccgcgcgcgcacgcaccgtcccggccacgcttggcccggggcagccgggggaacccagccgcactgctcgccgcctcccgttctcgtccccgcgggtccctgcagctagggcgccgcggcgaagaggctgctggctctgctgggtgataaaaacccaaatctgcgaagccatcacgcacactcgcacacacacacacacacacacacactcacacgcacaccctctcccctcccccgctgcccaaaggtgtctcggaggaaaaggcctggggtccacactagctctccccctctccccacctcatgccgaggtccagcttttactgcattccgcttaaccgaataaccatgctaattaagcgagtaattttattgattgtaactcaagagttttttttttttttaataaccttccttttctccccactcccatccccctcatgcatctttcggcccattcttctgaatccaccgtggtcccccctccccagccccagcgggaccagctcctgtccccagcatcgcgctaggaccccaggccggctcctcagagccccggaggcccgcaaccgccaccggcatcacctgggccgccacgccgcagtgcccggcctgctgtcccggagccgggagcttcctgttgaggctgtaacaatcaccccgccccccaatcaaattcgcccaggatcttcctctgcggattgggggcttgggggtgtgtgtggggggggtgctttcagagtcagaatgctctctctcaacggcccaaatcggccctgggatttcttccttcagcgcctgccggggaccgcgagcagaggccggtctccgctccgggcagtaccgggcggcctgggtacgcggggtctgcggcgcccagctcggccctctagccggggaaggtgggcccggcccagcacaaccttctgccagcagaccctgcccggacctcggccacctaaaataaccctcacctccattttcttccacccccacccaacgcggagcatccactcaggcgaaattggggacaattttagactctgggtgcggagggtcggagccagtgatagaagctgcgtgcaccaccgtgctcccaggcgtccctccgaaggcgctccctggacgcacttcacatattactcctcatcttctaaatacgtattgttttaatgtttatcacctccaacaaaagggagatggataggcttgatattcctaattaggaactttgcggaaaaccttgtgtttttgtagccattccaccatgacaacaaagcgattaagatgttttccatctactgaatacctttttaaattgcgatattttatggtccgggttctaaaacgtcttatttgcagactattttgtgtttgatttaatctataaccgaaaacataatgtattaagtgaatacatatttgctcagctgataagcttttttaatatttattcggagagcttttgcattgtaaataaatgggtctacacaaagagttctctttgtctggcaactacatacaaaggcgtttggggctcccttccctctggggatcgccagctctctccccgggtctaacaaatagctcggctcccaagccccgatcccggcctgcaaagcgagcgcccggccgccagggcccggagagtgctctggcgagggggctgcgagcgcaggggtcaggggaggggctgcccgggctggactagggacgtgggggcccccagccccggccggcgcctcccgagccccggagggcgccgggcgggacaaagggaaagaaggaaagggagggaggtcagaaacctgcagcttcaaaggcgccgaaggccggagaggggccgggggctgcgcacgcgggggtgccaggcttcctggcggcctccagggagtcgtgtgtgctgtgcttttgttttgtggttgtttttttttttttttttctctccaataagaaatttcaaagttgagaaagcgcgagctgccggcgattctcgggacgcgggctcggctacgaagcaacaattttaatctcccaccccctgcgggcggatcgcaggcccgattgttcctttctcaccagcctgctcgactttttaagcaaacaggaggtggattactgtcgcctgcctgcgccgccacggctctgaccggattggagagagcttttctttgtgttctctcctcccggggagaggccgcgccgcgcctccgcgtctgcccgcgccgggcttcgggggcctggggagcctgaggcggccaggaagtggggcgaggaagggcggccacacggcccgagctgggagtcccacagtcccgcagcggcgacgccgccacccgccgagtgccgaggcccggggcccactcccagcccagctccaggagaggccgcgccggaggaccgcgaggacggcgccgcagcgccaggtcgggctgaggtaagggaggaaatggagcgaaaagtggcggcgggcagagggccccgggcgggcggagaatcgctgacgagggcatttcggaaggaactgaacctaggagcacagggctccctcccgggaaggcagggcgtgaccctggagccgccggtccctcttgccgcggccccaggcgtggctggcgcgctccaggatctggagcttctacaagtttgctttgtttcctgcttttgcatctaaaaacccgctctctcctcgcccgcctgccggagaccaggactctggcccgtctgcctccctccggcgtcgtctccgggagcgcgggcgcggtggggcctgcaggccgggctgggaccaggcgcgccttggggcgcgagtggctcggccgtcgccgcagaacccgctccctgcgaaacagccgcacccgctccctgggagagtcatgagaactggggtcgcgcctgacccccgcgcccgaagaaaaccagcccgcggaccccgccacacgggccgtgacccgagccccgcgcgccgtcccgaacgcgcgcggtgaaaacgccccgctgcgccggccttgctcggtccccctcctccacccccacttctccggaaaaaaaaaattctgaattgggaacgaagacccgaaaaactcgccatgaccattcccctccccggcccctagcttcggcccggaaggcccctcagggcagcggccgtgggtaccacgacccggccagttcccctcgccgcggaccgaccgggcagggccaacccaggactgttccggggaggggagcagggtaggggagcgaatgttggggttcgttcgtgggtcacccagaactgggcgcacgctggcggcgcccggacttcgcctactgtccgcccggtgccacccgcgcggctcgcgccagacgcagcctggcggtccctgtcctgtcttcgagtatttgtttttaatgctgggtgtcgatcgagacaacaagcgctcagagcaaagcaaggatgcattacgggggtaattttaaaccgatcgataagatttttcagagaaaaaaaaatcgctcatagtccatattttttaagaaaaaaaaaagcctcaacattttaacggattttgttaaaagggaagatatatacttcttaacatcacaatcctgaatttcttttgctaaaaaaaatgtaaaaccccaaagccagaataaaaaataaaataataataaaaatacaaaaacaaaaaaaaaatgaaagcaatttcagttacttactggaggctgtttcctggatacaactgaatgcaatacaattaaatcagtaaatgtgactttgttttgtattcctattggtattttcaatgtgctgactgttgcactgtaaatgcaccgcttccacaacaacgactctagcgagcccatccagagcggctctcaaacctgcagcctggcgcggcgagccacgggccctgcatactaataagctcgtgccactcagcccggaacagccagcgcgctgattggccgcgcagccctccacggccgggagctcgtgccactcattcggcgtaaacaggcctcccaataggctggcgccgggccagggaactgccaatcaggaagcagcggggctactaccaagcccgatggcgcctaattcaagcccggcgactgcgcagctcctctgcgcagatcattgctgctgaatgggaatgtggtggcgcagggcgggagagggagctggagcgagcgagtgcgcgtgtcccggcggagggggaggcgtagacacagacacagacacacacacacacatatatgtttaatccagcaggtctaacgtttggcttctgccgcacagaaggccaagggaagaaacaccaccaccccttaaaagtagctgctttttctccctggaatctgtctggcaggtggcaggtaggccagacctccaagcccagaggcctccccaggttgcctggcccatctaccgctctgaagctgctgcctgcccggacccgagctcgcggatgcacgcacgcacgcccgctgcttgggcagcaaaagctttgaatagcccgtccggctctctcctccccatgacctggggatcagaccctgggaagtgagttctgagtctccagccgtctacattactggctctcaattttatctccctctgccacactttgcaacagagcagctactaaaatgaaaatcagggatttattgagaagacaaggattgccctttcttcatctacacctagatttagaaaatattttcagtttggtaatgggggaagcgggtatggtgtggtaaaccatgtatagtatttctcaatgctgctccctgtctgcctatctgctaaatcctcactccaactaaagcaagccactgaacaatttttatcgtaatcagatgcaaaccacttctaaaatattccgcaaacaaatatttctgttagaatttggtttcccacccaaatgctatttattctcagggagtcgaggtgatgtcttagtggcgatggatacatttatttttgctcctctttctccatgtgaatctctgcctccccctctgggggaaaaaaggatatttaaactaggagccaactgacagattcacacgcattcgaaattctccaccgtctcattccggcagggacacgaaagagttaaactcaaagcctgttgtctctctgtttccccgcccccactcccgctcccgcgggaccgctgggattggttggcactccgccagtggactgtccatcaccgagtgtaaacaaggcgctgattggctgttgtccagtccgcactgggcctcctgaaaaaagcaattactggctccgcggtttcaaggcggcccaaggccgcttgatgaaaggagataagctggggaccgtttccaggatccccgcgggccgaccggggcagcccgggagccgaggtgcggcggagagcccgcggatcaaaggaatctggagagaaaggggaagcgggcggccggccccggccggccttcccccccgcaggccacgccgacctggggtggggggctgcgggccgcgggcggggactccgggatttcccgcctgcctgagtcggggcctacgccggcgcccgcttcgggcggctcggcccggaggggagctccggagagcccggggctcgcaggtaagcaccggcgctccgcgggccgggccggggacgcaggacaaggcgcggggcccaccccggctggctcgggagtggcggtcgcgcgggcccggctcccgtctccggcgtctcccggctccggcggccgggaccccccgcggccgagcccctggccaggccccaggccggcgccttcggaagcgacgtctggcgggccgcggggcacgagggggagagccgggaagcgtaaatccccgaagcgcgcggagatccgattagcgcgcggctattcattaggctgggggcgattgaattaggtccctgggcgcggtcgccggctgggggtgtgtggcgccgacccccgggctcttgccgtggcctcgggaggctggagcagcgagcagcggccccagcgagtgtgtcggggaagcgggtgcctccgggtcccggccccgcgggtgcaggcggaggctgcccgcttcccgcgtacaccgaggacggccggcccggctccggagaaatggcgcttgagaaaggaggggaggggaaggttcccggaccctgggcagggacccgtcgccggggacccgcggagccctccggggatggaggaggcgcgagctggaagcggcgcgcgagcccgagcgcggggctaacaccgtggggcccagtctctcctggctcgggtaagtggacgcgccccgaggccccgggtccacgcagggcgcccctcgcagacggcgc

SEQ ID NO: 5549 - DNA, 1408 bp, Homo sapiens
  source 1..1408: mol_type = unassigned DNA
cgcgcgcggcagccccgaggcagcagagcgcggagccgggagcgcggggagcgcgggccggcggcggcgagggaggacgggggcgcagacggccggcgcgcggcgcggctaccatgggcgtgcggtgagcagccgctcgggacgacttcctcggctgcgcggcgctcgcgcggagctccccggccggcggtgcgtccccacggtcaccatgaaaggtagggcggcggcagctccgcggggctctgggcggggggaacgggcttcggggcgcgcgggaggccacggaggtgcctcccgcgcgaaccttcccttgggctgcgggcccggggagtcggggctgccagggcgccgggttcgtgcgcggacactgggggcgcacccggctcccgggtcaggcgcggctggagacctcgaggttggggttttgaagcgcgcaagtattcccctccccatcgcgtctttgcaagtagtttgaagccctaagtcgttgtttacggattcccgtttccaactttttaattgaaaaaacctgccgaggagagtggaggcatcgccatccctcccggtcgcttttccacgccgcagcgctccccacgctcgcccagtcctctctcctcccgcctctagccgtttcccggcccgagcggtccccgcgctggcggccgggtgttttctccgggactggggatgttctccgtgcgccctcgccacatctggcaatgattaggtgcccgaggagttcagctggctcgggaagtgcatttggcatctttctccatcagattcaccgactggaaaatagttgccctcggttccgcgtcccttccacgtgcccgccttggggtgtgcccactggtgttttggggtgacacacctcagctggttagtcgccccctgcgcggtgtcctctgcaggccggtttatggaagtgtcagatgttatcgtactttagaaagaagcacgagaaggactgcagggcagccttctgtttagtggaaacacggagatttgtcagcggaatcctgatttatgtatgagataagtaaccgcagcggaggcatcaaagagtcgttcaggaatgggcccgcgtggtgtttacacaaggcttcgtgtgagagttgctggttctgtgctaggataacacagccctgcgtgggtgcgaaatgccatctgaccgcggtcaccccgcttccagccgccacagacctggcgatgcaatcgctttgacttctagggttgccgtccgagggaggcgcccgggaagccccaaggcgcttggaaagtaacttttggctctggaaagttttttttctgaagggcagctcccgcggaactaaccggagcgatgatatcctaccaattcactccctttccaagggcgttaggtgtccacgtcgggagacctcgg

SEQ ID NO: 5550 - DNA, 208 bp, Homo sapiens
  source 1..208: mol_type = unassigned DNA
cgccctcggggccgcgattctcctcgggaggtgtctgcgaaggcggctctgccgcggtgggggtggggaggctagggcttcggaccgctggagttggggtcgcagccagttcctggcgagtgtttcctggctgctgccgcaggggcttgctttttcggatttcccctctaatctcgccggacttcttccccttcccccccacgcccgc

SEQ ID NO: 5551 - DNA, 805 bp, Homo sapiens
  source 1..805: mol_type = unassigned DNA
cgtcgtccgcggagcctgaccctgcgccaggacggaggaggctgtgcccatgtaactgtcctgaagtactgcggtggccccctcccccgcggctgggagggcaggcaggacgaggttggctttcctcgcacggtctctgggcgtgggcccccgccgcagctccgcggagcctcggtgtctcctgcaacagggggcggggggaacagcggcgagcagccctgggctgcggcttcctccccacgcccgagtctcctgcgcaccgccgccgaggacgcgcgcccgagcctagtccccacgccgcggcgcgcccgggctccctgctgatcccaggtaacttttccgcctctcggagtgggggactgcgagggggtctcggctttacgaggtgcggaggaagagcccgaggcctggggcgaggcgcgcgggacagtggggctgacgcgtggcttcggcgccgcgcggtctcccgaatcccgagccccgcgcccggcgcggccggggtccccaaccgccctcccgctcgccgggacccccaccgggccgagcctgcgcgccgcgccccccgcccgctccgcccgccgcggcgcagtagtggctgggccggcgcgcagagcctgagccccggcctccggcctgggggcctccctgggatccctggccgaaggggcgactcggtccccgcgtcccttctccgccaatttgcacaaatcccccgcccggggcgccatgttttaagttgcccctcgggctgggggcgagcgcgggccggcccctcccccggggaggtgcgggggacagggggcga

SEQ ID NO: 5552 - DNA, 2462 bp, Homo sapiens
  source 1..2462: mol_type = unassigned DNA
cgagcgcgcggctgggaggcgggctcagggcggggcagagcgcggggaccgcccgggcaccgggcgcagccaacgagcggacggggagggcgggcccgcgagggctgagcggcgcgggctgtcacaggcgcccgaagcgcgctgcaggtggcaacttggaggtgccgccaccgcagctgcgggaggagcccgggtctggcggccccttccagcctccaggagctctttcccgccgccgagcccgagactggaccccggagaattcgaaggaaagagcccctgcggagggacctgtgagcagccctacctctctctgcccttgcgctactttttttctccaaggaaggttgtgcctgcgggctgcgaacaagctccgggaggggccccaaaggaaggcttcggtgactcaggtgagcgcctttctcttcttggcagccgggcgtaggccgggagcgccgcctagccccgtgggcaggggcgcgggtgcgggccgcctgcccttggctcgaggtcgatgggggagaaagcgaggaaggggcgaggctggcccgaccgggggctgcctggccgggtccgcccggaggcgacagggactctcagacgggcacctggagactagggacgagcagagaggtgctttgagggggacagagggcttgcgcccggtttaagctgaccgggatcgaccgcctgcgcgctgtgttggagctgccgcggaagccgggcgcggcgcctctgcgaaccccagagctagtgcgcggggcccggcgagcgcaccagtcttcggttcctcggagcccaaggccctggaggacgtcatccctctccgctcgggcaactcctcctccgccccctcttgcctccacccctccgcgccggccgtttagcctattccgagactctgtgcttttgccagcgcgcgctagttgctgctgtcactcccctccccgccctcgccggagttggagcgacctggggtctggctccccggtcccggcagcctagttgtgggctggacgcgagtggggctggccagttctttgcgaggagggcaggagtgagcgcgggctctctctctagtgctccctccgaatccgtccccgcccccctgcagctcgaaccgctagcccagagagcggagtctcagaagctagaccttgctcgccctggggaaacgcgggggaggggggggccttccgggaaggtgcgaacctcgcagatgaggccagagcctccgcctccatctcagcgtttcagcccctgctttcctgctttcaagtggacagtggctctgacctccgcattccggcttgtggcgtggggggcgctagcggcagtgtgtgtgtgtgtgtgtgtgtgtgtgtgtgtgtggtgtgtaaggatgagcgagtgcgatcctccgggaggcagaggcgcaggagccagttcccccagcccggcggagccgcagggaccgcctcccctcgccgccagctgcgcgcagctgcaccccggcaactccgcgctgccggctcctctcctccagctccagctcccggtacccccacgaccaacgcggaatcccaggattaaaatcatctggccaaagggtgcgggtgggggatcgaggcgttcccgaggcgaatgaggctgtttttcaaaatccgggaggcgcccctcgcccggcgttgcatcttcccgtggctcggctgtaaggacctgcggtggaggcttggcggaggcgggcccgcgctccagagagagcgtcacgtcacccgagaaggcgacgctgggggctgctgagcctcccaactccctttggcgcgtcctgctcagaagccggggagctcctggccggcggctggcggggaagcgcggcgcgggaggtggggtggcctggctggtgctgcgggagggcgccccgggcgcgtcaggggctgcgtgccgcggctggagggcgcgccgggagctgcggcgggctcggggcacccgagtggcgctggaagttgagccggggtccgcagggctcggtgaccgccctggcgccgccgctgcggattcgggagcagcaaccacgcggcgcgttcggccgccccctcggcccgccggccgcgtctttcgctttccctctgcagaagtgaagccgccgcctgggctcgctcgggctggcgacctttgcgccagaaaagcctgaggtgctggaggcgaaatcctcccgggagcgaagggcggcgtccacaagacaaggaaagggaagacgccgggctctggcgggtagcgcagtagcgggagggcggcgctgagcgccaaggatcccggaggcgaggcgaggccaggcggacccaacccagccaggaggtgctgcccccgcccttggggctctctcacaggcacctggtgttagttacagacccccgcccccgccagtccgcaactccctcgtaattccctctgaagtgcgatggattaagactgggccgcga

SEQ ID NO: 5553 - DNA, 990 bp, Homo sapiens
  source 1..990: mol_type = unassigned DNA
cgcatactctgtgcggcccgagtggtccggatggcacagcccaggtgtccgggctaaagttggcatctccaaagtccagaacgcaacttgggcgcgccagtacaaactcggccttcggcttttctgaagccagtcaagttcgcacagggcccccagcgcctggaaatctgagaggcgtggaagggtggggagtcccgcgaagtctccagtccctgggtgtcctccggctccgcgggggagcgggcctggagctaaaccggccggccgtaggctggagtagcgggcgccggagcgcgcggtggggatgtccgaaaaggagttagaggctcagtcggagagtccgagaacacgagggatgcctaccttgtaacatggcctcaagtttcttcctgtccacgcggaagcgctcctcgctccactccgggctgtgcagggtcgccccggcgaccaagtcgtcctcggagccgggcactggggagtcggtgctgcgctcgctgttggagccggggtccgactgcgccgccaggtagccgggctctccctgggcggccatggtgggcgcgcagcgctcgggctcccgctgccgccgccgctctgcctgcgctgccgcctccgctcgccggccgggctcaactggctcccagcgccgcggcgctagctcgtccccctgcagccgccgacgccaccgccaacgccgccgccgccactgagcccccggcgcatcccagccccgggcgccgcccacgccacccgccaccccgggtcgcggccccggtccgggtccagtggctgcgccgccccccgccagcaacgcccgcgcggaatgagcgcgccgcgctgcccgcgcctccatccgcagggctcggcgccccctccccgcccgccgcccctacagccgcgcgctcattggcccggccagcccacggggagccgcggcgggcgggcggcccctggcgctcacacactcgcgcgcgcacacacacaccacgt

SEQ ID NO: 5554 - DNA, 2274 bp, Homo sapiens
  source 1..2274: mol_type = unassigned DNA
cgtgccgggttcgcccccacgccggacccccgactccgatccacagatcctctccgtgaggggttcctctgggcttagaacgcccccgcgcgcgcgtgcaggcacacacgcgcacacactcacacgcttgctcgcacaccgccagtgcctctccttcccacctgggacccccgggcagccgggctggatgaacaagttgcagctggccgcggcgctccgctagggggacgagggtggggagggggagcccagcggggcgcagggccgtggccagggcctggggacctgcccgcttccctccgcggccgccaagccctaccgctgggaccggcgaggaactccccccagcctctccgcagacgctgcacgaccgcggggacctcccggggtcgccagccgcgccgggcagggggcgacagggagggcagggcaccgggagatcgccgccgccggagcggccgccagttcccggcgatcgctgcgggcgcagccgaacaccagcggcctgggcccggccgctgctcggggtcggcggggaccgcgcagcgcctacgccaggcggcccggcggctgcaactgggaacttcaagcaaagttttctgctgttccttttgcagccggccagggactcaagagtgcaagccgcccaaccttgagcactagcccaggccgcggaaggacggcggccgagctggcagtcccggctggggagctcgccctcggggtccgtccgctccgcccgcccgaggactgggtgcctgccagccccacggcccctcgcccagcgcccggctcacaggcagaagcggtgtccggcccgccgcgccccccgcccggccccgacgccagccttagggctctaccaccagggagctgtcggcgtcccgggcgtcccgcgccggcccgcgcgcctcgggggcggcagaggcggtcccgcttacctgagaacgtctcgcccgccgcagttagcaaaagtccggccaaagtcgccaggcaagtcccaagtcccctcatggtgctgagtgcgggccgggccgctccccggcggcggtgggtgggcgcgcgagggcggagggggccgggagctttggttccgaggcagcgaggagagacgggtaaacagcagagcgctaagccaagcccccaaagtgccaacagttgcagaagtccgaactccagcggctccaggggcgcgggcacagggtcctgggtcctcctcccctgtccctggccccactcggcgtctggcgccgctggcagagggagcggagggcgagcccgcggagccaaaatcttccctcggttccggttgctgagctcgccgcctctccccttcccctgcccgggacccgggacccgagctgccggccgtggccgtggcggtggccgtggccgtggccgcgcgcgttccgcccgccgcctctccacaggcagccccaagcccagccccgggcggcggcgcgccgatgaccgagcccgcgccggctgcgcgcggggctcttgctccccgactgactggcggtgccccgcaggccggctgaagggagcgctcacgtcacggccgcccggcgccgccgcggcccgctagagggcgtgagcgcccgtgccccgccggcccgcgcccgagcgcctccgggagctcggctgggggcggccccgcggccacagccactaccgccgccgaagcgggcgtcagccgcgcggggaggagcggccaccgggctccccccgcccacctcctcgccccggccgcgtcttctattttggtagctggctctggggagggtgactgtggaagaggctgcgccgccgccagaagtttgtcccgggtcacgagccgcgagtagtttgtgagcgcggccgggcgggaccagcggcctgcgaccccgcgggcgcggccaggcggcttcgagcctggcgccggacggcgatgtcaccgcacagggccagctgcacccggagtcgccgggcctgcgctgctcggcggctgcgggaaaagcgagccaggagatcgctgaggctccggagggctgcgagcttctctacgccgcgggcggagcgaagttggcgggcgccgggagatggcgcgggagccgggagcgccgagccccgcgatcgccagcccgctcccggccgggcccgccgggtacacgccgctggccccgagcactggcgcccgggaagcagggcgcgcttctgctgttctgcgtcctcatcatgcctcggtgtcccgtgtgggcccgaagcgagccgcaggcagtacacggaaggcgg

SEQ ID NO: 5555 - DNA, 882 bp, Homo sapiens
  source 1..882: mol_type = unassigned DNA
cgaaggctgtggccgcgctcccgccggccagttcccagcagcagctcatcgcccctgctccgcgccttcgctccaggcccgcacggtctcagccccgcggggatcagcactgagccggtcccgccgccgccccagtgacgggctgctgctgcgggaagccaatcgcccagcgcttggaggagggcgacgaggccttccgcgcgagcgagtaccagaaagcagtcgggctcttccgctccatgctggcccggctggcgcagcccgaccgcggccggtgcctgaggctgggggacgctctgacccgcgccggccgcctcccggtggccctgggcgcgttccgtgtagccgggaggctggaggcgctgcggccggaggagctgggggagctggcgggcggcctggtgtgtcccggcctgcgcgaacggccactgttggcgaggaagccgggcggcgagctcaaggctagggagggccggccctggcgcccggcgcgccccgcgacctgcttggctgcccggggctgctgcacaagccggtgacactgccctgcgggctcacggtctgtgagcgctgcgtggagctggggcccgcgcggccacgggcgcgggcgcgggcgcgggcgcgtgaacgtagtgctgagccgcctgctggagaggttcttcccggccgagtgcccgctgcgcaggctggagggtcaggcgcggagcctgcagcgccagcagcagcccgaggccgcgctgctcaggtgcgaccaggccctggagctgtgacttggctgtggggccggcccgcctccctgacccctgtcaagcccagcggctggagctaacccgcgggcctgggctttcgagcgctttgtccaggcgtagggggtcacttcgc

SEQ ID NO: 5556 - DNA, 4359 bp, Homo sapiens
  source 1..4359: mol_type = unassigned DNA
cggagcgtccaacccagcacaccgcctccggcaaactgcgagcaattcaaagcagctcgcccagtagggaggggagctggtgggaggggggtggaccccgccgcccgcagaggtggggagacctggggggcggctccgctcccaggctgcagcgtgggcctggtcccctgccaagccaggagcgcagcccggagccagcgcggcccccgggtccctgcgcttatggcgagggtcgcgggggaacagcccctggtaggtaacttgccgggcacccacctgagttctccgcaccgcggcccgaaaacctgggagcgtcccaggacaaagggccagccctctggaattagccgtgtgtgactagtgtgtgccagctcgtatgtgggggtcccagtgtgcaactaacttagctgctcaccgcagcctcggagaaacgagcacgcctttctgcacgtgtccagggcgggtgcggcgggcagtgcattgtgaacaaagccggccacctcccgcgccgcacctcggggacgattcccggacggttctccgcggagagccgggcggatgagagcgtggtgtgtgtgtgtgtgtgtgtgtgtgtgtgtgtgtgtgtgtctgtgtgtcttgtgtttccctaaggagccggaggcggcccgcgaggcagggacttgctctaacttgtttcacacctggcgcggtttccccgaagctcgggtggcgtccagggccgggcaggcacgcggaggaccagcagcgttcgctgcagaaaaagacatcgtcaactcccactcagaagcccacactgccctgagacctggtctttcattctttcttaaaaaaaaaaaatgcaaattgatggatgggtttcaattgatgcgtaaaatgcttcccttgagagcaagacaggagggccagggaagggggaaacaggcagttgacataactctcacagcctaactgccgagaattcggacttggaggtaaattcgaggacgcacccgaggagcaggcgaggctgcctcccagcaggacggcctggcaccggggcgcactgctggggacctgactccctcgtgtcccctcaccccagggactcgcagctggcccgcgcgccagggtacacacgggctgcgggagaaggtgaaagttaggatgcagcacgagctccgagagtggcctgggctgtgcctcctaagagaacagccgaggtccccggcggctctgggaagctgcccctgggccgggagagcgggaggcggcgacgcaaggacgcgcccggagcctgggcgcgccgggggcgggcgtttggctggaagtggggcagtgtctcctatgggaaagcgagacccggcgagctctttggctgcttttccagtttccgaggtgcccgcccccgcgcgcctgaggcagcgcagcccggagggcgaacgaatggcggttggcaaactttgagtgagagtgcgctccggatccgaattgccgaattgtggctgcggcagggtcggccgagacacaagttcgctttttccgcctgcccgatgggccttagggagacttcagctccagcttggtggagcgcctcgcccgagggagttgtgtcactttgctcaggggcagggagggcggcgccctgggcgggtggggaagggtccctgtggcccctggggtcccaagcgcctcttccctcgtctcccctcccaccggcccctcccagtcttctctgcctcgctccttcccggggctggctggaccggcgcggacttgccccagacctacggggagcgccccaggtctttaatgacagcttaaatgtggctgttggaaaagtcgaaagggatgtggctgacgtggggcgtgtttcgctcctttgcaagagtcggaaagggagttgggagccgcgcggctggccccaggcccccgcgcctcgccgccagcaagtaggtgggggagccgccgccgccgccagccccatcccgctcccaagcctcgcccgctgcgccctggccgcgggcgccgagagggtgcggggcctcgccgtgcctcctccaccctgctcattaacctgcctgctccgctccgctccgggcggccccagacacgggtttcccgcggcagcacccgcggcccgcccggcgcagccgccgccccgaccccccggctccggggggcaatgagggggcagtggaaggggcactgctcctcgggcattacttagagaaacgagaccgtcccgccctctcgccggccctccctctctcccgcccgggcccgcgcaattctccgccagagggtaagttgggagtgtttcgcccccaccgacagctctccctccctttccttttttttttccttcaaagttttcttagaagtgggagccgggtgggggaggaagaaggtctggtcagcctccgtcctttaccctatctctccggtctaacttgtccccccctcccccctcccctccatcccctgcgcgccgctgcccctccggagctgcgctcgggaatgacaattggagcgcggctcctttaagagcccggctttgcctcccggtagctgaaggtcattaaacacaaaagctctcagcgctgcggtccaatatagcgcatgcgccctgcccgaggactggcagagagacggcaatatggcgagaatgcctggcagcggggactgtaacaccagcgcgggcggcagcgccagcgctgccgccgccgccgccgagaacaatggggagcggggcgagggcgagcgcggcgcggggggccgcggccgccgccacagccgtccgcactactgcagcgcgggcgaggaggaggaggaagaggaggaggaggacgagatccaggaggtgcagataacgggggacgaggaggaggaggaggacggaggtggggggctggaggaggacgaggaggaggaggaagaggaggagatggggctggactgggacgagcccctggagcccgaggactcggccggggaggagctggagcccgagccggtccatatgatcaatatggaccagagcgccgcgctggagcccgaggcgccgccgcgactgctggcgccccgggcccgcggtgggccgcccggggacggctccgagctggaccccgacgtgctgcagcgccccgagcgggcccggctgagcgagaacacccggctggccacccgctacgccgtgcgcatcttccgggagtacctgagcgagaaggcgcagagcccggacttcgagaccatggacaagggggcgctgtgccgcgtgctgcgctccttctatgccgaggcccgctccaaaagcggccagctctacagcaagtcgtcgctcatcagcatccgcagctccctcaaccgctacctcaatgagcccccgtactgccgcacgctcgacctcaccaaggaccccgagctgcgcagcgccaacctgacgctggccgcggtcatccgcaagctcgaggagcagggcgccgggccggtggtgcagaagcaagccatcacgcgcgccgacctgcgcaagctgtacacctccagcgtcttcagcaccaacacgcccttcgggctgctcaacaaggtctggttcgagacgtgcatgtacttctgtacccgcggccgcgagaaccagcgtgagttggaggaggactcttttgggctggccatggacgaggacggtcgcaagttcgtctacttcaagtccctcgggccctaccacaagtcgcgctcgtcgtcgtggagcaagaagcgcgccgagagcagcgacgaggagaacttgccccgcatgtatgagacgggcaccgagttctgcccctacgccagcttcgtcaagtacctgtcgaaacgcaaccctctctgcaaggcgttcttccagcggccccgggaccactgcagcgagggcgatgtgacctggtacgagaacaaagccatcggcaagaacttgctaggcactcggatgcagatgctctccaaggcggccaagctctccaagacctacaccaaccactgcatcggcgccgtctccatcgccacgctcaacagcatcgcgggcattggcaccaagctgggctcgcccgccccgcagggctgctacgccgaggctctgaacggggcggcacggcaccactcccaccacccccccacccatccctcccaccaccaccgcccccagccgccctcgctggggaacacttacatcctccccaaagacagccaggtcgggcccgacgtgaaatccgaggctgcgcccaagcgcgccctgtacgagtctgtgttcgggtcgggggaaatctgcggccccacttcccccaaaagactttgtatccgcccctcggagcctgtggatgcggtggtggtggtttccgtgaaacacga

SEQ ID NO: 5557 - DNA, 2762 bp, Homo sapiens
  source 1..2762: mol_type = unassigned DNA
cggggcggtgctcggcgcactctaggcttccctccggcgaccccccgcgggctgcagcaaaatacggggcgcttcggcggggcgggggcgggcggctgccgcggatccggccggctacagccgcagcttggtggcctccgattggccacgacgcgggcggggaggctcggcggaggagggaggcgggggcgagggcggcggcggcggcgggaggaataggagaggggagcgggccgcgcagccaggcagcgcgtggggcgagcgcggggagagcggcggcggctcgcccaggtcgcgcagcggaggccgagcggggtgcgcggtcggcgacggagggcggcgcgcgcgagtgagcggcgcagggcgaggaccggcgggcgggtgccggtgcgcgggcagcaggggcggctgcggcagcagctgcgcgggacggagccgcggcgggagagaccgcgccggcccctcgcctcacccccttgcggccgaggccggagaacagtctccaactcgccgggggaccggaaagaggagccgagaagcgcccctcggcccccacgcagcggaggcgcggagtggcgggactgctgctctttgtgggtgcagcacgcacgacccggagcgccctccccgcggcgctgtccccggcgtcttcgtcgcgccgagcggccctggagcggggacccggaggaagcaaaaccacgagcccgaaacctcgcgtggcggagctcttggggagcgccatccgctccacttccacctccacatcctccaccggccaaggtccccgccgctgcatccctcgcggcttccgctgcgctccgggccggagccgagccgcctgcgctgccacagcagccgcctccacacactcgcagacgctcacacgctctccctccctgttcccccgccccctccccagctccttgatctctgggtctgttttattactcctggtgcgagtcccgcggactccgcggcccgctatttgtcatcagctcgctctccattggcggggagcggagagcagcgaagaagggggtggggaggggaggggaagggaagggggtggaaactgcctggagccgtttctccgcgccgctgttggtgctgccgctgcctcctcctcctccgccgccgccgccgccgccgccgcctcctccggctcttcgctcggcccctctccgcctccatgtgccggatagcgggagcgctgcggaccctgctgccgctgctggcggccctgcttcaggtacgcggcggtccccgcgggccgggccacgggcggggtggggcgggcggcgccgggtccctttgttccccgcgccgctgcggggccgggctgcgcacccgggaagggaggtgccacgccgcgccgcgccgcgccgcgcggccggtagctgcgcaggcatcgggctccgtccgggcgccggggcagggttgccggggccagtaggtctctcgcgcctttcctggcggggctctaggggctggattgcgggtcccctctgctccttcttcggggccgagcaagctcgcggggggtgtccccaggcagcaggagggtgaggcaggataactcccaggttttgcagttttctgtgcctttcgcccctcgcatagtactttgctccaatttttttgtttatttctgcagggatgggtcgcgagtttacagtaggaattctcactctggtgtcttagttacgggacttgcctccaccttaccccaccctgcacccgtgcgcctcccggtgctcaagggctctactgtcctattgtctttatcccagtctggagttgcctccttttcttcttctcttgccctcacaatattctgtgttcgtcccacctggaaagaaaatctggccctcttgcccggaggagtctctgccggtcagcgcctgcctgtagaacgagtctggcctctcacgcctagtatctcccccgggcgagaagttccgttacgcggctgctcctttctctgtccggctgcctgtgccctatatgcgccccgggggcgcctttgcctggagccttccgtacttttcataccctcgggagagagccagcgagccttttcatttaatctctactaagaggctcctccgcggcaggaagcacctgctccagtccgggcgcaggttccctcgccactgcacgctgcgggttcccagcccgggggcagcccaactttccgccgcctccaacccgaggatgcccccaggctcctcccgaccagccagcccaggcctggaggccacttcacacagcctcggccgggaccctctagctgggcgggtgcagtgccctggtcccaagtcggtctccgcctgccgtggggtccctcgaaggttgcgggaaaggggcgtgcccaccctcgccgcggggcaggaaaatccacggagggtccccctgcctgtcgccctcggggcaaggggagaggtgctctactgccagctggcagccccgaaaagtgcggacgcagctcggaagtgcctgctccgggggtggagacaggtggtgtggattaccccgctccgtggtcttcacgggtcagggcctggcgcgctccggcccgccggggggtgagtgctgctggggcgggggcaggggctggacggggctggcctccgcagtctctcgcgctttctcccgcaacccctagacggtcgtgggccgccgccgcgcggagccctgtccatggtgcgccatggtgcggcacgcctgtccctgcccggctccacgctctcctcccgggtcgt

SEQ ID NO: 5558 - DNA, 338 bp, Homo sapiens
  source 1..338: mol_type = unassigned DNA
cggagcgggggcggcctggagcgctgatcgggcgccgaaacgccgggagtcgggggctaagggctcgagccaggaggccccggagcagcagccgcccgctcctcacgccgccgccgccgcccccgcggttgcctggacacgggataaccgacttggggcctcgaccgcagcagagccggaggggtgggcaggcgcgggtccgggagacgcgcggggaaacgcgcggagccggtgagtcgggggcgcttgtgcctcggcgcgggcgcttgtgcctcggcgcggggcgctgccgggcggcgcccactccccctggccgcccgcctgcgcgactcccgcgg

SEQ ID NO: 5559 - DNA, 1435 bp, Homo sapiens
  source 1..1435: mol_type = unassigned DNA
cgggacccgtgtgcccttcggggctcaaaggcgctgggcgggcggctgctttcgggagaggcgcagccctcactcctggaccacggggccagtggctggggaagcttctggggcgcgcgcggggaggcggcgctgcgctccacctgcccagccccggacgcagcccgggggcgaggcgtctagggaccaccccaattcaatattgggatttttaataaaccaaggaatgggattttaattattgaaaacccagctcctctgggccagaatggtgttgggatggtcctggtcacaaaatattaaagagaccgaccgctaagggaacaggaaaaacgtccgagacagccgttgcaattacgaatggaccagacttggtagcacggggcattgattgctggtgcccaaccggaccctcctcccctcttcccatcccttcccccacccaaagcaggctcccgctgcggccgggacctcgcatccctgcaacgtggccggggctgcatttttcatgagcctagggtgaacaggtgcgaagtgcgctgggagcatccggccagcggccgagcgcggggaacatggagagcgagcgcgacatgtaccgccagttccaggactggtgcctcaggacttacggggactcaggcaagaccaagacggtgacccgtaaaaaatacgaacggatcgtccagctcctcaatggctccgagtcgagctccacggacaacgccaaatttaaattctgggtcaaatcgaagggcttccagctgggccagccggacgaggtccgcgggggaggcggcggcgccaagcaagtgctctacgtgcctgtcaagaccacggtgagtgactcgccttcctctgttatttgtctgccggagcagcccggcggggagggaggaaggagagaggcgggagagagggggagccgtgagccgccgttggctcgtgtgccccctaccttcctcaaccccctccccaagtcgtccccactcgcattagccaggcgcgttttccccactgtacagtctttgtggtcctttattttaaagcggcagcgcacctccagagctggcctccctccccgcctcgggttcccggaccggctgcaggagcttccttccccgggtcgggcggcggcgtctggcgtcctcgggctgggccattgtcccatgtccttctctgggcgcctggcgcgtgtcccaccgccgccaccgcgcctaaaggccaggctggaagcccggccgcacgctctgagagcagacgagtctgatcgatagtctacagtgtctccttattggcataaagcccgaatgtagcgctagcggtggatgtggggttttccccaggacactgtcaggttttatcgttagatcgctgcccgggaggcacggggcagcccgaatgcctcgatcactcccagagatcgttgccgcga

SEQ ID NO: 5560 - DNA, 510 bp, Homo sapiens
  source 1..510: mol_type = unassigned DNA
cgagcgtgagtcagcgctgaaggcccagagcgcgctgcacgagcagaagactctgcccggggtaagtggcgcccgccgtggcgcaagcggccgacgcgccgacagggggcgacttcgggaggccgggcggcggcgcggcgcgcggggagaggacggcagggcgcccgccgccccgcctgagctcgggagcccgcgcgcccccccaaatccctgggctctcggccgtccgggcccaacgggatccgggacaggggccccacttggccgtggccgtgaagttcctgcgcgggcagcctggggcgggggagcggcgcgtcccgggtccccggagcgggagctgcctccgccgggcccgcgggccgcgtgcgcgatcgagtccgcccatcgagtcgacgcgggccgctctagtgggggaggagggggccggcgtgggagggggcgccgcaagtgagatcaccgcggtttatttaaggagccagccctcgtctttgataaactatcgcgcctcgg

SEQ ID NO: 5561 - DNA, 2722 bp, Homo sapiens
  source 1..2722: mol_type = unassigned DNA
cgaaagtggctagccgagggccggcgggggttaggccagccgctcagccccgccgccccagctccccagccccgcagcccgcgggggagcgggcgcgttatttcaatttgccaggcttctgaagcgaagaggctgccctgaaaaagcaaacatgagagaggacggggtgcaggtaaatatcattaacgtgaaaatctgctaccccagccaagttcaccaccagtattcacccctacaggcggggccgctcggaccctgctcccggctccgcgcctgccactccctttcccgcgcagccgagatgccagccccagtgggcctggcggggagtccggcggggtccggaccgggcggctcgacccccggtccccacggcaggaacgactcagcctcgcacctcgggagctgtaggtgccgaaaacgaaacccgcgggggcagcgcacgccgcgcgagtctcggtccggcggcaacccagatagcgattcaggggctttattcttttgatggtgattaaaaaaatatattctatttgaacccgtaaagcagacgagggcaaatcaagccatcccccgcgctggctcaccggccaccgcgcccagcgccttcctccccctccggcgggcgagcgggcaggggcgcccgactcctaccttcctcccgccagccaccgggggaccagccgcgctctccggggcgggggaggccgcccgggacggggacccccaccttccgccttcggaagcgggttggggcgggggtcggaccccgagtctctactccccgtccctctgccccccggcgcggcccgacagctcccagccccatcctggcaggtggcttgggtggcggtagatgccgggcgggaggaagatgtggggctgctctggcaggttgggggtgcgaggaggaaaaaaaaacagagaaagacacacacagagagacagggagagagcgcgcgcgagagagctcttgtctatagatttatccacataatatatatttatgtagctttttttctctcgacactgatgaatgcgcgctcggatccccgggcggactccctccaagccggctcgcttttctagtctaaataaataaataaagccagatggaagaaaaaagcgcccattccacctccgccgccgccccgcccgccatccctgcctttgcttcgcccgcctggcgccctaatagagcatagcttggtggataaagcccccctacatacccacacgaaaataaaaatcactatttttaaaatacaaaaagttgcacctgctgctattacaaaaagaacccccaaaaggcaaagagaggaggccggctgcccggctcctcacggacacccgctccccgcggccgccgggcccggaatctcagcgcctcccgaagagccatgcgcctggcgctatttatagccgggggccgtctcggactgtaccatcgccacggcgcggggccgccgacgggggaggcgcggtggccgccgccccacgccgccctgcccccggccgccgcccgccgtggcgcgggcccccacagcgcgcccattcccggccccccgcgccctcctccgcgcgcgcacactcgccacccccacccctggtctggctgggaacttgaaccggtccagcctgtttaaacggaaaggacagagatcctgtctgttcaatgtaaaaaaaaaaaaaaaaaaaaaaaaaagaaaaaaagaaaaaaaaaatcagatcagaccgagagagagaggagagagggagagagagagggagagagagagggagagagagaggagagggagggagggagagagagaggggggagagcagagagagagcgcgagcgcgagcgagcgagagaagaggagaaagagagagagcagagagcgagcggagagcgaggtgtagagaaaccgagggggagagaacccgagtgtgtgtatgcgtgtgcgtgtgtgagcgcgagcgagcgagagagaggagcgagagagtgtgagcgagaaagaataaaaggaaagaagattttctctatgtatataaagatggccacgttagcaaacggacaggctgacaacgcaagcctcagtaccaacgggctcggcagcagcccgggcagtgccgggcacatgaacggattaagccacagcccggggaacccgtcgaccattcccatgaaggaccacgatgccatcaagctgttcattgggcagatcccccgcaacctggatgagaaggacctcaagcccctcttcgaggagtttggcaaaatctacgagcttacggttctgaaggacaggttcacaggcatgcacaaaggtgagtacacctttccctcccaactttgccggggagcaggagcgggctggcgggccgaccggccggccggcgactgacgagcggcggactaagcgagaggaagcctcgggcgggcgcggtggagggaggcgctcgggcagcggagaccagagctggggtgcgtggggagctgttcgctggggcaagactgggttttgggcgaggtgctgataggaacgatgccatggagagagcagcgggcgccgatgaagagaaagagagaggggatcgaggagacggggcttggatttttgggtacagcgacctgaaagatggggatggggaaggctgcaccggtcgagcccaggacgctgagcggacggactcgcgggctcctggccggccgaggaccgagggtgctgtccatcgccgt

SEQ ID NO: 5562 - DNA, 1133 bp, Homo sapiens
  source 1..1133: mol_type = unassigned DNA
cgagggcggccgcccccaccctcgggggtccccctaaaatggggtggggggaagccaccgctcgccctgcgtcctcgcgggtgtgccctgagcccccggccgcccgcggcgcccgcccccgccccggtgcctgcggcgatccacgctccgaagcagaccccgaaaggaaaaagcgatacctctgtttcgcacagagccaaacactggaagcacgagatagccgacgtggaccaggaccatcctggctcctcgcgcggcggcggcggcggcggctgcgcgcgggccctttgtggcgcggctccggggcgcgggcgcgggcggcggcggggctgcgggagccgccggggcgggaggcggagcgcggggcgcgggcggcggtggggcggcggctggcggggagacagatggcccatggaaaggctcccttcccggcccctctcgacattcaaaggcgctggggccgcagctgccgccacacaaaggcgcgcgcagccaatgggagcggagcgcagcgcggcgcggcctcgccggaaccgcgggggacagcggggaccgcgggcgcgcgggtggcggagggagggaggggtgacggctggaagggggccggcggccaatcgctgcggcccgctgcggggcgcgagggaggggtcagccccacgggaagcgtggagcccagcgcgggtccctggccgcccgcgggccggagagggcgcgcgtgaagcgcccctgcacagacatgggcggcgtgaacacggaacgtgcacacatggagagggacgtgcactcagacatgtggaggtgcgttccttagtgcagagagacgggcacgagcgcccttagtgcacacgaccctgaggtccctgcacaccgcgcacgggtcactcggggacgtgcgctcggaggctggcgcacgtgtagagcctgactgcgggcacaagggaagctggaatgcgaacaagcagccgcaaacaggacccaggcactgtcacacagacatgcacacaccaaacgccttgttaacgcaggacgcgtgccaagaacgcattctcagagacacacagagggaacacacgatgcagacacaggtaagacacgcacactccccaggctctctgcctggcgcaccgcgtcgt

SEQ ID NO: 5563 - DNA, 2401 bp, Homo sapiens
  source 1..2401: mol_type = unassigned DNA
cggcctgaccggggcgccccgccgtcctcccagtgtaccccaccgctctcggctgggggcgcagcaccttggagagaggcgcctggccccgcgcctgggctgggggcgctctaccttgcgccctgggggtcaggggcgcttgccgggccgctgccgaggggccctgcccacccctgcccagcccggagcccaggcgagccagcgcggcgagcctcctcccctcccgcctgggtcgtcctgagtccgcgcccgctccagttgctgcagctgctgctgctggcggctgcggggagcgcggggcgcgcgccgaagaggcttgggcggcgaggacggggacgaggaggagtcggaggcggcaaggaggaagagcgagcggaggccgaggggctcagcggcgtggcgacaggactagggggtcccgagaacatgggctagcaggcggccacgggccggcggccggacgcggtgaacctgccgcggccgggcgcgcactggcgcggcgagccggagccgagcgcagccgggggaggagggctggcgcaggggcgcccgggcggagggggccgattatccattattaacgagttaccacctaataagcggagagcggctcgttagccgcgcgggaggcgctcggggaagggggtcaccggccgagcgcagcgcacacccgtggcgcacggcgggcggcgcggcgccgaggacacccgggaccgcgcgcggagccggggcgggcccgggggcggcgcagaccccgggcgcgggcggcccgcggcgccccctggctctcggcgctcggggccagcgcagcccggggcgagcggggcgcgggccggggagggggagctgcccgcgcactccatccccctcccccccgggcgggcggcggcggctcgctgtatatatctcggcgcaccccgccaggtcgcgcacagcgccccgagcccaggcgcctccccgcccccctcccgcgctccgcggcggcggcggcggcggcagcagtagcagcaatatggctgttgatgggtgtttggggtggcgctggcggcgggaggagctcccccgagcccctgcgccggctgcccgttgctagctatggcaaatggtggcggcggcggcggcggcagcagcggcggcggcggcggcggcggaggcagcagtcttagaatgagtagcaatatccacgcgaaccatctcagcctagacgcgtcctcctcctcctcctcctcctcttcctcttcttcttcttcctcctcctcttcctcctcgtcctcggtccacgagcccaagatggatgcgctcatcatcccggtgaccatggaggtgccgtgcgacagccggggccaacgcatgtggtgggctttcctggcctcctccatggtgactttcttcgggggcctcttcatcatcttgctctggcggacgctcaagtacctgtggaccgtgtgctgccactgcgggggcaagacgaaggtaacgcgcgccccgggcgcccgccctctgcgccagccccaccgcttctcggcgtcccctgcagcccacctcctcgctccgcgccgcgccgtgcctccctccatccccgcctgccttcccctcgccgccttcccttccctcggctctcccggtgctctcggatcggggcagcgggcggcgcgccgggggtgaggagttgcccccagccagtgcgctccgggacgcggacgctcaatcctgtcctcttgtttattgtagggttgttggcggctgcggctggggccggggtcggggactcacaggctcgggtgccgtggtgcggggtggggacagccaactcagcggggacggaggaagctgggggcagctgggtgcgtgttttgcaccgctcacctgccggggctcggctcctggcggtgggcgagagggagcacatccgcccatactttaggaacctgttggggagatgagttcgtggggtcagaaagaagggaaaaatcctttgggcaagggagagaataattttgcacaagggaatcccgggggaggagcatggcccgagataacagggggacttcgaggggcgagagaagttggggagatccatcccactattgggggtagcccacggggctgccacttttggaatgtgtcgaggtcgcatatctgatgtaacctcccactccgtcccttaggtgctctagtggaacataccccaagttcttcggcctctgttcctttgcccccaggccacccactttgggtccccggaaatgccaccagcagcgcggagctggagcgggagtccgcctgaggccgcggttttacgcggagcgtcttccctggcgctcgaggtggctagatgtcgtcggctttagctattcctggtgcagacgcccaccggcactgaggctggcgacaccttcga

SEQ ID NO: 5564 - DNA, 769 bp, Homo sapiens
  source 1..769: mol_type = unassigned DNA
cgctgagccgcagggaagctgcggggccagctgagtagccggcggcctgttgggtccccagtgtcgcgcgacagcacgacccgagacaaggcacctggggctggtgccaggcagaggccccgcgttgcgtggccggcggcaacagcgcctggcggtcggttccgggcggggctgcaggcgccgggttcccgcggccgcgaggcggggctggagggcgctgcgggctgcgcggaggctgcgggaagcgcggggagcacgcggagcccgactagcagggagatcgcgtcgcgccgggcacaggcacgggacccgcgctctaggagggcgcagcgagaggcgcactgcgcacccaggggctgcggtcccggccgccgtgcggtgacaagctgactccccgccgccgcccagccaagtccgcgcggggtgctggcggagatgtcgcatgggaggcttcttcaacgaggtgcaaatccaagccacctcgcctgagtgaatgaagggacggcgcggggcgcgggtggggttcaccgtgacaaaagcccagtacctggttcaaactttttttttttttttgcccgcaggattagaacatccgacattaaaatgtctcagtgcagcagaatttcccagcgacttcggtggcgggagagcagcacctctcaggcacagctgtgcgcatccctcgggccccaccgaccgcaccatctgaccgcgggaaacgaaatctgagctcaggaatttgaactgccccacgcacgttcgttcccgg

SEQ ID NO: 5565 - DNA, 1169 bp, Homo sapiens
  source 1..1169: mol_type = unassigned DNA
cgggagccaggcgcgcgggcgggggctccaccggtcactccgaaatcgcagaatgccccagggtctccgggacttgtgggtttaggggaacgttcgggacgcggagcgggcccagttcacctgccggacgccccctccgtccatccgaacccgggagccccgcaggagggacccttctcgtccccagtgaccacagtccggacccgggctgcgctcggcgggcaaggctgggagctccccgggccggaggacggggcgcatgggctccgggtttgcagaattcgcggctgcgggagctgggtcttctctcccccaattcgggccgcgccccggctggtcggaggaggcagagtaggggtgcggccgtgtgtccgagcgggagtggggcgttcatctccggggagaagggggaccgggaaaggcgcagcgcgccgagcattcgcccacaccccgcccgctctccgcgcgagccgggtgcgcccccaaccgaaccggggcgggcgccgggagagtcgggttttcccgagacccgcgccccttcctcgccttcggctcacccgggctcccgcaggaccagcgcgaatagacggggcgatccgcggccgagacctccatccacgcgcgcggcgcggccagaccggcgagcgcctccggcccgacgcccccctcgactcccggactctgggcgctgagcgggagggggaggcaccagccccgcccggccccgagccgcccccgcccccttggcccgaacagggggattccaaggtccccttcgaccctcccgcgcccgcgcgcaccgcgcacccggagaagaagctgcgcgcggaaccatcagacaggagcccgcgccccccgccccaccgcccactgcggccccggctccttcgccgcggaccccccacccccggccccacggcgcgctcaactttacctgcggtccagactccgcgagctccgggctccgcttacccggccggcggcctcctcggggcggagcgcggcgtctctggagccggcatcccggactccggcgccgccccgcgcaccgcccccgtcccagccttcagtggcgcggcgccccctcgcgacatccgcgggtccccaggagcgagccgaccctcggctgggtttggagccggggccaagtccactcggagggagcacgg

SEQ ID NO: 5566 - DNA, 6036 bp, Homo sapiens
  source 1..6036: mol_type = unassigned DNA
cggtgcggtcctgggcactgaccacgcccacatgtgatggtctccgtaacgtgcaggctccgctggggagaggccagcgcgggctccaggtcccagggcctcgggctcactgccgggactcccctcagtctcctttccattggcctcgcccgccgcggctgcgccgggccgatactgactccagcgacccttggggtcgccccagctggtagccagcatctcctctgggatggggtccaaatgtcagccggcccggcgtctgcaccagggtcccatcgtacgcagcccgctgccttcccgtctcccgccaaggggtgcgacaggcagggggatccgttggcctctgcccctcccacccccacccttttgggctccgccggagcgcttgggctccgggttccctgaacaccgtctgggcggggcttcctgccggggctcggccacacccccacccgcactcccacagctggggctgagaatgaaaacaatccctgcaaagccctcattagcgaattaccggcggctgcagtgattacaggcttcgcccctgcgcgccgcaaaggcccccagctggcaggcccgccgcggcgccgccctcccccagcctcgccccacctgcggcgggcgccgtcacctccccagcgctgtccctgcgaagcagcggacccagacccagacccggacccggaggctaccgcctccctcgcccggggtcaagcaacggcttccgacaggggaagggccgcgcgctcagggctgggccaggacgcccttgccagcgctccacggtcgggacttgaggcctagcggccgccccgtttcctcctggacctccgcggcacagaggcaaggtcttccggtgaggcgcgaggtcgccgtgcgctgggcgggggttctgagagtggtggggctcgggtgggcagaggccctggggcgacctatgggggacgtctacagcgcaggcccatggggcagccagaccgcgccgcagggccgggagagaacgttccagaaggccggcctaggccactattccaggagggtggcggaggcagtggccggggctttctccgcggccgagtcggtggtggctgcgaccaccatggggctgggcacatagttgaaggggggtactcgggccgagcggctgggggagccgtgccggctggcggggaagccccccacggcgacccccaggccctcgtgcacgaagggtgcggagatgggagccttggcgaggctgggaccgtccacgtcgctgccgaggagggagagctggccgccggcgggggccccggggggctccctggtctccaggctcggggacgtgctggagttggtcttgggggcggcgacctcctcggtctggaccacggcgtcgctggtcttgcgcggcgggggcccggccggggcgtcctcgggcgtggagccccgcagtggcagggccgtggcgggaagcgtgctgcgcaggatgtggggcacgtcctcatctcggatgcgccgccaggtcgtgcccggcgcggccaccctggggagcggccggggctccccgtcgctgctgcggcgcgcggcgtcggctgaggcaggggccgcggggacggcgccgtcgggcctgcgggccacgctgatgtgcggcagcgacgcgtagcgcttgacagtctccggccgggcggcgggcgcgcgcacaggcaggcgggacgggctctcggaggtggtgcgccgggcagggcgctcgccagggctgggtcgggccgcggggggccgctgccgggccggggccgggccctgccggggtgccgctcggagctcttcgcagcgcgaggagcagaggaagacggcgggcagcgcgggccggccgcggcggggcgaggcgccctggggggcagaggccgcggactcggccgaggacagctcggagcggcggcgccgcaagcccggcgactccttgatgaaggttagctgtcgccggaagcccgagcggtcggaggactcgctgccgctggagagggctgaggccacacgcaccaggcccaggcggcccccgcgcgcccccgggcccgcctcggtccccgcccggcccctggggcccggctccgggactgcccgagccagcggtggcggcccacgccgggccggcctctgcatgaacgggatccgcacgggcgatctctgcgtcttgtgctgcttcgccagaagggtgcgcgccggcgttttgggcaccggggaggctccggggccgggcagggccccagcagcctgggtgaccggggggcgctttctgggcaggggctgggaggcgggcgaggtctgggaggagctggaggagggggtcttggcgaggcgggcgggcggtgtggcgcttctggggggctggctcagcgtcgccagctccgaggtcttggcaggccggtgtaggctccgcgaccgctgctgcccggggctcgggactttggctggagccgcgggctgtgccaggcaagggggcgccaccttccgcggtgtggcgcgggggccgggggtccctttgggctgggcacggggtgccgggctggggacgtagatcactgttcgtccccggagcacagctggcaccccgggcgtggtcttctgtgtgccacgtggcttctcggggcctgcaggggaacgggggctcccgctggtcttgactgaggctgcgccccttttctctggccgccgggcactgcccatttctccctccgcctgtcgtcccttcctgtgcttggggggctgtagggtggatcccactgacagcccggatacgaaggacaggatggagtcggactcggacgaggcctcccgcgtggcagctgctgcctggtgcagccacgtgacaattgaattggcgccctcctggatggcgcgccactccacgctatccaggtcggaggcccggtccgagcccgctgcctcctcgccgcgttcccgggacccctctgcgggccgctcatccagccgggtggctcggggcttgcggcgccgcaggccagacacggggggccggcgcctgggcagggccgagctgatgcaccgctgcagaagctcctccgcggcccgcgggctgggcgagctgtcgcgtccgcctcctgggcccgggtccttggtgaccgcgggctcccggcctcgtggatggacggccggcggctccgagggctcgggctcgctgagggagctggcggaggagctcagggagtagcagggcggggtctcgtcagcaatgaggctgggctgggtccgggcgggcggcggggcagctggtgcagccttggacggggcaggggcctccttccggccctgcggacgctcccgcgtaaaagcgcgagggatggccgatgtgcgccggtgggttggcgtgggcgcggccgccgggggctcctcgtccgagtcgttgccgtagaagcagtacacggcctcctcagtgggcgtcgtgaggcacagcgactggagcgccccgtccccgcgggtccggccgggctttgagccgtccttgtctgcgggggcgctcgggggccggcccaggggcagctccagccctgctctgttcttgcccgcgccccgagactgctccgcgctgcggccggcgcctcccgccttgtgccggtgccccatggcctgtctggcagaggtggggcggccggtgggtctttgcctgcccgctggtcccccgggctggtccctggggggtccctgcagcgtctcgtcgctgagcgaggcggcgctagagaagttgaccggcgtgccctccgcggagtcagtgcaggagtcgtcctcctgggccggggccggggcgggcaccaacatgtagacgggcacggggagtgcgcggcgacctggcaccagcgcggaggccaccttgcgcagccgggcaggcacggcggctcccaggcactcccgcagcagttccagctcctggtccgcggcgccgcgagggcgagaacccgtgggcgccggcccctcctcccgccgccggtgccctgcaaagtggaggccggcgcccccggcgcccccgccgcgctcggggcaggccgagggcagcagccgcagctccacgtcctgctgcacgtagtgctcgtgcaaggccagcgcgctgaggctggaggcgcacgagaagttctcgtctggcttctccacggtaaagcgcacgctgcctgcgtccagctcagatggcagccggcagcgctcccggcagtcggcgatgtccaggaagcgcttcacgtagctctcccactgcaggctgaactgggtggcctcggggggaccctgtggcgcgggcgccagcggtggcgtcttgctccggctgggaggcatggtctgtccggggctgtcgggcagctcgctagggctgatggtgccgctgccctgcccgctgcaaggttcactggggatggagctggcgatggacgggctctcgaagctgcccagcgagctcacagagctgcagcggctcagcacaagcggtgtctcctgcacgtagttctccgacgagctggacggcgtggcgtcttccacccccaggccccggcctcggttacgccggggagccggaatggctacgggcagcgaggtggccccgggcgcccgccacgtgctgtccagctcagcctcgctggggccggcctcctccagcccctccagggaggagtcactgtcatccaggtcaccaccctcgctggggcctgggcggccggccgaggacagcgaggaaagggagctgcatcgggacagcgagagtggcccctcttgcgccgccagtttctgcagtgccttgctggccacagacagcggggcagccgccagcttctcgggaaccttgctcaggtggtctgccggcagccaggcctgcttccgggcccctggagagattccaggccccgcgaggggctctgcacccgcccttgaggcaccctcaagcagtggcacgtgctgataggtaggcgacagcttgatggtgcgcacgcgggcgtcggcggaggtggcctcgcgggccgggggctcggcctggcagccgggcaggtcaaggtcaagccggctgggccgaggctgcccacacctggggtcctcgcggcgcgaagccagtgcggccagcgggcagggcagcatatgttcgcgtgggcagtacccgtcgctggcactgccgctgttgaggctgtcgttggagaggctggcgtgggccgccttgagccgcagcagcgggtgcgcccggcttcctgcctctcgccgcccgccctccgggccgcggcatggcgagcaggactgggcgcggccctcccgtggcgcctcctgtcccgggtctccagagctgaggctgaagctatcgtcggacgaggtgtgcagggcggagatgtcctccaccagctggtcgatgcgcgccactgcaagcgccagcttggccttggccttggccgccacggctgcctccccactggtgtccttctctgcctccttgccgcctcggcgggtgggcggggtgcgagccagcgcctgcccctgcaggaaggggctgcccaggaagagggacagcgcggcagggctggctggctccccggtggccgcggccgcagccagggatgacggtgcatcgtcgtcgtcaaagcagcccgaatcggaagcatagtcttgggccaggccgtccaggtgtcgcaggggcggcagcggcttcttagtggcggcctcggctgccggcgggccctgcttctccaggtgctccagcgcctgcgcgaggtgccgtgcgtccagctcggcctccagcgcccgctgcttgcgcacgtacaggctgggcacgcagctgcctggggacacggcggtggcggccgcctggtgcttggcgggccgatgggccagcaggttgcgcagggcggcggcgctgcccatggcgatcatcttgtgcttggagtgcaccagattacgcagcatgcccacggcgcccaggtcccacagcagctcctggtcacgggcgctgcgggccgacaggttccagagcgtgccgcacgcgttgctcacgatggtcaggctgtgcga

SEQ ID NO: 5567 - DNA, 3400 bp, Homo sapiens
  source 1..3400: mol_type = unassigned DNA
cgtgcagctgcggggcacccggggctgggttcacctgcgcccggggccgcacaggcaggcagagagagccgggttcagggcacaggcctgtctcttgtcccctgcgcccggggaagggggcggcacagagccagtgaccacagcgcagcgcgcacttgcccccgcaggccctcggagcgtccccgcgcgcaagaaggcgcagaccgcgccgcccctgcagccgccgccgccgcccccggccctgagcgaggagctgccctggggagacctgtcgctcaacaagtgcctggtgctcgcctcgctggtggcgctgctgggctcggctttccagctgtgccgcggtgagcgcaggctccccagaggtggggcgaggctggggtccacctgtgcgcctattcctccaaggaaaggcgctgtgccgccagggtggggtctgggagcctcctctccagggctgggtcttgcacgcccccaaagttggtttgtgcatctccccttaagtgacgggccttgcgcgcccctctcacccggtgtggaccttttgcggggcccattcccctcgccgcgagtaggttctggcttccggatgaaccttgtgcaacccctcctgcctcgtagcgttctgccgcctttcccctgcgccctctctggggaccgctcagctcgtgagcgccccccgggggcactcctgcgacccctcccttgctaggggcctcctacagcccgtggtcggggggaagaatgaccaattgaaagagcgaggttcggagaaggggcgccgcggcagcggagtcccggagtcccttcccacggctcgggggcatccttagtctcagccgtaccgggggagccccactccaactgtccagggaggggggctctaggggtgagggagggatggacagtgtggaccgtgcctcggcccagctgactcgggtcccgaccctgtcgctgcagacgccgtccctggggaggcagcactccaagcacgtgtgcccgagccctgggtcccgccaagctcagccccgagggagccatcgtcgcccctggtaagagcttccttccactgaccgcgggcattgggaccttcatccccaaggaaagaaggagcccgggccggggggaaggtgggcgcttaccccaggaccccactctgtcttgcagcctaagttcgaggcccaggcgcctccatcagcgccgcctgcgccccgggccgaggcagaggtcagacccaagattcccgggagtcgggaggctgcagagaacgacgaagaggagcccggcgaggccaccggagaggccgtccgggaggaccgtgtgaccctcgcagaccggggacccaaggagaggcctcggagagaggggaagccgcggaaggagaagccgcggaaggaggagagacctaagaaagagaggccgcggaaagaggagaggccacgggccgccagggagccccgggaagccctaccccagcgctgggagtcacgcgaagggggccaccggccgtgggcacgggactccagggacgccgagcccaggaagaagcaggcctgggtgtccccgaggcgtcccgacgaggagcagcggcctgggagtcgccagaagctccgcgcaggcaaggggcgggactgagccggccccgcgccggagtccaggggccccttctggacgccccgcgactctggcgaaataaagcgagtgctgcggccgcagagtcacctgctcctttacgcctggacccggcaccaagtccggggcctgaaagacggtggtggggcgcttcaggcaggggagagacagcgagcgctacagggcggacccgggccgtgcgcgaggagagacggcaagggaggtcccacgggccccctaacacgcacggacaccccagccggttgcttgctggtctttattggggcgatgcttggggtccgaataaatatgggaaggggcgcgagctggggcgcgtccggaccctcggggcaggagtccgcgcggcgcaggggtcaccggcagccacactcggtggccaccatgttgggcacgtggtgcgcgctgatgcgctcctccgacaggctgatgagcagcttgcccgcgtaggcggtgggcacgcagcagggtgggcgcgccagggcggccccacggacctgcatcttcagcagcagcaccacgtggttgccgtagcgcgggttgcggtcggactgaggccagccgcacacgccctggcaattgttggcctggtaggtctcggggatgagtacggagcgctcggcgcggaggtctacgctgagctcgcgcagcgcgcacggcccgtcggcggcggtggcccccgcgctgcgctgtgcccgacccggcccgcgcggatcccgcccgcgccactccacgcgcaggccctgcagcgccttcaggagcagcagcgctcgcaggggatcgccgaggccgccggggccacctgggcagagcgcgagcaggcgcgccagcagcggggctgtggccggaggcagacccgggaggcttcgcagctcggcagccgccgcttgcagttcagcagccacgcggcgcgccagggccgtggcccacggcgccgacgtggggtcgtgcaggggcgcaggatccccggtggtggccgcagtgggcctcagcagcagcagcagcggctcctcgccgtcgagtaggcgctccagcgccgcggggtccgacaggttgactaggccctgcgggaagccggccagcgcgtccggatccagggccaggcgcggcgcggaggcccgggccggggggacccgcagcgcccgcaccaggcgcgtgagcgtctccaggaaggggtctgcgctgggtggcgactcctcgagttccgcggatggcctggaacccgcaattggaggagttgagagcggccacgaggccacgccgcccccgcccgctcctgccccgtgtcccggtgcctgcgcgcacctgggcggcgggaagggcacggtgtccagctggccgtgcgcaggcagcggcgcgggctcggaccgcggcagcaggagcagggccggggtcatccgtgtgaagcagcggtggtcgtcgccgaacagcagtgcctgcagccgggcggtactcagccgggagtctgcggtgggtgggcacgcggctggctcaggggctgggggcccgggggcagtcgacccggctccccgtccctctccacgcggacctaccctctccgcggggctgcagggtcaaggccagcccggagccgcgccaggcccccgcagggcggtccaccgctaacaccaggtagcgggtgtctcgggaggggcagaggctctgcggagaccagggctcagcccggctggatggaggcttacccagccccgctctaccggtccccttcctcccatcgccactggttctacgc

SEQ ID NO: 5568 - DNA, 1143 bp, Homo sapiens
  source 1..1143: mol_type = unassigned DNA
cgggcttggcgccttgcttatctccccggacgggcagctcactctccctcacccccggtccccgccgcgcgcactggcggcgcccgttccacgctccaagaaccccgcttcccagggtgggtggggggtgcacgcccgacagggccaggtcagggccaggcgtggagcccgcgtgcgccccgggaccccgcccggggcgcgcgggaggcgccgggggccgcggaggcggggcggggaggggccggcggcggcggcggcgcgcggaggagaccgcagtgcggccggcgctaggacccgcgggggcctcccaggccgcggcgcctcccgctttcccccactccccgacccttcttcgcccccaaaatgaggaaacggagcaactcgctccaagttgtgcagccgggaccgcctcggggtgtgcagccggctcgcggaggccctcctgggggcgggcgcggggcgcggctcgggggcgccccctgagcaggtgagcacgtcggcggggagacgtggagagaccccgaggccggggtggggggaaaccccgagggctctaggcgggggtgggcccgggacgtgcgcaggaagggccggtgtgtgcgcgagtgtgcgcgtcccgggcgcgcagcgggtgcgcggctggggcggagggtgctcagaggcgatcggaccccgcgtggtggtggctggggtttcctgggtgcgggtgtgcgcggctacgagccccgggcgtgtgtacccgcgcgtccacgtggagggctgtgcgcgtgtggccgaaaagcgtgtgcgcggccctgcgtagcgccctgcgtgcccgagtggcccggcgctggcgcccaggtgttccagtgtggggcggctgtgtgtgtgccgggggcgggggacaggtgcgcacgttcccaggtgtggagcgcttgtgcgcgcggatgcgcggggacgtgtgcgcacacctgtttccacgtggacgtggtcctttgcttgtctgcgcgcagctgtgtccgagccctgtgtgtttctgtgcgtgtgcatgcatccgtatgcgtgtgagtacacgtgggactggaggatttcatgggaggcgcatcttggaggggccgagactcaccccccagcaccgcccacttcccagccactagcggtcgg

SEQ ID NO: 5569 - DNA, 220 bp, Homo sapiens
  source 1..220: mol_type = unassigned DNA
cgtggcaaacccgggctccgacgacagaggcagcgcagaagctcgctcctaaatgagacaattttattaaaatcataattccttgcatttctatagcgccttttcagtggcggagatctcaggtgccccacgccagggtctactagagaatcggggcgaccgcaagctcagtcgcgggacaggcgaggctcgccagctccacgaagcgtcaccggcacgt

SEQ ID NO: 5570 - DNA, 1860 bp, Homo sapiens
  source 1..1860: mol_type = unassigned DNA
cgcacggaagtctctgcccagctgtcagcgcgcgtcgccaggggctgcactgaagctgtggacccgggatggggaggaggctggcggcctccgaagcagggtctacagcgggggagggctagcgccgtctggcggtggctgcgcgtggccagtgcggacccaggctcggctcggccggcgctgcctgcgtgtggtccgggcggagcgagggtccttggagcccggttcgtcctgggtcccaggaagctcggcgtgcagcgtcagaggccgcgtgtgctgggggagggaggagtacagactgtgcctgggggcatccaggacgaattcacagaggggtggtcctgccccacccagggggtgtcgtgggcaaaggccctggggccacctgcctggtgccttggagggcgtagggcaggagccgccgaggcccgcgggccactgtggggcgcggaacttcagaccaggcacccgcggctcaacttccgggccaggggacccgcgggggccttacgaacctgtttggcccatttgtgcaacagaaatccgcccgcgcctagcagcgtccggggccgcctgcgccggatccgcagcccagtaccctccgcgccctggactccgaggaggccaggtagagagcggctcgcgcggtccccgtctgcgccctcagccccgcgctgggcagcgggacatgcctggctccggcgccgccacctcggcttccgcttgcccttgagtgcggagcccggagcctccctcgcggtgcgctgggtcccagagggccagaggccaccagggggccggcatcggcgggagcccagccgggcgcgccctcggccctctcccacccacgtcctccgcggccgcccgggtccaggggcgcagcggggaggagaccccggccagggccggggagcgcgagggcggggcggggtccggcggggaggggcgcgggcgggcggggaccggggcgggggccgggtccgggggcggcggcggcgcgggcgggaggaggaggagcttcccgcgcggggcaggggcggagcgagcggccgcgccgcggagccaagtgagttcgctccggagccgcgccgccgccggcccagcatctcgggcgcccgccgcccccgccgccgccgtcagcgcggggatgtaggatgcaggcgggcgccaggttccagcggcggcggcggcagctgcagcagcagcagccccggcggcggcagcctctcctctggccgatggacgcagagccgccgccgccgccgccctgggtctggatggtgccgggctcggccgggctgctccggctcagcgcgggggtcgtggttcccccggtgctgctcgcctcggccccgccgcccgcggccccgctgctccccggtctccccggctggccggccccgagcgagccggtgctcccgctgctgccgctgccctctgcgccagactccgccgccgccgccgccgcgcaccccttccccgcgctccacgggcaggtaacgtgtccccgtcccgcctcggcccgggtcgccgtctcccctgctcctgggcgcgccctgcccggcccggctctggcctccggctcgcgcgccctcctccccggcggtcctcgccgccccaaaccctcaggacggagcccggcagccgtgcctcggcgagaaagttcgtgcttggacgcccggtcgtccacctccgcagctttggcaggtgcctccgggtgtctggacggagccgtggagggacccgccgcccaggcccgcgtggggaccgcagggaactcgcgccacgccgggggtcactgtccatcgcgaggtgctgaagtggctccgtgaccgccgcgggccgtggctgacatcgcgg

SEQ ID NO: 5571 - DNA, 441 bp, Homo sapiens
  source 1..441: mol_type = unassigned DNA
cgccggggccccggctgtcagcgcggccgccatcgtatggctgaaggggactgaggccgagctgggcaagaactctgggcgcagattgtgaagctgactgcggggaggcctgggtcccgccacagccgcttcccaccggttccaaccagccccgttccctctctcgggatgtcggaccggcactctcaccatttctaggcttccagggggccctggcgtcttagctgtggatctcccaatacccgcaggtcgcagggccacacaggctgggcttctacgtgcagaggacacaaagcagacagacgaaaattggagcttcggcggcagcgagaaacaaaggccgcgccaaatcccggaagccgccctgtctgctccagctgcgggcctgattggacggccccccgcccagtgtccccgattggataacgtttaaggccccgc

SEQ ID NO: 5572 - DNA, 5587 bp, Homo sapiens
  source 1..5587: mol_type = unassigned DNA
cgcgggaagaaggccctggggggggcgctcccgacctaactaggaaggagtatgcatatgcaaatgcgcccagggggcgggtcctgggtccggagccccccggggcgtcccggcgcagccctagccctgcgccatccccgcgcgtgcgccccctctccgcgatcccttacccgagccgtgcctctggcgcagcaggaccgcctgtcccgatggcggcgacgctgacgaggcagcagcagctgccgcgactgtggtggtgggcgtgtgggccgccgaggctgccgcggcctcggggactgcgggatcgatggcggcgggagggctcccgggcggcgggctcttgtcgccgcggccgggctcggaggtggtacggctcgcggcgcccgcgttgttggcgttggcggcgctggctgggccgtggcgacgcgggccgctgctctggatgtgggacacggcctcggcggcctgcatgttgggcggcgcgaagcgcgagagcacgcgcagcatcgcctgggccttgtgctcctgcgtgtcgtcgtcgctgtagtccgacacgcggcactcgtacacgccctcgtcctgcagccgcacggcagacagccgaagccggtgtgagatgtcattgccctggacgcgtacggtctgcaagagagcagggttagaggccgggctgggcagctcccaaacctactcttctggccaccctggccgtcgcgccccctcatccgcgcaccccaacacttcccggatcctggtttgcccaccatcacgatccggcttccctttcacccgcgtctacccagtggcatagggcttccaactctgcgtggacgccaggcagccagctctttggactgtgtccccacgtccccatcacgttaaccaaacgcccaccttgcatctgccccgcccatacaaaccaacactgcttgtcttcccgtagctggcgcttcagaagggcagagtccacctctccttcctccctcctgcaccttcaggaaaccccaggctggattccttgttccttaacttccccacgtctttcccgccccgacgcgctccaaccgacagtcccgccccagccggccctcctcacctcccggagcacggagggcctgcccgaatcgcttcctaaggaaagccaccctgtcaccggaccccgccctttacagctaacactgtgctttcttaagaaggcaagcaacgctgaggctgctgcctggctccctggccacctgctaccaacccgcctttccgcgggatctccagaagccccccagcgaagtgctcctcccctgcgccccggtggggacttcgggaagtactgctctacggctctcaacaaacacccagggagccctcacctctgaaccgagcccacgaggaggcttcgtcatctccaggcctttctacgctccaggtgggaagcttgggcgcatctcctcccagagttagcaaccccatgacccgggcccctcgcagcctggcacaaccaccccctaccccgtcccctgcaagcctgcaacaccccgcacccagacccgcaatccaggcggaggataaagggttgcagcggagggcgcagagcagatgctcagggcggggcagagggggcgggaagctggcgccacggtcgcggcgagggcgagcagccgcgcgctcccggtgctaggaggaatgcccgcagagcggaggctggcaggcgcgagaggccctaagcgcgcagtccgaccaaggggagttttacaggtcagcgccgagccgaattaggggactcaagccttggacccttgatttacacaaaagagaacccgaccctgcaaccggcgacagatggcgcccggacacgccgagcagccaccgatgcaaggctgcgatcgctgccctacttgcgcggccccacatgcgcggccgccgcggcttgctaagggagggagctgcgggacccgaggcggccagaaggggtctcccgcggcccgcgctgggctccacacttacgctgattttagttgcatccttatttgttacctaaaatgcaaagagggagagagagacgtgaggctcgcggccttctggctaggggaactcggatccgcctttaggcaagggcaccctcctccggcaggctaggaccgaaaccgcccgggggatgggggttgagggcacaaaggacgtccggctttccaagagtttcccaggaggaagcgggctttggagctagcatggtgcctgaccaacgggtggctgccctggtgcacacctgccggctgaactggggagactggatggacaccagggtgggaaggaaagcccctctccttccctctgggcatccttaggccctgccgcgtggctcaaaatcctcccccagctcactgggagccgtgaagaactggagggagggccgctgtgtctggacagcacccagcgggaggctcagtgggagtaactctgggtgggaccctgggagaatgtaggtgtgtgtaggtgtaggtgtgtgtgtaggtgtgtgtgcacgcgagcacactagagtgtgtaagagagtgtgggttttgaggcagacaggcagcgtgggcctgttttcggccacagagaagtggcccctctgtgcccctgagggctggaggtcctgccggctttccggtactcggttttctggtggcctctggaacgcagccgtgggagccctggggtcctcaaagtggcagagggcggggagagcctgatgggaccaagggggcttccttcactacccagcacccatcagagggccgcagccagcgagcacgagcaagcgaccaggctgaggtgtggctctttaggggctgggcgtgaatggagttctgggaggtggtgggaacagcgatgctgtcaaaataattgacaggtttgggggtaaccactgctgactttgaagatgctttgggatgcgaaggtggaagatgggctgcgccacagggcggcgccctgcgcgagtgaagcccgctgcttccctccctgggttagccttcgccgccccgggcgcgagccgggcgcgcgccggtaccgcgtgggcggcgggttaccttgctccgggcgcccggcacgctgagcgccagctcgtgcagcagctcccggggtggctccttgaggtaccaccactgaatctccagcgaatacgaggtggctccgctggcccggaacgcgcagggcatttcgatgtcgtctccctcccgtactgtcacatctttggggacttctgtgaatgcagctgggggtggggagagagagagaggcgtgaccagctgtaggtcgggggcctggggcaacctaaagcgaggcagtcggtctctggctggctggccttgtgccccccaccccgcagctgctccctggcgcacggccggaggggctagcaaagttcggggaagcggctgcagggccgaggcagggaccggccatcggctgcctactgcttccctccggatggggcggggcggcaggggcgactcgtgcttctcccccgcccctggccgcaccgccagagcctggctggggcgcgcctactcccgctccccgcaggcatcctttccgcagccggggccccggcgggactgggaacgactcgggcgcggcgctgctgctgcggcgacccttcgccgctcgcctctccctacccctccgggcccaggctgcacagcgggattgctggagaccgcgaagcttcccggttcgttctctttcttcttcttctcggtggcggccccagcaaagacccccccgagtccacagcggcagcaaagttcccgcgctcaccgtcggccacgaagagcagcagggcatgcagcagcagaggcggcaggtatccgagggcaccgagccggttccgctgttccatctcccgcggggggcgcggtggcggcgggggcccgggagcggagaggcggcggccgcgtgggctcggatcggctccggctcgggctaggacgcctccgagcctgccatggccccgcgcggcgccccctcccctggccgccggcggccgccaatcagccccgctccctcgccggcttgcccggtgcggctccggcggggggcgctgcgcggggtgtgcaggagacgcggtcccaccgggaggctgctggcgatcggtcagtgcctctctctgtccggtcgtccacaggacggtggggatccgcggttcagtctctgcccggcgggccgggcaggggctgggccgcgccgggacccatccctggccgagggagtgcgtgccacggagccgcgagcttctgcctccctgtctccttctggttctgctcccgattgccacctccttcggctcccgcagccgcccccgccggttcctccgcggctctttccgcagggcgagtgggcgctcagccgcggcgcgcagacctggcgtccgacccagcgcagcgcggggagagcgggtccggcgtggcggacccggagccggagagaggcggggagagggggaggggaggggaagggagggggcggtcagtggctgggcgccaagccgcctccaccgctgcatcgcccccgccctcccctctcctgccacagcccgccccgcccccgccccagagcgctccccctctctcctcgggggtcgctcggagggaccaccgtctttctggttggagtacagccccgccccgcacccgcttgggttgggagtcctcccacccaaactctccctggcttcttcccagtctgcacggctcgagacggccgctcatccctgctccccgtgtgtccctcggtcctctctgcagctcccagccctcaactccttaccccagtttgggcaaccagctgccccgctgtttggcccaggcctgggccatgacggatgggtgggcgcccggggccgcgagaagggcggaacgctgtgcccagccggagactacgctgggtggcggcggcagcgccgggagtctgcagtgcgcgagggagaagtgagcgcacagcgcccagcgagcaggtgcctgcggcgcggagagcgcacacgctagccagcccgcagcggccgtgagtgacggcaggggcggcgggggtggggtggggtggggagcgccgggcacgactcagggcccgggaggtttccgggagggggcggggttcctgcccctggatcgcgggtccctgtgtctccacgcgctcttcgccggtcgtggccccttctttgcccggtgcaaagcgagatgccgaggcggcaggaagccggaacccatcccccgcctgctctggcgtactcggcatcccggtacctcccccagccttcacccggagtctgctccctccccagccatctgagggagcgcggtctggtccccgaaggcaaatgcggggtggacatgtggttcggacgcagcgcgtagtcatagtcataggggcgagtcctaaggctcgccttgggtctctcctatctccttcccccgggagtccccagctagtgcgtttcggcacctctgcccctaccccggcccctacgcctcagctctgacctcaggttggggtggggcagcccggtggattcacgtgcctgcttccccggctaccagcctcccggaggcaccgc

SEQ ID NO: 5573 - DNA, 3643 bp, Homo sapiens
  source 1..3643: mol_type = unassigned DNA
cggcgcggcgcgaccagcagccggccccgctcgctcgcagctctgccctcagcggcggccactgggaccgactgcccgcccccgacccaggcaagatgcccaactgcgaccgcgcgccccccaagatcgcctcccgagtctcgccacaggtacacgcgtggcccaaacacttcacctggcccgaaaagtcagcagacgggggaaaaaaaaaaagttgtgcgagcagccagccgggcagtcccggagcccgcggaggccgtcctcccgccgcccagccgcccagccgcccacacgcgaggccggcccggggcggcgcgcagctcgcggcacctcgctcccggctttgcgcgctcaccccggggcgcgccgaggccaccgcagggcacttacttggcacttgcttttgagtgtgcagatcgtcgcggttttcacttgggttttcaaacaagtttcagggagaaagaaggaggcaaaaaaaaaaaatccaattatgcaaatggactccggactgggaggcgcgggatggatctgacgccgctactgtacgagttctcggagcagccccgggccgggcagatttatgggggcgcgtcacggctacgccaggtcccgccgccggagcatctcgaagttaattaaagcggtaatgtccactttcctggcgaccctccgtgcgtgggtttactatttcaccatcaaacccgaccccggcgggggcgggggccctgtccccacgcctctccttccctcttctggccgcccccctctttttcctctctccgtctctcacccctttttcctctctttcgtctctttaagtcgcctgccttccactcagtgaacaatgaacaaagatgtgagtgatgggaaaagatcgccccccctcccaaccccagcagagagcaaagccggtcttaaagtaaaaatccagttgctagtatcaaactgggaaagaaaacagcgcgttcccagtctcaccaccccttccacacacacacacgcacgcacatacacacgcacgcacgcacaccccaccccaagttcacctaagccctggctggagactggggcgtcaaggtcagggcgcgcggggctgcccaactcgccggggacaccagggttggggaacggcgcgtgctctggtcaggcgtgcttcccgcgcccatccccgccggtcccctccgccggccccctccgcgcctctacaccggccgaccaggcccggcggcccgctcgggctgcccggccgccggatgcgctcagcaaacgcggcccctgtcggatttctgctaaattgcacagcggcggcggcggcggcggcggctgccgggagaaggcgcaggaggaaccggagggccgtaccgcgcgctcgctcactccgcccctcccgctcgcccctcgccccggccccgccggccgccggctcccacccgcgcacacgacccagcccccaggacgcaccgggtgcccgagccccgcaggccgggacacctcgcagctgccgtattttctgctaaagtgaaaacgaaggcggctgacaaatcacgtctccggcgaggcacccgttagacataacaatatctggcaaacaaaacccggccgccgctgccacccgcacgcggggctgagaccccgccctgctctttctcggcccccagcccctggccactgcgtcctcaactccaacgctccccgccccccaacattccaatcctccacctaactcgggaacggtggacatgttctccaacaggcacacagtaggaaccactcacaatacagaagtgaaaagggggggacttaactttccacctgtccccaaagaaagccctgccggagttcactccgcagagtgaagagtgagcaacacaggtctctctctgcccagccctttttctttctttttccctaacttccccgcgtttcgaccttcctccacttcacatacatccgtctatatggagatatctatattttaaattatttgcaaaactgcaacagatgggcgcgtcgagatctggacactttcctactcatcaaaggaaagctctcccccaaccctaacttttttttttttgcctaaaatacaccccgagtctcgcctacgactgttttcctcaattcatcttcgaaaaataatgtcttgaagcaaacagaaaaaggcttatcagcaaagatcattcctaccccagtcatgcatctgcgctggggggacgggaggcgtccccccagattgcactcttcccagacgccgcgcaagccctgcctctcctctgccttccagagcccccacgcccgcacttcctcgctctgattggcctcatttctccagcctgggactggccggctcttttccctccataacctgttacttatttatttatttatttcctctttggcccccggctgggcccccaggccgaggcccggctggggcaggtgctgcgggcgccgcctgcgcttgcaggcgccacggcctttcctggggtcgcgggttcggaccctggcacctcagccctgaaaccaactctccggcctcagcctggccaggctcccggggcacaggaggccgatgcaatcacaaaatggcagatctcagcggctctcggcgcccgcaagtttgacacattgtaagcatcagctaactttaattgaaaaaaaaaaaaggttgcaaattaccctctctccacgggcggaggggccggaaccccgcagtgagcgcggaccagagaaagagcgcaaggcgaacccccgtcccaggcagaggagaaaatggggaaagtcacttgagcagaagtttccgcggccccagcctaccccctcccctttttactccccccaccccccagaccctcttgaaagtttcccggggcctgagagtggctcgcgggccgctcgcgggtggggggcgccggccgggtccccggagctggacgcggggtcccgatcgcgcgccgggcgccaggcctcgggactccttttcaaagtaacggtcccgggaccgcgggcggggaggcggcggcccaggcgcaggtcccgctcgccgccgaagttctctagcgccatacgatgcccggccgcagccgccggctcggttttcctcttctttccccccaccccccacccgctgacagcttctctcgccaacgtcacagccacggatatttaattagaccgtattttttaatcgcgatggggcgagaaggaaccgggcggcaggcctcgccgagatggggagggggaggggacgggggggccgcgccaagagtccaaactcactttgccacctcccggacgccgaagctgcccccccacccgccgccgcccccccgcgccgcgccccccgcaccgcgccgcgccccgcgatcccccccccacctttgttttccttaccttaaacattgaaacgcgggcgtcaggagcaaactcgggcacgtaaacggagcgttgtaaaagattgtgttcaatgaataatgaaacatgcccacacgattgacttgatcattttccggggctgaggggggacgggcgccctgctcgcgcgcctcactcgcccactcggcagagccctgcgaactgttcccagcccagccggggcagggcgggctcgattttcatcagcctcttttcagaatcgccccgt

SEQ ID NO: 5574 - DNA, 808 bp, Homo sapiens
  source 1..808: mol_type = unassigned DNA
cgggacctcccacaccccgggccgcagcgcactgtgcgagtggagggggtgagctccccagcagaggcgcaaggagggtgtagggtgcgcggtgtggctgtgggctgcggacaggggccgggggcgcgcccgggtcggtgccgcgtggtgggagcagcaggcgcgcaggtagcggggagcccccgcgcacccagcccgcgggtgattactatgcggcggcagctgtctccggcgcggtgacggcgcctctaattgatctcattatctcccctccgtaaggtgaagtgcggccgctcgcggggcccgggcgcgggcagggccggctggcagccgcgggccggcgggggcagcgctcggcctcggggtggcactaccgccgggcgccgcgccaacgaacgcaggcggcgggaggctcggcggcggggctcgcgttcctgcaccgcgaccgcgccagaaaacaccccggggctgggcggcgtctcggagacgcattcctttgttactcccaccgtctttggtaacgattattaatgccatcatgtcccatttcccctcaccttcccccgctcccagagccgcgcccgcgcgcccgatctccaggcgcttcgctcctcctggaaccaacaacaatgatcctcaattaaccctctgccagggctgcctgctcgtgaatggggcgctcttccggctcgcgggcggcaggcgccccagcccgggcggggggccagtctccgctcccccggccggacccgcgggggctcgcaatccgcccgggcgccggctgggggtggcctcgcagctcccccgg

SEQ ID NO: 5575 - DNA, 3415 bp, Homo sapiens
  source 1..3415: mol_type = unassigned DNA
cgggggcctttttgcgtgtcccgacatggcagtatggttgctgcgtgcactccgcatagcccgtgttgtgcgtggcgggctgtcgctgcaatgtgcagcccattgacactgatggatgcgccaatggttggacggacagatgttagggcggatcgcacagcgctcggcgcctgagcgggggagggccaggcagcgacccagcggcggcggccggctacgcggagacccgagttcaggccgcggcccgcagtgggagggggccgaaggaacagaggtttgcaagaacagcgaggggatggaaaggaggagaaaagcgcgaccagggagaactacacgcttccgtgtgcggcgccccgcgctgtgcacacgccgcaccgggcgcgcctaagtgggagcttcgaaggtgagctgggagccggcgggagctgaccccgtgcggcgcaacccgcctccaggcgacaggagctcagcgcggccaccagaatggtgaggccgccggcggtgtcggccaactcaccgtttcctcgcttgcaagaagcgtttcacgctccacggccgcgtctccccggcctggaggagtagcggttctggcctctgcggccgcgggcacccaacgcgcacggcgcctcagcccccgagtccgccagcccgagagccccgccgcagcccgcctcggactccctgccccgcctggggtccgtaccccacaactccgagcgctcctgcgcgcggaaaggcgctggaggcggctttatagccggggaggccagcggcggcgcatctgcatcctgggagacgtctggacccagcccaagcccgcaggctgggcgagcggagacttttgatcttaccgtgtgggtgagatcactgtctcccggtctaaaagaaaagaaagcatgctgtgaacttttgaaacaaacttgcaaaaacagtcgtagagaaaaaataaaaaggacacagggcagaaaaagagggagaaagagactaaaaaaagaaaaagataaggggagggggaaggaaggaaggagagaaggaggaagaagtctggggtttgctgctccaggagcgctcaggcagccggtgctggagcgcggggcgcccgccctcgccgggactgtcggcctcggggcctgcgagagcgccagagccccagccggcgcgcccgggcgcagggccgcctcggggatagtgggcccggaggccgcccccgcgctccagcagccgccgcccggcagcgcccggagccggccccggcgcggccgccccattcccggcctgagagctggcccagggagacgcaatcgagcccgcagcgcatcgatgcgccgccgcccgcgccgctcgggctccggctcccgctcagccgccgccgcccgggggtcgcccgcatgagctccggcccacccgcgccctcaccgccgcccgtaagtgagcccgcgtcgccccgccgcccacgccgcccagccagctccttcttgccgcggccagtcggccgggccggcccggagcctcagcgaccccgatcaccaatcaataatcaatccctctagtccagcagccccggcaggccgggcgcgggacacggcgcggcggccccctaggctctcggggggagcccctggcgggggatgggcaggggagcccggtttccttctcccgcccccgtcccgccctaggatcggcccgcgccgtggatggggggcgcggcccggctcccgggggcgaggggcggggtggagggaccctgatcatcccaaagtcaggagaggaaacttgaaggaaccccctcccacaccgacccccgggacgggcccaggaaagtttgtccggggaaaaaaaattgggggaagtggctacggcgggtcctgggggaggagctgggtggcgcggggtctgagggctgcccccacccgccccggcccgcgcccgcctcctccctggagggggcctgcccgtgggctctggcttccccgggggacgccagccccggcccggggaccacgctgggggctccggagtcggcgggtggagaggagtgcgagccgggtggggcagctggggggtggctggggacgaacgctgggtgggaataggggtggggggtaacgagcgccccgggacgggctcggcggggctggcgccgcgcccccgcgtgtgcgcacggggcggaggcggaggggcggcacccctttcgctggcggggcgggggtcccacgcgggcctggggccgggggcgggggcgcggcgcccccgcgggcgggcgattgacacgatcatctccttttcctttaagcttgcctgttgccgacgccgccgctccagccgcgccacgggcagaagactggaccgccgagccccgggccgcggcggcggctgcgcgtccccccggatgccgtgacccccggcctaggggcgggggccggggcagtaccggtccgggccgctcccgcgctcctcctcccaccgctctgcccgccctctccccgccccccagccccgaaccccgcgcacctcgtctggggacggggcgggggggggcagggccgccgctcctccccgccccctcctcctctggcctctggagcgatttgtcaaacttcccattccgccggcagcgcggtcctcctcctcctcctccacctcctcctcctctgcctcctcctcccccccgtgctcctccctccccgagcctccctcgcccgccctccttcttccctccgcacgttcggggttcgcggcggagcgcggcgcgggggggacgcggagagcctgggcgcagcagcatcctgcgggcggccgctctccgggggggaggctgagagcaggcccgcctcgcccccccgcgggcccgccgccccctccctccctgtcctcagcccggcagcggcggcggcggcggcagtggcagtcgccggagaagcatcatgccgaggaggaagcagcaggcgccccggcgcgcagcaggtacgagccgcttccccttccttctgctctcctcctcctcttcctccgctcgccccgcgcctccagcgggcgcgaccccgctcctcgccccgctcttctgcccgcactgagtaactccgggcgccgctctcctgtttgggtgcgtgcgcccgcctcgggtaccgggcgccccccggacgccccgccgcgctctgccctcttccctctcgcacccatttggggagccgctcgcggagcgcgctgagccgcgccaggtccctacctcctcagctctccggctgcagagggaatgggaagcaaccccggcctggctctttctgtgggtggcgggcggggtcacctgagttccccgggacatcttccgcgtcctccgagcggccgaccgccgggggactgcctggtgtccgccgagccagggagcgcgaacgagtgagcgagccggtcccctcgg

SEQ ID NO: 5576 - DNA, 3415 bp, Homo sapiens; identical to SEQ ID NO: 5575
  source 1..3415: mol_type = unassigned DNA

SEQ ID NO: 5577 - DNA, 1592 bp, Homo sapiens
  source 1..1592: mol_type = unassigned DNA
cgtgctctcctccgctgatccggccgcctacccgaggcagtctcggaaccccggaccccagccatgcgcgcagggaactgccgggccgagcgagctcaccgaagtagtcccgcgccgtgcgcgcctcgagcgcccgctccagctcccgggtgagcgcctccagccgccgctcggccgcgcttgggccgccctcccggccagggggcagcgggagtgcaggcagcgggaagggagccggccccgcaggctccggggagcgagcgggcgcggggcaggcgccgggcgggaggaagtcagcgtaggcgccggccgagccccgggagccgaggctggaaacgctggagcgggcgctgcccaccgaaggcggcccgggaccgggacgcgggtccgagcgaccggagcgcgggctgccgtggcgctggtcgtagcccaggctgatgccgctggatcgggcgctgccgccaccgccgccgccgtcggaccccgccaggctggcccgtgggctgcccgcaggctgcgcgctgagctccggaaccgccgcgcgccggggaccccgctccccgcggctcagtccgtccgccccggcctcggggccgccgctgcccttccctctgcggcccagcgcgggcgccgcctcgtctccaggcccaggccgcggcccccgccgcccccgaccgggagagccgcacccgggctccagctcccgcagggccagcccggccaggagtagggccgcctcgtccgcgcccgccctggagcgctgcatggcccggcccgccggccctggcgcgtcacctccgcctccgcttcccgccgccgctccggccgggccgccgcatcgtccgcccgaagcccggagcccgccccgggacccctgggcgcggggcggggcggggccggcgccgggccggggtcgttccggcggccacgcgcgggccgggggacgcggcgccctgctcggcggcgcgcgcggcggaggaatgtaagctcccaggcgccgggccgcgccccctcctcgccgcggcctcgcgcggggcggagggactcctttgcgggggcaggaatgcgaggaaggagacggcgctgcggcctctggaatgtggggggagtggcggcggccgcgctgcgccgggacctcggaggggcgtggaggccgggccaggacgcaggggcgggcggcggaggcaccgcggggagagcccagggtctgcggggcgcccgggccgtcgggccgctgggaagagctcggatttccgcaggctgagctggaggcagctggcgccatccgggccggagagatccaagcagtcgacagctttccccacatcccgccccatctcccttccctgcgccgccttgctctccggcgctgcagggccgacccagctcagcttggaacccacggcgcttcgcccgtcccgcgcccaggaatactgtgcgcctagcgcagatgcgtccccacgaccccctgcctggcccggggccatgtggccgcgcaccggcctctgaagcccccatctgactgctggggaaggcgcccagaactaggagcgggttggttggggactggtcctcgcgctgggtcgcttcgc

SEQ ID NO: 5578 - DNA, 903 bp, Homo sapiens
  source 1..903: mol_type = unassigned DNA
cgggttcggctggctttcagtaggcttgccggggtctctgcactctgtgtccgggatcctcaatttgcgaatagtctggggaggctgagcgcgagccaggagcggacccgggggtgggggtaagcgccacgtgcgcgccaggtccttggtgtgcccggcaggcggcgctgcgtggctgcggctggctccgagggtgcggggggcggcgacccgggagggaaaacccctgcctcttcccggggcttgctctgcccgtcctttaaactcgccctacaccctccccgactcccgtccttgcaagcgttatctgcagcctcaccggccctcgcaacggtggtggtggttggtggggggtctcgaagcttgcctctggccagccggaccccggtgggagatggaggcagaaattccggcctcctaggagaagggcgtctgctcactcccccactccccggggcttggggagggggctgggcaggggcggaagcgagctggagccgtgtttgtcgcggcgctgcggagtggaacagatggctggggaggggagagggtgcgtggcggggaggaggaggggtgcgggggccggaggatagggaacgaggaatttcgaagcctggagtctcccaggagaagcccccctccccgtcttttcccagaaaggggggcatatatgcgcctgcctttttcccggagagccctggcctctgccctgtggcagaccctgccgcgcaatcctctgccccagggcgcgcccctcacccccaaacccccgccgcgggacggggtggcggggtcaggaccgccaggagcggcccgggtcgcgagggttaatggggccgccctcccaggggcgaggaggcggcgggaaacgggctcggggtggggaacgagttctgggatcgc

SEQ ID NO: 5579 - DNA, 1592 bp, Homo sapiens; identical to SEQ ID NO: 5577
  source 1..1592: mol_type = unassigned DNA

SEQ ID NO: 5580 - DNA, 382 bp, Homo sapiens
  source 1..382: mol_type = unassigned DNA
cgttttttacctttaatcgcgagacaatacgggtcagaggtcaggaaattatgtcagcaccaatgcgggcgcccacgagtgcggtggaccgatgtggaagggccgggacgcagcccgagtcccagttcccgccgtagcgatggccgatttcccagccgcggacgctgaaagcgaggactccacgccgatgacccttcggcgtaccatgtccggcgggcgcttggccaaacagcccaagactgcggaatcacactcgccactgtgtacctggacgccatctgcagacccagcgcctgcggggattccggaaacgggagagcgggcttccggaaacggtgaccaatgggaaacgtgatcagatgttactaggcgaacagtccgt

SEQ ID NO: 5581 - DNA, 665 bp, Homo sapiens
  source 1..665: mol_type = unassigned DNA
cggggaagtagggccgcgaaggcctctgggaaatgtagttcggcgcaggaagcagcggaacgattcgattcttctcagcaccaagttgcgctcccaatctctcagagctgggctcgcgggaggccgctcgtgcaaaacctaggctgagctcccctgcgcggagctgtgagccctggaacaccgtggtctgcttctcaggacgcgcaaacagtgaagccagtcccgcccgggtgagccgcgggggcctctgggaagcgtcgcccctggtgtaacggaccgagacttgtggcgctctcagccaccgacagcgccggcctcagtgccgcctctgtcccagcccgcgccggctctgccactttggcagcgttaagtgtggaatcggggcctgtgtccgcgggcttggtggtgagtcctcgggaaaccgctagctctgagcgccggactctttgtgctgggtgggagtgggggcccgcggtcctggtgccccaatctttggaggaggacgccgggcggggcgatgcctgtgcttgtggttccctgaggcagtgggagtggcgtgtgaaggactgtgagagtctggcgtgaagtgactgtcatttgccagacattcgtctggctgagtgtggccccgggatcgtgtccgtaagcggatttcgtggaggcgc

SEQ ID NO: 5582 - DNA, 764 bp, Homo sapiens
  source 1..764: mol_type = unassigned DNA
cgcgggtatcggcccaacaaggtgcagcgaacagtcgcccgctcccgcctcaactcacagcctcacattccacggtgccattgacttcctcgcacccagtcacacaggacgtggacaggcacacggggtgacagcctcgcactgaacggtaccaacctccactcgcaccggagtcacacagatggcctgcgacgagcttccggagacccacacgccactcctcagcccactcccgacctgcagaacagaactggtggaagatctccttcctgccccgaaggctcggggaatctgcactcgggtctcaccgctacccttagttggatggaacccagcccttacgggcccggaaagaagcgcctcagctgcctccgcccccggaggacacaaaggggccgccggcccaactcccgcggggtccgctgggaaacgtagtccggagtagaaaaggtcgcggcgtcgcagtgtctggcagcagcggtgcagctccgcgcagggtttgtaacacggcctcctccccaccaggtcctcccacactggcctctccccggccttccagagagcccgaaagtccggattccctgcagctccgagcctggcccggtcacagggacggggcccagcgtcacactacacgggctggtgtggaagtgcgcaggcacaagcgctctgcgcgcctcccttagcaaccagggcggggagttgagaatcgcaggttggccgcagggaaaaggtttgtgcgtgggaacgcgctagtggcgcgt

SEQ ID NO: 5583 - DNA, 1394 bp, Homo sapiens
  source 1..1394: mol_type = unassigned DNA
cgatgtcaggtacgtcacaaacgcagacacaaaccgcaaagaccccagagacccgctacagccagcgtcagagtcaggcaccaccgcgcagccttctctgcggcaccatcctaatcccccgctagagaacggcacacgcgcacgcagcagccccgtgcacggaaacactactccgccagcggccaggcactcggtccaggtacgcgggggcgcggcggccgtcactcagcaaacaccacaggcagcacgcgccgcgccttggtccaggctcgcgatactggggtttcctccatccaactcacgccagggtcacggctacaggcctagatttgaacactccatccccatcgggatcctgtagccaacctccaccctcctccaaacctcccgacccctcggcaggtgcggccccacacttctcccttgctccctgaagggccccagcgttcgccccccgcgcgcttgcgcactcgaggcagaagccgatttccaaaggttccggtgaggcgtcgctgggggcggggcggggctcgcagcctccgcctgtctccgagccgagaaccaaatgaaaaataaaaaggcggaatattgtttttttaaattttggaccgcagtgtccacaggggagcaggcctggattatctttaatggcactggtcagtcacggggcggccattacaggtagaggcctgaggcgagggacactgcggcccctctggctccgtctccccggcccgactatccccgccgagacccggccccacgcgcccctcccggcccggagcagctgcgggacttgcctccgcccccccgcgcgctagcgcattcgcgacggagacaggcgctctcccgtattctggcgccgctgactcccagggctgggctatcctctgagtcgggtgaggctggggctgggagccgggcgccactgtggccgctgcttttctgagggaaaagagcgcggagtgggccaggttttgcaggccgggccaaggtggagaaaaggttcctgtggagcctcaggccggtgtgctttttttcccgggactgagcttctgcagccctgaggcctggaggcccgggcggtagtaactgtgccggaccaggttcgtgggtgcggcctgtggtgcagttggagaccgaggccccgcgcatcctcgtccgcgcttcagccacttaggctcggccgtagcgaaaaggcccaagagggaagtcagaggtgaacgccccaggatgaaggtcccctgcaaaacgctgggacctagatttggggtgggtgtctggggtctaggaggacacgctggacagttccgaaaagacacagtgggtggtcccgggcgtgggcaaccgggtgcggaactacagcgtacccggagctgcgaacccagacgcgg

SEQ ID NO: 5584 - DNA, 949 bp, Homo sapiens
  source 1..949: mol_type = unassigned DNA
cgctccagcgctcccgagtcacacctgtgcggcttattcaacgcgatgcctggacgcagcctccagagaggaggccgggattggaatacgcagccggggaatggttgcaggtggtccagctcccgcccccgccccgcccccgcccgggcctcgtgcggccccgggtgcgcaggtgaaagcccggcctcagcggcctcggccctgccatggaccccgcgcccggcgtcctagatccccgcgccgcgccgcccgcgctcctgggcaccccgcaagccgaggtgctggaggacgtgttgcgggagcagttcgggccgctgccccagctggccgctgtctgccggctcaagcggctgccctcgggcggctactcgtccactgaaaacctccagttggtgctggagcggcggcgtgtggccaacgccaaggagcgtgagcgggtgagggatccctagggtcgacgtccgttccccccttccctgctctaccaccaaacacctggtcaacacccgggggtccgctcaccgcccacccccgctcgaggcgacttcgagctcccgaggcctcccacgcccccagcttgtcaggagaatggcagtggcctccttcttctgcacctccgtgcagctgctcgttggcggccgctgcggtggccgcctcgcccgctaaccctccaggatttgtgcaggacccgggtctgggaggggacagaggaggggccctgacaacttcaaaaatgtctccctgggcaggtgctttaaaagcttcgcgcccagggggtgcgccttcatctcacaccgtaggcgctggtgggtgcttgggacgcgcagggatccccttcgctcctttttcttgctctctgcatctcggcctcgaagcacacacgagggtgaggagaaaggggggcctgacggaagtgacttttcttttttaaagtaacgaaacacgacgt

SEQ ID NO: 5585 - DNA, 1365 bp, Homo sapiens
  source 1..1365: mol_type = unassigned DNA
cgctcaacagcaccgcccggagcgtccacttccccctaccccgtaaaaaaaaaaaacagggccattggttcgggtcgagagccgctttgggaagcgtctctgtcactaagcgctaccccggggtgtgcgagggagtcaagggacgcggagaccgggagcagggctgggtccccttgcagccccagcgctggcctcctgcccaccgcattcaggcgctgcgccgccctcacacccaccctctcccacctcagcagcgtgcgggggaagcctcgcgccggggtctttttcagcaagactgtcgcggtcctcggcttcaactgcaaggtaaacggtggcagagccccttcccactccagccgtgtgtgattctcacactcagtgccctctcctgcactggggcgccggcagtggcgacctaggctctccagcccccgcccagtcccccgcgtgcgggcgccgggaccgcagtacctgtgacgccgaagcccagcaggccgcagacgggagccacgcgcggccctggcacagggtaaaaacctacgctcaggtaggcgggcagccacgatgtcgggcaagcccagggcagacccccggtggcgcacagggaagcagcggtccagaaggccgggtggacgcaggcggagcccgacggctgggaggccgccggcgcgcaggggtcgggcctcgccaggatggcctcgaccgagaaaggggactcgaagcgtccgggagcgcggggcgtgttcgggccagtaggggacctgggcgccggagagcggccagagcgcggaggtcggacccgagagcccgagggagcgggtggcgggctgcctcgcggcctggggctaggcatgacgcggccgttgcccggacggacgcaaggaagggagctcgggagaagtgagaagattctgcaaaaggcagcgagcaagaccggttgtctgggaacctcctggcgctcggcgaaggctcttaaatttggcggggcggggcatggggcggcctctccccactgcggtccgggcggggcccccaaagcctgtgagcgcccgctctgtgcgaggcaaggtgggcacagcaccaaagagtgtgttccctcccttcctccgcttttaaaaatgcccaccctggggcggtcgtggggaggactctgagctcgctggtgatcctgggcgaaacacccagccaccgggctccgtctttctcctttgctcactgaagaagggatgcccgtttccccggggccttgcagaggcggagctgtgatctggagagcggtagggcagtgcctgcggtcttggcctcagctgacccgcgccgtccttgacgcagaagcctcggccagattcacctaggaccgcgcgg

SEQ ID NO: 5586 - DNA, 2638 bp, Homo sapiens
  source 1..2638: mol_type = unassigned DNA
cgtcgacagcgaagtggcaggcaatgggaatctgggcgggaagcaaagaactactacgattcacatcgcgcccaagcagcagcacgcgggaacctggcacacagtaggtaggcgttcacccaacatctgtcatcggacccagcacctgggcagggagcctaggggtggagtggcggcttgggggacacaaaggcctcgccagcccccagctgcgcccctcgcaacgcggggggcgggagtttagagccagagagagggggcgaaggaatccgccctcatttgcacgtcgtctggggcccggtcaatttgcttaatcaccgctctaaatgccagcgggcagcacacaatacgcgcccattaacaggtttaaagtgtcgcagcgctcgctttaaatgagaaaagcaggcgacaaaagggggaaaaagccaagttcctcaacttgaagaatgccttgggtcgcctcgaaatcatctacgcgagtttaaaattcggagctagctccgcagaaaagctgaggccccggtgcgagggctgggggtgggaacgggggctgtgaataacccgccacgaaaactgggtttcttaggaaccagcctgcagccgcccagtgaacccggagtcggaggacaacgtcgccaacccagctccctaggccccttgccccactgccagagaaagctgaccgatttccaagaaggaaagcgagacccccccaaagcgggcacaaatccaagtttccttcggtgcaggcgaagaattctggaggccaaggaagatcccagaggtggactccaaaacctcaacccgcaagaggggaaaagttaaagtaactttactttcatccaggcactggccagcgcagcctcgcgctcggccgccagagagtagttcaactccgcaaacaagttctgcttgggatcggcgcagaaggccccatcccccactccatggccaagcccgggggcgcatcctgcgggccgcggcctcccaccctccccggcgcgcccgacgggcactcacggtgcgcgctcctccgggagacaggggtccgttggagaggtacgggctgctcaggtccgggatcatcaggaaggggtacccagggtacgggggtcctttaaagaacgcgctgtcctgaggccttctcactgcgaacaagaccaaggcgaggtgaggcccaggcccccgggactgacagcgccgcggcagggggctcgaggcgggagctggggaccccagcgccccccacgcgcgccccacgggggctgccgccaataaaggcggagggcaagggtgcgtccacccaagcaagggggacggtgggccgcccgggctgagcagcggagcgcagcgggaatcgagagtggggggctgtcccagcgggcacataccttcggcgaaatagtcccgcggcttctggaaagtgtcccggacgggctgcgggcgcctctccgcctgcggaggagacacaaaggcaagagcgggtgagcggacgcagggccgggatcccccgggggtggccgcggtgcttccttacctccgagtccgagctgctgctctggttctccgactcgttgaccagggacgacttgacctcgtctaggtcccgctgcgccgaggcgctatcgctgctcggctcctgctcctcgcccccctcgtcctggaaggggatcagctcgtcgttcgccccgaggtcgtcccctccgccggccgccccggcgctggagccgccgcctcccccgctgccgccgccgccgccgccgcccccgccgccgagctggggcatggtggggccgcgggccggggccgccgctctcggagcccctagccgcccgcgccctgcccggcccggcccggcgcccctcccgcccgcttgcgggcccgctgcgctagccgccgcaacaaagtttgacagggcgtggccccgcgggaagcgggcccggcgctgcccggccggggcgcaggcggctcggctcgggcccctccggcagcgccgagcctagggctccccaactcgccaccgccgccgcctgctccgccggggcgtcccagcccctggcccgccggggaggggcgagcggggagggagggaggagggaccgccgggctgggcaggggggccggagggaggagccccggctgcaagctgacacccgcgcgcctcgcggaacccggagagctgcggtgcgcgcgcacacacacacatacacacgcactcacactcacacgttcacactcgcatcttccaggggctgcgtctccctgcaacgtgcaccgcccccaaccccctcctgcgcctcacactgcaccctcggcggccctccccacggcctccctggagtcctggaagtcttgcgcccacccctccgcatcccctaactttctcccaaagaacctccagaactccgcgcaggttcccaccccctcccaccgtatcggcgcgcgggcgggcggcactgccccctgcgggaaagcctcggacgcacatactggccgcggggccctccccctgcctagagtccctccgagtgcgcgagctgatgcacggactaggacactggggacatctatggaaccccggaaaatgcccggcggctttccgcgcctttttcctgtggggttccaacgcgacccccgg

SEQ ID NO: 5587 - DNA, 1531 bp, Homo sapiens
  source 1..1531: mol_type = unassigned DNA
cgaaagcccgtacaaaccgcacagaaaacgaataaatgcttcccgaatgtgagcgaacctacagtttggttagaaaaactcaacactgatttccgttcctccaatcacagaatccccgaggagaaggggacacgccaagcgggcctgttaataacctctaccgtataccccaaagcgttgtaaatcacatcgattattttcgactggaagccgatcggttgagactggacgtgaattccgcgactcgatcacaaaaggttaggaggaaagaggtagaaaagccaaaaggatgactaggcaggtggcccgagcggccaccccaagttaactttttagaaatcattcgtactgttcgggttatcttctctttaatattcgtggctttacttattatgatgttaagaaacgtgggctaggaatggggtgctgctttttgcccgaaacctggaggcgccggcctcccagacgctcccgggcccgggcagaggggcggtaggggcggggcgggcgggctccgggtttgggcgcgcgggcaggtggggcgtggcgggggcgtggagagcccaggcccgcggccaccgccccgctccgggccggcccaggaggagccgcgccgggctcggttataagaggccggctagcaggcgctccgctagcacccgcccgaccccggcccggagcaccgggcgcccagcgcgggtgaaggcggagccgcagggttggcccccaaagggatgctctcgcccgagcggcgagaccagccccgctcgcccctcgccgcggccgcgccgcagccgcccacggccgccgacatggccctctactgcggcgacaacttcggagtgtattcgcagcccggcctgcccccgcccgccgccaccgccgccgccccgggcgcccccccggcagccagggcgccttacgggctggccgactacgccgcgccgccggccgccgccgccaacccctacctgtggctcaacgggcccggcgtgggaggcccgccctccgccgccgccgcagccgccgccgcgtacctgggcgctccgccgccgccgccgccccccggggccgcggccgggccctttctgcagccaccgcctgccgccggcacttcggctgctctcagcggcccttcgcgcagcccgcgcccgccgcgcccgcctcgcccgccgcgcccgcggggcccggggagctgggctggctgtccatggccagccgcgaggacctgatgaagatggtgcggccgccctactcgtattcggcgctcatcgccatggccattcagagcgcgcccgagcgcaaactcactctcagccacatctaccagttcgtcgccgatagcttccccttctaccagcgcagcaaggccggctggcagaactccatccgccacaacctgtcgctcaacgactgcttcaagaaggtgccccgcgacgaggacgacccaggtgagggccgctggcaggtgcttcccagccggggagggcggacgcgggtcgcaagggccggcgcaggggtcggtgtgcgg

SEQ ID NO: 5588 - DNA, 2045 bp, Homo sapiens
  source 1..2045: mol_type = unassigned DNA
cggcgtcctcgctctgtctgcattttccttcattgctctttcacgtttggaatgcccccgtctctgcagcctgcagacagcggaaaccgcgggtgcaaatgtgcaggggccgctgacatgaccggctgcagaagcccactcagggttacccgaacaggctagcgttcgggattgcacaagaggtcaggcgatgctgtgggcttccaaatttgtacagctgcgacactctgcgacgtgccaccctatccccagtggggtggggtgggggattccctccgcagtccgctgaaagcgaggcaggaatcactgcaactcctctgctcaggctgaggtcgccaccgctccgcggatgcacgcgctgcaggggcgccttccgccgcgggcacggcgcgggaagggatggggtctggtgggagtgggcaggtggcgggagaggcgcgtgtccgtgcactagaggcccccgtgcgtgacacaggccgatgagctcctgcgggctgcacccacgcggagtcacagaccgaaaaggtcagccggtggccggtgtgctaacatatatagagagacgcccgccaggcgcgccgcaggctgggacgaggctaggagggcccaggctggaggagggctgaggagggctgcgggggcgggccccggcgcagggcgcccggagcggagggggcgggcccgaggcggggcgggccgcggcgctgacgggctgtcgccgctgcactcgcctccagcccgcggtgtcgagcgcaggcggaggtacatggccccgacgggaggcgcgcggcgagcacccggagctcggctccctgcctgagcacggcagccgcgcctccgcccgcgcgtcctcgcccctccggccggcagcccgcggacatgatcgtgtagcctcctcctgggctgggatttgtttgaagattttcttcatggaagcgatgtccccccagcaggagactctagggggacagccggggcgctcctcttccctgacaggagtgtctcggctcgcgggaggcagctgcaccaagaaggtgaggacgctgagcgggggcccgtgccctccgccgccgcagcccccactgccggcgcgcgccctccgcgcccgccacagcagcgcgctaggcggacgccgcgggaatttgacgctcgaggctcgcggcccctaatgagagtcccagaacacttcccgcccttgacggccagcggcagcgccgccgcctcccgcagagcgcccgcttctccgtttctagagccttagtctctcctcgagcgacctcgcagcctccctcccgtctccatccgccgccggttctgcagcccggctcctccctcagtctaggcgcgcgggctgtagtgggcgatcgcctttccccgacccctcgccgtgcccctgggcctcccgaagtggcctgggcgagcactgactgccctttggcggtgtcagccccaaagtcagggccggcgatgtctgcccgggagcggcagccggcgctgaagaaggtaggcagcggggctgcggcgctggtgggctcggccccctcacctgcccgccgaggcgcggctgctccatagcagttttcggggggcagatatggggagtactgccccccacaccagggtcctggatgattccgggtctcccaggtgggggtcacagtttgaggggcgactgtggatgataacgctcgacactacggggacatgtaggttcggctgggcctagaaccgagcagggtgggggcgggtgggctgtggttgggggtcctgagggctgaggtgggggaccttctccctgcactggtccctggcccctgggactctggccgggctggatagggatccgggtgtcggtgtgggcgtgggggcagcgcgtgttccctgtcaaagctgggagagggatgcaggtgacaacttgtagcgttccattccgataaacacggccgctgtgctgcgggaggattccgatccgggtcaggtttcgctggaacggttccctgagcaagtgcacgtgggccgcgggctgccggcctctgccgtttcgc

SEQ ID NO: 5589 - DNA, 476 bp, Homo sapiens
  source 1..476: mol_type = unassigned DNA
cgggcgacacgccctgggagggcgggctggcggcttctccagctcggagcgcgtggaggctgcgcgtaggggtccgggacgcgggacagggactccgcgcagcccaggcgccggggaaccggggctggagtcggggatctgagcccagcggacgcctcctccgcctggaggcccggcacggaccgggacaccagggcgtccgtggccgtggctcggcccctggctgctgcgggccgcggcctccagtgggtccccaggacccttccccacggcgggtactcaccgaggctgagaggccacgccgtgctgttggggcttctcgtcgaccacattcctgggcgtcagcccgggcagagaccgcggggactggccaggccgggccaggccgggccgggggagggtcgcgctcccgggctcctgaccctcggcggcgagaggaagcggcacctgggtcacactcctcccgcgcgggccga

SEQ ID NO: 5590 - DNA, 455 bp, Homo sapiens
  source 1..455: mol_type = unassigned DNA
cgcccttgcccagcgaggaccgtgcagaagcgggaaccgggcactggagggcgcgcgcggcacgcgcatctcggctggcacctcctggctccgcggggccggaaagaacctcgaatactcggtcttaaaaggctcctagtcatcccgttccttccactcctcacagcacagatggggaaactgaggcctggagaataagcgtggcatacccagggtcaccggaagagtaatgagctgaaccagagaggaggaacgggaagcgagacttctaagcaatgcggggtggcccccgggccaccggaggaggcatggtcgggcacgtccccaagtttcggtacccgtggtggctgtgccagccgatatgagcccctccctctctaggaaggcgcaggactcggggaagcctccgcggccaggccgcctgcctacccgcagaccccgggcgccgcccgcgt

SEQ ID NO: 5591 - DNA, 749 bp, Homo sapiens
  source 1..749: mol_type = unassigned DNA
cggggacccgagcccccgggctgaggaccgcgggggaccccaggtcgggacggagcctcctctggctcgctgtgcgcgcacgcctggaaaggcgggatttaaggcagcgatgctgcgggaggctctgcagtgtcaacgagcccccgaacggttccgcctcattccctctctgtgtgcctcgcaagtctctgcttagtaaaccgtcacagcttcggcgcgcgagagtggcgttggcacgtccaaaccccggggtcctcggccaggccaggggggcgggcgtgcggcggggccgggccgggccgggcgcgcccagcgggctccgggcacacgcccctcacctgggcgaggcccggtgcgcaggcgctcagcgcgggggcagcggccgggcgcttaagcccggcgcgggcaagagttggacagttcaggggccgcgccgggccgagctgtcgcccgcgccacctccaccgccgccgctgctaccgccaccgccaccgcctgggctgcagcagatcgcgggagaacgtctgcgcgaagccccggtgcagccctggcgggaccgcagcaaccaccggagcgtgagcaacagcttcccggctggaggagccactgccccacgcgcccgcggcccgcgcgccgaggtaagctctgggcgcccagcccagaccggcgcccccggactgggcgccctctgcttgcccggcccccgccctcctccgcagagcgagcctgcacctgggcgcgccgcccga

SEQ ID NO: 5592 - DNA, 1134 bp, Homo sapiens
  source 1..1134: mol_type = unassigned DNA
cgaggagggcggggcgcccggtccccagtcgcgcggccaccgcctgcccagcctggctggatttgagcccggcccgccgatcgctggccgaggcgcagctgaagcagccccccagccgcggcgcccccactttccaactccacggttcctgcggcgcgggcgcgatgcagctggcccggggtgaaggcaaggcgcggggcgcggggcgcggggcactgggagcgaggcactggcgcgggatgcccggcgcaaggtgcagggcgcgggccgctctctttccgcgtccccccacctcgccaaagtttttccacgatggtccctaccccggctgggtcagccccgtaatcctcgcctgtctcttgtctcctctttcctccccgagccgcggggctcccggggcgcgcggacccccgccaggggccgtgtaggcgcggagccccagccggcctgccttgggtccgaagaaagttgtggcttggagctagtcctccttctacgacccctgggggcgtccttccttctttttgagcccgcgatgggaaggcgctcccaccccatccccggggtctctgagacttcctggcgaggtggggcggcgcggcaggtgcagggctggggagggcctgacagccctggagagtgcccgaccccagtccgccgccgtcttctaggcggattccccagaggcaggtcccagtccccggcgcggggaggcggcgcgcttcagaggggcgcagggtgcgcgggggccgttggccctccgggcacttcccctttgcggtctccccgccctccttcggagctggtgcctgaggtcgctgggacctcagcctggcgtcttctctcgccccgagcgaggcaggtgccgtgggcggccccggctacttctgcatttcgagcgcttactttgcattcagctctaagtcggagagctctggggacagccgagagtgccagtggcctcatagggagactgagggttctgtttcacctcgggcgccgtgtgggtctgggctgtccacagcacctctgcgcctcagtgataggagaagccaagcgcgaggcctctcaacagctgcgtgcactctatttcccaggtatctggaatcccggcgcctagaacgtgtttttcgg

SEQ ID NO: 5593 - DNA, 1645 bp, Homo sapiens
  source 1..1645: mol_type = unassigned DNA
cggcgctttccttccggaaaggacgctggattcagggcgcgccagtacgcgcagtagcggcccgcgagtcggcaggtgggtagccccggcgcgggaggaaggggaagttaccttcccctcggaagagggcgctggctcccccatcctgcctttataataaggccaccggaggagaggaagcagccagctgccgtctgcgctttgcaaagcatgcagttaggggagcagctcttggtgagctcagtgaacctgcctggcgcgcacttctacccgctggagagtgcgcgaggcggcagcggcgggagcgctggccacctccccagcgcggccccctctcctcagaagttggacttagacaaagcgtccaagaagttttccggcagtctctcctgcgaggcggtgagcggggagcccgcagccgccagcgcaggggcccccgcggccatgcttagtgacaccgacgccggggacgcatttgccagcgctgcggcagtggccaagccggggcccccggacggccgcaagggctccccctgcggggaggaggagctgccctccgccgctgcagccgccgccgccgccgccgccgcggctgcggccactgcgcgctactccatggacagcctgagctccgagcggtactacctccagtcccccggtcctcaggggtcggagctggctgcgccctgctcactcttcccgtaccaggcggcggctggggcgccccacggacctgtgtacccggctcctaacggggcgcgctacccctacggctccatgctgccccccggcggcttccccgcggctgtgtgcccacccgggagggcgcagttcggcccaggagccggtgcgggcagtggcgcgggcggtagcagcggcgggggcggcggcccgggcacctatcagtacagccagggggctccgctctacgggccgtaccctggagccgcagcggcgggatcttgcggaggactggggggcctgggggttccaggttctggcttccgtgcccacgtctacctgtgcaaccggcctctgtggctcaaattccaccgccaccaaactgagatgatcattacgaaacagggcaggtgagcgcagcgtggaggggcccctgggttcggggataaagggtgacgtgtggtcctggggaaggtccgggatgagggagctgaacccagttgttccgcgcggtgcttagagtgtttcaccgcgcgcaataaatctccgtagacaccgcatctccaatgcggtgtccctctgtgtcagtgccccggcggctcttgcagggtgccaatgttacggctgtacaccgcttttccctcccatcatcctcacctgaacagacctggaggaggcggaaatggaaattagggcatgtccacaagctggattcgttagatcctcctgctcggcggtatgcttgtgcatgcctgcatgccggcaaggagccacggatagggaaggctcaagagctggccacctgagcgcagtagatgggctcccgcagttttaggcgccagggtctccacggggcgtctccgggaggtgggcatgaaggctagagcgccggcctcggaagctcggtcggagtaggtggttagatctgccctggagccagacctggctcgggttcggtgcgcga

SEQ ID NO: 5594 - DNA, 4698 bp, Homo sapiens
  source 1..4698: mol_type = unassigned DNA
cgcacggactcgcgttcgcatccgaagaccccacacgtcccccgcactgtccccacagcatcccacgcccgcggtgcacgctcacctgccggtagacgagccacacgcctcggcggtccagacttccgtgtcgacctccgtgggcgagcctacgcgctgggtgcccggcgcgccctcaggagtggctgggaccgcgggctggcgccgggcagggcggtgggacgcctggagccggcgggaggagcacgcccaggcgggtccgcgccgagcccgagcgagcgggcgagccgggcgggaggggccatttgtaaccgagcagacgctaccaccgccccttactcgcggggggcgggggcgggcggtcaggtgacggcggcccaccctccgccgccgagccgggtggttcctgcccgggaggagccccctggcgcgctctgattggaactcccgccgcagtggcgggggaggggggacacgtgaccgcccggccaggcggcccggcgcgccccattcgcgatgggcaccccatcttcctcctggaaaagccgggggacacagagaaggcggaggagcacgcggggtgcaggagagcctaccagcccctttagccgcagtgctggtgattccggccgctgaacccggagaggaaaggctcccacgcggccagccggccttgactgtcctctcgccctgcccttggccgcagtaccctcccctcggctgcagtaaccgccccctacacctccaggcaagggcacgctcagtgtagaccactgccacttcatagatgccagtgccacttaagagtggtgttgggttttttttttttcctttcctcctctctgcacaccagcacattgtacccgagagaaactcacggcggtgcactgcagacaccgcccagctccagggcccgaagaccctccgaccaggccccgggatgcctgaggtctcccaggtcattacgtggaggaactcaggcctgctccctgcgcaggaggaggaggcgtcgcgggagctgcagtccccgatccttcccaggaagccggccgggtggaaggggagagggccgttatcgtggtgcgaatccaactcgcagcctctgggagcacgttgctaataaaggtcaaattaaaacaactaagtggtgccggcagggacgcgccgcatggtcaggagaagcccggctattaatcatccataaggagcattgctcttctggtgtgggagaatggggctgtgcgacagccccccggagttgcgctctgctctgaaccctaagctcccccagagcaagtggattgcgcagcctattaccccacctccccacggccccctcttggggcggcaccaccctagatggcaggaattcggagaaaatgcggtgtcacgtccgccgctatgcccgcacacgcgtctgcgccaactccagcaacacgtggggaccgtgaatctgggcgtctgctctccacttaggtggttatgtgggtatacttatatgattactgattaaaaccaaattggacggagaagtctgtttctacactggattctttcaaacttctgtccaagggagttttgcgctcgatttgggcggggacgcagttttcagccaagaccgccgcagcgctcagcagagcccggggaccggtggtggtggtggcgggatggggaggaacagaggcccttgattctttggtactccactttctttccttatttagaccagtcgggcaacacgtccctcgcccaagatggcctttccaactggaacgtgactcagacaatgtggaagccaggggtccttgacccatcgtacctgggcttcgctgggcataggacaagggttgggcaggtttacctggaaagggagtttattcgtaaagcttcgggcataaacgctagatagcgaaactttgaggaagctcaaagtttacctattgtaaattggtggggggtgggggagcatcttatgtaaaaaggaacggccctattaaattagtaagtatcttattttcgtagtggacgtcttgctgcccttggtcctcccctcccccacctcatttctccaaaccaccaaggttggagaaatctcataaacaaagtataagtccgtggggggggggggggggggttacttggtgttttaaaaaaacaacaacaacaaacgacctttgtaataagaaaggtgggtacgttttcatttctaggtcttaatcttaacgttacggccacgttaaaattgaagttgattgagacaagagaatcccagagcacagcacgcagacagacaatttcacaattaaaaaatatgtacttccttctccccgctctcgtcacctccccctttccccgccattacctactcccgtttggactaggggctgggagaggaggaggatgtagtccctccgagtgcacaagggaggcggcggggccacttgttgctgcaccgccagaagagctaattccgagcggatctggcagggagttaaaacccttctcctggatgcgacgccccagagaccgaggcagacggcgagaacagattcagcgcctcgagatgtgctttccaatttgaactctggaccatctttgcttgaaatgctttgtcttgcacgtctgggaattactctgtgcgattaaacgcgtgacacacacacgcatacgcggggtcgccccgcaggggggagggtgcgtggcacaggagcctcggactttcaggggctctgcacttggggagtggtgcgagggggaccgcctcggtgtggctgctgacgtgagacaggtaactcggaaaggtcttcctccggctgccttggtaatgggaagctgtgggcaaaggtgcaggggcggtcccggagcgcacacggcgcagtccgcagtgaagggcagtggtgtggtggggcagagagactagacaagggcaggcgggttttgccgattccgagttcatccgtctacggggtcacgttctgttgagaaaatgcgcgacacccggtagggagagagtgacactgaccaagtgtccctggagggccgagccgtttgccctcgggagggggtcgcgaggcccgtcagcactcggctcccgcggaagctgtgctagcgcggcagtctcgccggcgcctggccccaccagcctttgccttcagcgtcctccggtggcatcgtccgagatttgcggagcagaagccgaggacacgagcaactcgctgtgggcttgaagtgaccacgccttagggctgtgaaaagctgccccgtggtgacttgggtacgaggaggttaataaagtgcagaattagtcttgatttttacctaaaatgaagctggtagtactgagcgcttaaatgactccgctaggaccctggaggttgtgggagcggggtgggagagggtaaatgctaggtttaggacaacacaggatatgtctaatttaaggaagctccccttctcgggccacgttctctgtagctctacccaactggaatcgcctctgcacccggggtcatctccggcattatgacacccagcgttgccctctaaactccaagtccccgcggccacatccttccgtgcctgctggcaccagcaagagtctctgcctgccctttctcctttacatggacccttttcctttcacccctagaccgcagtgcgactggcaggcacctcttcgccccctccgcgccccgcgccgacggtgggaacagcagcgacagcgcgaccgcagccttctagtgccttcgccccctcccccgcggccacacctcacccacctcacccgccaaaccccgcactccgccgccgtccctcccctgcgcgctcccggcgccaacccagccagaagcgggtggaagcccgggtccatgtgcaggtgtccttgtgcgggagtaggggagctcataggtcagcgatccgcgaccctaccctgccctcagctcggggtccacccacgtggaacccgccggcccccgcgggtacccaacaccagtctcccgggctcggctgccgttccctcgaagccccagggcgctcccacgggtcaatgaccacctcagtctttcctcaagccagggtttggccagttgggaaacctcttcgtcccctgcccacatcccctggcatctccggacaaagccactcggcttcccgccccggcatcgggaaagatgcgcgtggagagcgcctccaggcgctgggccacggtcccggtccctggccgtgcctgctgtgtgcggagctggggcggcgggtaccgcctgcgcggggcaggcaccccactcgccgttcctccagcacgggcactcgaccgccgcggcgctgcaggaaggaggccccgccgcgccggttcctccacacccacgtgcccctcgtgtgcgcgcccccggcctgcagatgctacaaggctggcgccgcctggatttccgggcggccccaccctccgcggccgctacgcctcgctccctgcattcagtctccttggcgtctccgctgcagcatccaagaccaggcgccgcctctgctagccgtgctgcccagcacgcctgagggccgctgccggcaggcctcacctcccgcccgggtcccccactcacctttccttctggacggtggggttcaagctctgcactggggctgttaagccaccgcccacgacctcctgtagggtgcagcgggagggcgttcccgaggcgc

SEQ ID NO: 5595 - DNA, 462 bp, Homo sapiens
  source 1..462: mol_type = unassigned DNA
cggctcgtaaactgattatgaaacatacgatgttaattcggagctgcatttcccagctgggcactctcgcgcgctggtccccggggcctcgccccccaccccctgcccttccctcccgcgtcctgcccccatcctccaccccccgcgctggccaccccgcctccttggcagcctctggcggcagcgcgctccactcgcctccgtgctcctctcgcccatggaattaattctggctccacttgttgctcggcccaggttggggagaggacggagggtggccgcagcgggttcctgagtgaattacccaggagggactgagcacagcaccaactagaggggggccagggggtgcgggactcgagcgagcaggaaggaggcagcgcctggcaccagggctttgactcaacagaattgagacacgtttgtaatcgctggcgtgccccgcgcacaggatcccagcga

SEQ ID NO: 5596 - DNA, 300 bp, Homo sapiens
  source 1..300: mol_type = unassigned DNA
cgctgcaaaacagccgccgggtgcagtgggccgggcgctcggccaccctggctgcgatcatcgcagcctcccaaaggatgcgggcagatgcagacggctctggcccatctgtccctaaaggcctgggactgtgcttgcgtgctccgggagggtacccgaaacctgggagctctccggcgctcccagcctcgggtatctggggctctttgtctcccaacagcactaatcctgagaacaacgcgcaccgaaggcggaggcccctgtgctttggacaagcccgccacgggcaagccagttcga

SEQ ID NO: 5597 - DNA, 554 bp, Homo sapiens
  source 1..554: mol_type = unassigned DNA
cgccggggcggggattaccttgtagcaggagcccgcagacactgtagaagcggagaacggcgctgcgtttccaaatcatggtcccttctctaaagggctggggaaggaacgagggggcaagtagatgctggtgagcggggcacgagagtgcagggctccgctggtgtcctcctcccggcgcccgccggacccaccgtccccaccgctgcggtgttcgaacccgcggactcggatcggcggcagcagaagcggcagcggcaaagcacccgcagaatggggtatcgcgaaatagtttcttctcctcctcctcctgctggtggtgcagccgcgacagcccgtcttccaggcaggggtttggagcttgccttcctctcggcgcgcacagcaagtcccagagcccgccggggctgcccgagcaggtggtgcagggatgccggggtgttggagaaggtgcgggcgagggctgcaaggagtgggtaggtcacggaggggaagggctgggggagaggaggagcaagcaagcagcactgccgctcgcgcccggggtgtctcgg

SEQ ID NO: 5598 - DNA, 1153 bp, Homo sapiens
  source 1..1153: mol_type = unassigned DNA
cggcgcacacaagttgaggactgccgaggcgtctcctgcgaggtaaacacgaagtcgcttggttagtgagaagaaacccgaggtggcctctggggcagacagagcaggacctgcttctgccccttgccctcctcgtcctcctctctccagcggcggcgaccgcagtaacagcggcagtggcggctgctgccactgctctgccgctgccgagccggtcacctgggcacccgcggagccgcgccgctgctaccgccccggcggcctcccggagtgcgcggagggggcggcggaggagcgagatatccatagtaaccgaggatgcgaggggcgcccagcagcagcgagtgcctgggagccaggaggaggcccccgcgcgccggcaacccccagtgctaggcgccctgcagcccccgcgcgccgcgcctgggcccgcatcgctctcgcagtgagggtccgcccgagcggtaagccctccccggcggccaagccgacacctcccccccgcctcgccgcccaccccgggcagcagccgcggaacaatggagagcgcagccagcagccctggagacggcgttcgggggaggacgcgccgccgccgccgccgctgccgccagggcaggcgcgcgccgcgtggagccgggcgggtgcgagggcgcgcggcggggggtggggggcacgcgccgcgcggggggcgggggcagtggggggcgcgcgcgcgggcccggggagctcgcggggagagcccggcgctcggcgcagcgcggcgcggccaagctccgcgcctctcccgcccttcctcggcgcgctcgccctcgcctcgccgctcgcattcgctgggggcgcccagaaagatgcacagaggcaacggctaggggagcggaggttcaagccacatgtctgcgtcctcgggggccagagcccgccagccctcgcggatcccggctcgcggccagcccgagcggctcgggtgagtagcggcacagcggccccctcgctccgcggcccccgctcgccgagacgtggctccaagaagtggtgccgcagccggggcagaggcggaggaagccgagtcgggcaagccgggaaggctgcggagacgctttgccggggcaggtgttgcagcctcagctagcggtctctacggagggggcgg

SEQ ID NO: 5599 - DNA, 1603 bp, Homo sapiens
  source 1..1603: mol_type = unassigned DNA
cggcccgcagggggtgtcccggggcgccccctgcgcgaggtcccgggaacagggcacgagggtccaggctgcccagttgcaggtgcagctgcttcggaggaggacgctgcctgcggcgccggggagctcctcgcggctggaggcgaggggaattgcatccaccacagtgtcccgcttgcgcgaggactattcacttgggccggagagagcgcgcgcgcgcaagagcgagctcgggctgtggtttgggggaggggagcgagggggcggggagcgcctcaccgcgaggacgggggcggggacggactgccaggtggggcgggcagttggggcggcccgaggacctctcccgactcaagtgggcacttgcggagccaaaagcaggggaggcgctgcagctgtgaagaggcgtgggggccgcgggaactttcctctggccggtgcgatgaaagccgggcggacgaggtggctcaacggggctgagagtggttcggccgaggcgcgggctgagccctcagcacctggcctgagcggcgtgggcagcagcctgcaccgcggacacctccaactctgccgcgtctgcgccgcactctggccgtggcagcgattttccgggcatctctgaggccgcccttagtcccacaagcacttagccgcccatttcagagcagcggcgccgaccgttttaagaggagtcagttcccgacaccgcctcccacttacttctccacatttccaccgctggagggggtgagtgccgtggacaggcgctcccgtccggggacagctcagcggcggcagtcagcccgaccctcctccgcgcgggtcgcccaaacttgaccagcagagcgagcggctcagcgcagtagccgccttcgcggcttccagttgtagaaaagcaaagcgccgggaggaagcagcagagggggggttacatgaggctggaaagtggcgggtgtacggcgcccgggatcgccgaggtccttgcgtcgccttgcggaggtgacttcgcggtggaggtcacgagcatcgtcgcagccttgacgctgggattcaggggtccccgagcgtccacggcgtggtggcgtcgggccgcgctctcctagcagtccaagggccgagtggcgcgtggccacatccacagcagcgcaggggcgccgtgggctgacggctctccccgcgcgagccgccccctcgcggcacccactccctccccgcgctcgggtctcccggaagccgaggcgcgggccacttggtgggactccgcggcccccgccccagggccggggcaacgcggcgtgctgactgggaggaccctcggcgtccgcggtctccaccacctcgccccgcggcggaggcgggcgcccagggcagggacggagcccggagcgctgcagagcccggccaagcccagccttctcccggcctggcagccgcggctcggatgccgccagttcggcgctagagggggttagtcgacaacaaaaatgcctgcaccgctcgcaggtggaggcggctcatcaggccaggaaccgaaaggagggagggatgctgtcaggctaaacttaacgccttggttaagggcgcgtcaaggaaaccgtatcgc

SEQ ID NO: 5600 - DNA, 1411 bp, Homo sapiens
  source 1..1411: mol_type = unassigned DNA
cggtccccgctactcgggtggatcctgcttaccgcgagcggggaggcggttgccttccgtgcaggatttccgttgagggctcacaataagcggtctcaagcgggggcacattccccgccacttccgcggtccctcaaacaaacaaagaagccaaagtcggctgtcccaagaccaatgtaagcgcttaggaagctttgaggcgcttgagggcgaggcaggctgccgtgggcaggtgtgaacacctcagccctcgcggcgggtttggagccgcccagcgtaggaagagggcagaagtgggctcgcgtctatgcgggtattcgaaatgaaaaagagctgcaaacggcacaaaagtccgggggctaggcgcaggaaaacagagcaagggagctgccttagttctcaaacactgcatatggatgggtgttccgcggaagattattctagaccctgtgaaagaagtctccactgggcgccggccacggcattggggtgcgcgcctgctctgcgagaagggtcccccaggccgcgcgggggaacgcaggagacgcctgtccccgggggaaccagcggaggattgtttcatttcaaagtgaaaatctgcaggctttgggaaacgatattcaaaaaagtatataatctccatatgccgctcaatggaggatcctcataatttacagcggcagataaggctagagggtgtaataaaaaatctgaagccctcccctcccccctcgccgcctccccggaattgcaccttgggcagcggagcagaatccggaatgtgaacttctcccgacatatgtttcccgcagataagtaaacaatctggacgtgaaatggaaatggtaattaatgcagtaatgctgttacacctcgagtgtgcaaatcccattgactcgccgcgccacggggggtgccgggcgtacggggaccggtggcgtgcgcccaggctgcccactccctccctcctctctccctcctccctaggtccccgggcggggcgtccagaaatcccgcagggatgtggacgggctgcgggaagcaaggagctgcttaagcggcgttcgggactcccggctctcggcccttggaggactgggcgggtgctctgcgtttgcctcgacagccgcacctctcacccacctccctcggttatcaccgccgcgctagcgctagcagggcctcctcggggctcgagtgcagcccggccctgaagcacctaggagagcctgagctcgggcgacagaggcctggaggcagagggaaccctcaaacttagtgcggcgggtggccctgagtgcggcggtcaggtctttctctcctctctgttccggggccaagtgctgccgggttgtctggcgagagtttttctgaagtttctttccatcctcgcaccgaaagcgctgatcgt

SEQ ID NO: 5601 - DNA, 2629 bp, Homo sapiens
  source 1..2629: mol_type = unassigned DNA
cggcagcaaacggcagagcaaaggagtcgttttctttcacctgaaagccgcgaggaggcttggagcgcctttcctcgctggggcccgagcttcctgggctttggccgggtgcgggcagaccccaccggggtcctcgtcatctcccagcccagcccgcagagcgagtaccggcagatttcaagggcgcgtgagcctggctgtcggctgggcccctgaggctcgctgggcgggggcaggccggtccaggctgtgcggggcgtttacaaaaagtgacttggagatgaactcgcccgtgcgcggctggccgccccgctataggggcgaaggcgcctgacgcaagcggaactcggtggagcccatacgaatcagaacagagcgaggctcctggcgcactagggactccaggaggcagctccgccagagacgcgggtcgtgcttcgggaaaccggggggcggggggaggggaagagcgcagaaaagaaaacccaccaaggcggggactggcctgagcggggaggggcggcgaggccggagcccctctctgttgggcggactccccatggccagaggctgagctccactcccgccggccgctccctaggggaaggggaaggagaggggagagcagcgacaggcctccagcaagcaagcgcgggcggcatccgcagtctccagaagtttgagacttggccgtaagcggactcgtgcgccccaactctttgccgcgccagcgcctggagcggagagcagaggcggcccggccgcggcgcgccggctttgtcatgatggccagctaccccgagcccgaggacgcggcgggggccctgctggccccagagaccggtcgcacagtcaaggagccagaagggccgccgccgagcccaggcaagggcggtgggggtggcggcgggacagccccggagaagccggacccggcgcagaagcccccgtactcgtacgtggcgctcatcgccatggcgatccgcgagagcgcggagaagaggctcacgctgtccggcatctaccagtacatcatcgcgaagttcccgttctacgagaagaataagaagggctggcaaaatagcatccgccacaacctcagcctcaacgagtgcttcatcaaggtgccgcgcgagggcggcggcgagcgcaagggcaactactggacgctggacccggcctgcgaagacatgttcgagaagggcaactaccggcgccgccgccgcatgaagaggcccttccggccgccgcccgcgcacttccagcccggcaaggggctcttcggggccggaggcgccgcaggcgggtgcggcgtggcgggcgccggggccgacggctacggctacctggcgccccccaagtacctgcagtctggcttcctcaacaactcgtggccgctaccgcagcctccctcacccatgccctatgcctcctgccagatggcggcagccgcagcggctgcagcagctgcggctgcagccgcgggccccggtagccctggcgcggccgctgtggtcaaggggctggcgggcccggccgcctcgtacgggccgtacacacgcgtgcagagcatggcgctgccccccggcgtagtgaactcgtacaatggcctgggaggcccgccggccgcacccccgcctccgccgcacccccacccgcatccgcacgcacaccatctgcacgcggccgccgcaccgccgcctgccccaccgcaccacggggccgccgcgccgccgccgggccagctcagccctgccagcccagccaccgccgcgcccccggcgcccgcgcccaccagtgcgccgggcctgcagttcgcttgtgcccggcagcccgagctcgccatgatgcattgctcttactgggaccacgacagcaagaccggcgcgctgcattcgcgcctcgatctctgagagcccaccgcatgccggtgcagacggatgcgaggatgcagggacgcgcgacgccggccccggtcgcagccgacgacgccgccgccagcctgacctcacaccctctgggcccgcctctggagccagcgcccagggtccctctgtgctttttcgctttcctaagctcctgtcgctcctctttgtcccctcagtttatgtcctcctgtgctcacctccctgacctctgtgaccttgcactcccctggcctgaagctgcctctctgcgcgctttctactgggctcgtctctttccggagccccagcgtctcctgcccaaattcaccgcggaaagggcccggggcggaggtgcgaccgggcgtcggcagcgcagacctcttggccttctctcacaggtcggtgcgctcgctctccgcgttccccgcccgactgccgtgcagtccatggctagacgcgccggacaggactgatggcgggaccgcgctgcccgagaaagggacggaccaatacgtgtgtttgctccgcgaaccctcttgaagctgttcagaagccgcttgccgcggggcccactaggcggggcgggggttgggacccagcgggagccggggcagcctggctccacggcctgtactcggtttacaccgcgggcgggcgcggagggaggctgcgtttcctccgctatcagtcccgtcgcttcgggcacctccgggccccggcgg

SEQ ID NO: 5602 - DNA, 1686 bp, Homo sapiens
  source 1..1686: mol_type = unassigned DNA
cgacgctcccaggcagctgtcaaagtccggggttcgccggcttccaggctcgcctgacagagccaggcgttcgcttggatctagcttccttccgggcgggaggcgcggggaggtcaagctcttcaaaggaacagggtgggcaggggagtggtgccaggttaggctcctcggtcctcggtagtcagagcggagtaggaaaggcagcggggagcctcacatcccgcgcttcttccggaccccgccgcctacccggagggtacacgttccccggggagtcagagacgccctgggggagcttgaggagtgtcagcggggccttccctggagcctacaagtttccactccatccccgagctgggagacaagtcacagctcggctccctccttgaaagcaccgccgctgatccttcccccaggcaggagcagacacctgcttgtccccacggcgcgccagcgccctgctctagccgtccctgggccagagctcgaaactcacccactgcgctcccaccccggcacagacagccctcaaagttgtccgtactccccagacctcgccttctgctcagcccccggaccccgcccaggggttgagttgacgtccgcgggtggacctctctggtccgctgcgcagggaactgacttcgggaatccagggcgcacagaggccaaagaagctgcggcaagggagggtgggcaaatccagcttgagcctaggtccttgccgctttcaccctcaagcctgccctgcctccctcctgggagaagagcaaacttccccagcacccacctttagccgcgaggaggcggcgctgccggctgtccccgccaccgccgctgccgctccccacgcccagcgccagcaggagcggcacccagcacagccgcccaggcagcatcctcgcagcagccgccaacgagctgcagccgccgcctactgtccgcgccggctctcgcctcccggtgcctgccgcaccgtgggccgcctcgccgtgcccgatgggtgcgcttctagcgctgccgccgcggcgctcggcctcgggttcccgccgctgcgccgctagctcgccggcagcagccgcgctcactggcgcggacccggagcggctcaggcgctcaccccgggacggcccgtgacgtcacggagggagggaggtggctcgtgcatattcatgaacgcgggcatcggcgccgggttccgcgctccccgccccaaggccccgacccccaactttcctcagccgtctccacgctccggggccctgtccaggtccccctgcccagtcgggaccgggcccccagaggaccctggtgggcggctccggagagccctccagccccgcgcctccactccgactctcggaaaagctgccgcaagggatggagggctcccccagaaagtggccacccgaggcctgagggtcatctggggtggcgcgagggaccctgacctgccatgccctttgaactgatatctgggcggagaggactgacgggcgtcgctaagggtcttgcccttggctgggtctctgggcgttctgcgtcgactggtctggggagggcgccaggcgcacactagagcagcgcctagtggtgctaggggttgtcgggcagagtagatagccttggacctggatggcaatggcagggctccgcgtcatctccgagaagcaggggcagccgcgg

SEQ ID NO: 5603 - DNA, 1686 bp, Homo sapiens; identical to SEQ ID NO: 5602
  source 1..1686: mol_type = unassigned DNA

SEQ ID NO: 5604 - DNA, 2132 bp, Homo sapiens
  source 1..2132: mol_type = unassigned DNA
cggctcgaagagctggtgagcgcgaccacagggcagcttgcggacggttctttcggacaggacaagggcgagggaaacggcagaatggtgacgcacctgagtgcgcccactagacgaaagaagaccaactaagccttcgtgtagtgcgtagacaggccgacacacacacacacacacacacacacacactaacacacacgcaaagacagtgagggagcgagaggcgcatccccaggtagctgacaatgacacggccccgatccggacgcgggcttaaagccccccgacttccggagtgcccccctccccggcgacctccggagattaccgctggcgcatctctccgccctgcccggctccggcgccctcccctccccccgcagccgcagctccccgccccccgcgaacgcggctccccagtgtcctccagaacgcccgcgtggctgtcgggtttcgaaccccagggccgactctagtactcggcgcgcgcgccgccgcgtcgccgaccagcctgcggcccccgcatcaatcattaacggggcggcccgggctgcggcggcccgaggagggggatggtacggaactcgagacaggggacaactctatcccccgaagcggccgcgaaaccctagcctgggaggcccccgcccttcctcggtgcgcccgtccctccctccgcgcctcggctcgcacatccccacctcccgctccgggggcggcggcggcggaggcacccgcaccgcgcgatgcccagtcaccgctgccgcgctgccgccgcagtcagccgcgccgccgccgctgccgcagcgcgggcggccgcgcgccggtagcaggggcttggcgaggaagccgctgagcctcgcgcgctccgcgctcctggcggtcgcagcgctgcctattaattgattctcttattgatttatttaatttttaggagcggctgctcggaggcacgggtcttctcctaaacctgcagcgacgcccccggcgtgggcacaaaggctccgacggcggccggcgggggctgcccagcgcccgggagccggcgccagaggtcgcctgcgcgcgccctagccgagccccgggcaccatgccgcggcgcctgcagccccggggcgcgggcacaaaaggccctccggccccggccccggcagcttcgggggccgcccggaactcccactctgccgcctcccgggaccccccagcgtctgccaagccgctgctgcgctgggacgaggtgcccgacgacttcgtggagtgcttcatcctgtcgggctaccggcgtctgccgtgcacggcccaggagtgcctagcctcggtgctgaagcctaccaacgagacgctcaacttctggacgcacttcatcccgctgctgctgttcctgagcaagttctgccgtctgttcttcctgagcggcggcgacgtgcccttccaccacccgtggctgctaccgttgtggtgctacgcgtcgggagtgctgctgaccttcgccatgagctgcacggcgcacgtgttcagctgcctgtcgctgcgtctgcgcgccgccttcttctacctggactacgcgtccatcagctactacggcttcggcagcacggtggcctactactactacctgttgccaggcctcagcttgctggatgccagagtcatgactccatacttgcagcagcgcctgggctggcacgtggactgcacgcgccttatcgccgcctaccgcgccctggtgctgcctgtggccttcgtgctggcggtggcttgcactgtggcctgctgcaagagccgtaccgactggtgtacctacccgttcgcgctgcgcaccttcgtcttcgtcatgccgctcagcatggcctgccccattatgctcgagagctggctcttcgacctgcgtggggagaaccccacactcttcgtgcacttctaccgccgctacttctggctggtggtggccgccttcttcaacgtgagcaagatccccgagcgcatccagccgggtcttttcgacattatcggccacagccaccagctcttccacatcttcaccttcctcagcatctacgaccaggtgtactacgtagaagagggcctgcgccagttcctccaggcgccgcctgccgcacccactttctcgg

SEQ ID NO: 5605 - DNA, 2954 bp, Homo sapiens
  source 1..2954: mol_type = unassigned DNA
cgcccagagcgtggtagtctgcggggccgcccacgccctccttcttggcgccaagcttgtggcccgcggcctccaagaagggcatgcggtgagctcgcgggtctcggctgcgcaccacctgtaggctctcacggatgaggccgtggcgcgagcggatccgtgaactcgccaccgcgcggggatcacgcaccaagtggatgaccttgaggtccagggccgggtctcgcagcagtggcgccaagaccgccacgtcgaagacgcgcacaccctttatgactagtgtgcggtacttgcggcactcctcctcgaaacgcgccaggcgctgtggcgggcacttcttgcacacgcggtcgtccaccaaccccacgacctccttgcggtaggcggggcagagtggtgacgagcacaccaccttgttggtggctgcgccgaagatgcccagcgtggtgaggttgcgccccccgctgcccgcggggctatacaactggaagacagagaggtcgcagcggtaaagagcgctcagcatgtcccgcgctgccccctgcagggaaacggcgtcccccggatacagtttttgccatacatgccacactggctcgtagagaaagaacacctcgggattctggttgaatagctcgccgaagaacgacgagccagagcgccacgtggtgaacacgtacaccagctgccgcttgtccccgacgcccccggtgccccgagtgccattgcctggaggggccgcaacccccgccatccctgccgcggctgcaggagccgccccgacggcggcagcgggagggcggtaaggagtgcggaggtccaaacgggcatgagcacggggcggcccggccggaggcggccctgggcgcccccagctgcctccggctgcccccgctgcggcacccagcggcccatcggggttgcactgctgcagcggctccttgtgccacttgtagtccaggaggttgagcatagtgagcaccagcagcagtgcatagcccgcgcacaacaccagcgccttcctacggaacaccttcattccgagaggggacgcgggccagcggcgtcctgggcgccggggccactgcgggagcagggcacgcggcgcggctgcaggcgcagcctggagcagccgagggagcgcgcccgggggcagagctcgctgcgggctgcggctcatcacaggcacaatccgggccggcggcgcggcggaggcagccctgcagcccgggaaggggacgcagcgggctggctgctggcgccgggactcgggccgcgactccgaggcgggcgcggcggctggtccccagcgcccaaggctggctctcccatggcagcggctccgggtaggacctgcgaggggaagcggagtgagcggatgcgccccaatctccctcccagcctcctcctcctaagtaacgcccaccctcggttctgcccggttcctccgctcacctggagccgagggcgcgcccgggagcggccccggatcaccgcccggcggactgtccggctgtcactcgttcctcgatttcgctccctctcgcttccgctgggggtccccgcaccttcgaggggtctggggagtcggccgacttatccctgggcagtttccgggcagcgggcgccctgcggctcgggaagaaaaactttcacgcggcccagagccccgctccgcgctccgccgaacccggcgcctcccggctccagcgacgtctcctccgctttctcgggaccgcagcttcctgtctcgctcaggggaacgaagccggctgggggcgatggctgggggcggcttatatgggactcagctcccggcatagcggcgcagcccctctcgctttcggcctccgtgcggcgaattttcccacctctctggcagcggtggatggggcacagcgcgaccccgcagcggcggcggcggctgcttccatcaccgggaggatgcccgggcggacagcgcaggcaacccccgccgctccgcagcctccgactggaccaaaggaccccgaacacacagctctaggcaaggaaacccaggtgtgcagcactgcccgacccgacccaacccgcccccggtaccagcgcttctggccaacgaggtatttaagcaaagaaagaccccgccgcagccgccgccgccgcgcgaaagcggcgcccaggaggatgctgctacccgactccccttacgccgggcgcccgcaacgcgctcggaccagcctctgcgcggctcctgccagccggcgcccggttggtgcgcgccgccgtctgtcgccgcggctcctcccctccgccgcgcagccctcccccttcgccggccccgcccccgcccccaacgccgagccggctcccaccgtcgctgcgcctcgggggctggagacgcgacccgctttaccgcgacgcgcgggggctgcagtccacgggtccgaaggcttagctctgcgcgcaaagcgccgggatgcgaacgcgggatctggagctcgtcggtgccgagagctgccagagagttggattctgcgtgcagctgccggactcggccccatgtttttgctctcagaaagagttggtgatgaagtttgggcagaaatcccctgtcggccgtccgctccacgcttccctcggggccgacactgccaacctctccgggcactgaggacacctctgcgccctggagcggtgggaggacgcggagcgccgttctctggcttccgacaccctgcccgccctctctagtgggtctgtggctgcgccctctcgaaggaagtaataaatctttctgaccttgggggtcagaggagacgcttcagttttccggaggggtgtgcgggcgggaccgtctttccgctttactggacctctggccggggctgctcttgtttcattgtgccccacatgcggagccccgatgctctccgcatttccgctcgcggtgctgcgtccactgtgattgacgt

SEQ ID NO: 5606 - DNA, 2954 bp, Homo sapiens; identical to SEQ ID NO: 5605
  source 1..2954: mol_type = unassigned DNA

SEQ ID NO: 5607 - DNA, 885 bp, Homo sapiens
  source 1..885: mol_type = unassigned DNA
cgcccgccgcccttttgaggtcacggcgcaggagagaaggagggcgcggaaacgccggcaccggctgggaagcttcggtgctccgggtccctcttggcgagggcggagaagtcggcggcctctgcctagaattctgtgattgtagggatcgagacatcaagggcgggggtgcagaggattacaagttccctagcgcgtctcatttgcacataaatgtgctttgcctcctaaccttgtctctgttacctgtgcacctgccttccaccaaaccaaccaaccacccgtggctcaggaagaaaccagaactggggggattgtcttcccaagggggacacagttgaacgtggccggcagcctctggcctcccgggcctgggttcagacggactccggcgctgcttccaagaccgacatcgggcacctggccgccggcgcacccaggagcacgatttcatgcgtgtgcacgctctctgctcgggccaggagctctgtttcagccccactccgggctataaatccctggttccgcccagcgcagcctcggctcggagggcagcctgctagccaggtcctgggttagggatggcccacggtgcgcgcggggaccgccacactccttagcgccacgctggggccgcgcgggccggagcagggggagggggcccgatgacgtcatggaacagttggaggatttagctcgggaacccgccggggagcgggccccggggccggcgttccatttaggccgacagcgtcccgggctcggctccactttcccagacggcacggctgccttccacgtccagagcgggcctggggttctgaaggaaatcagtgcacgatcgcgaggccaggaactctggagaatgggcacgcaggcgtgcgc

SEQ ID NO: 5608 - DNA, 2174 bp, Homo sapiens
  source 1..2174: mol_type = unassigned DNA
cgcgctgtgcttcccagcgctccaggggcccggcccccagctcggccccacctgggcgctctttcgctcttccgtgggtcggcgggccgtgcgggaggaactctggctgccgcgggctctgcgtcccacctgccatctcggtggctctcgcccgggccccgagtttcctgcggagctagcactccagctgagccagccggaggggcggcggcggctccgcgcgcccagagcctcagcccatgaatgggactccaccctgagcgccccctcccgggcctggggaggcggcggcgcggcggcggggggcgccccgcaagcccgcggctctgagcggccacccgcgcagcaagttgggcgagttggcagccgcctgcacctgcctcctggccccggcccctgattccgcctccggccccaagcgcccgggttgcgccctcggctgcctcgcgaggtagccccaggaggcctaggggccccgcctgcgcccctggcgccagaccatggtgggcagctccggccaggagcctcagccgccgcgagccaacatcgcctgcagccagcccccgccccacccgagcggacgcgcgggtattcgcagcgcgcgggtcacttccttcctcggccgggatgggcggcgcgggactgagtgatcggccttgcgtccggcgggtaatccccatctgatctgctgcctgtgagctgctgactgccggggcgcgcgagcctagggggcacgggcagcagcgcggcgatgacctgatcccgagcccgccagggcgccccttccttccctcccttccctcgctccctctgagcctgtgcggagaccagctcggtgcggcggccccgggtggaccatggcggggagctccagttaaaggcgtgtgggcgccgagctggagaggacaccttcggcatcgctgccttttgagggggcttatttaaactactgagtcattccagatttaggattccctaaataatcaccaactgtgcccgtctcgtgccggaaagcaagcggaaagagaaagagcgcccactcttgggaccccgcagatcgcctctcgctggtttctccccgaggggtgcttggccctcgaggatctccctccctccctcgcgccctcccccctccctcgcctcccgctctctttgcagtgctgctggccgggagttgctctcaccgcagctggaaacagctgcccccgccccgcgcccctacccagactccgggtaaccgctcccacttcgcgcctctcggaattccagaactcgggtggccggcccctggaaagccgcagccggcgcgatgcattctgtagacctcaccctgctgggacggacctcctaatcttcagaaccgcgggccgcagggagttaaattgctgccttcctctccttctctcgtgcggttggtggcttgttttctaaaggaacgttttattcactttttagtattttctaccgggggcgcgctacccgcctgggtccagactctgctttgtaaacgggttttctatgtatgtatgtgtaggtatactttggacaccttacaacgcttgcgcctctccaacagaggcacgtcttgttattttgggcatcgttcttccccttccacttggtaccccgaacgcagtgtgactaaactccccactgccccttggacgccgatcgccttggggtgcaagtttggggtgcaaacgtctacttcgcaagagggcctgggaccgccccgccccgccccccggccgccagaggttggggaagtttacatctggattttcacacattttgtcgccactgcccagactttgactaaccttgtgagcgccgggttttcgatactgcagcctcctcaaattttagcactgcctccccgcgactgccctttccctggccgcccaggtcctgccctcgccccggcggagcgcaagccggagggcgcagtagaggctggggcctgaggccctcgctgagcagctatggctgcggcgatagccagctccttgatccggcagaagcggcaggcgagggagtccaacagcgaccgagtgtcggcctccaagcgccgctccagccccagcaaagacgggcgctccctgtgcgagaggcacgtcctcggggtgttcagcaaagtgcgcttctgcagcggccgcaagaggccggtgaggcgg

SEQ ID NO: 5609 - DNA, 873 bp, Homo sapiens
  source 1..873: mol_type = unassigned DNA
cggccgggcttagcgatgcggctgagctgcccacccgcgtctgttgaatcggccaatcagcggcgcccccggacctagcgggagcgtttccatgccgaccgcggcaggcgtgcgctctccggggccgcatcgccatggcgacctgctcacctgactcgctccgggtggactcgccgcgacccctgggcgttcaggcccctgagggcccaacgggcgacggccctccagctccagctgtgcgtctccgcccgggcgaggtggggctgaccgcggccgtctgcacacgtcccctctggtccgcgcccccggcctgggagggcggactcgcccaccccacgatggccccggctttggaagggactgtttccgtgacccgttctcccaacagccgctaacaaccccctctaacgtctcctgcgcggcccgctcctgagaaccctggctcgggagagcgacgcggggtcctcggggctgcgcaggctgcggcgccctgcccacgctggcccgagggcgcggctcgctccgggtcggctcacacacctacgcttcctgccgggaggcggctgggacgcggcggggctgccccaagtgcagtcgcggcagtgttgcgtctccatcgcgggggtccttgcgggccgcgcctgccccgcccggctcccggtgcatgtggcctgcgaggcggcagaggagatgtggggatttagggtcgcacgtcgtgctcgaggtccccacgagaggtcttcccccgcgggctcctgcgcaactgcgtgaagccggcccgggaaagccaagattgtggcccaggaagaggaaggaacgcgggcgacagagctggggcttgggacgttgagggggtcggtggcagctctccgg

SEQ ID NO: 5610 - DNA, 2174 bp, Homo sapiens; identical to SEQ ID NO: 5608
  source 1..2174: mol_type = unassigned DNA

SEQ ID NO: 5611 - DNA, 510 bp, Homo sapiens
  source 1..510: mol_type = unassigned DNA
cgcgcagccggagaggagggggcggcatccgggatctggcgcggcttttgccttttgcgccagcgtgagctcggttagggtctccacggccgtgctttcacccctcagggaggcgtcggtgattcggtcacagcctcagcctccgtcgctctgtgacctgcgggtattggatgattcgtagctgagactccgctacacccctgaagtggggaaatggtgagtgtgggggcagggcgtcccaaggctggggaggcctcatccgaaccggcgggaaatggcggcggcgggacggagtctgcgaacggagtctccgctgccgccgctcagccctcagtccttggtcccttccggtgagggacccgggttcatgtcggtccccgcaaggcggctttggcccagcctgcagccctacttgtgcagctctgcgcccgcagccccgcaccttccctgggctgtggggtgaggaggagctcatcgggaaaacgcctgcgtggcgtgcgaggtgcccgc

SEQ ID NO: 5612 - DNA, 511 bp, Homo sapiens
  source 1..511: mol_type = unassigned DNA
cgctctgattcggtttgggcgcaagcaaacccaggcctggccgccgggcgcctgggccgcgccaactcgctctccccctcccacgcccgtccggcacctcctggcccgccaagccccagatgcgggtgtttgttccagaaaactttcggcggcggctcgcactgagcatgctcggcggcggggcgggcctggggtccggaagctccagcgactcggcggcacccgccgctttgaggtagcgggtcccgacaggcgatggacccctcgggctcccgggggcgccccacgtgggtgctggccgggggtctcctggcagtggccctggcgctggggggccgaggctgtctcggcgccagctcacgtccccgctggcgccccctcggcgcgcagccaccccgggatccccaggtggctcctaggtctgggcccggcctgaggatccctccggggcggagcggggcggggcccgagagcagcacgcaggtaaggagggcccgaccccaggctccgg

SEQ ID NO: 5613 - DNA, 417 bp, Homo sapiens
  source 1..417: mol_type = unassigned DNA
cgccgccacctccctcctggagcagaaggggaacccgacgcctaagcggttgcgtgcgaagttcccaaccaggctcaaggagtcgcagagccggggctccgggcccgcaggacccagaagccacgcgccccgcgctccccgccccgccgctgtctgctcggccgacccacctggtgtcgcgtgcgctggcggcccgcgcggcagccaagccaaaggccgaggccgaggccgagcgcggcgcccagcagcacggcgggggccagcagggcgggcgccggccgcagcgcgtcccgccccagcagcagccgcgcgtcgctcttgcaggccgccccgccgcgggccatccggggcgctcaggctgccgccccgccgcatcccgccgcctgctgcaccgtccccgccagggcggcgacgcgg

SEQ ID NO: 5614 - DNA, 1748 bp, Homo sapiens
  source 1..1748: mol_type = unassigned DNA
cgcgggtcggggagctgcacctcttgcaggctcggctctcggccccgccccctagcgtcggagcccgggagccgcggctgcagcctatctctttaaatgacagctgaggctcgggtcccagtccggggcttgacgtcagtgcctcctcccgtgctgccaggagtagttagcgccaccgtcggcgctccggcctcgcggcacgcttgcaagctgccggggcggcgagttttctttgcttcggcccctcctcccgccctccccacggagagccgagcagcagccctagagcctctcgcaagtctctctcacacttccccgccctcgccccaaaggagcagcagctccttcttgcctctccattgccgccgccgcaccggcggagctcctctctcgcgcgtctctcctccgatggagctcgggcgccgccgacgccgccgctgccccgaaccctgagcggggccgccccggtcggaggaacgcgccgcccagtccgagggcgcagagcgccaggagcacgcggagggctggggcgcgggctccgggaacgagaaagtgcagctctctcgggtcactgggccggcggcggggggactatggctctgaaggacacgggcagcggcggcagcaccatcctgcccattagcgagatggtttcctcgtccagctcgcccggcgcgtcggccgccgccgccccggggccctgcgcaccctcgcccttccctgaagtagtggagctgaacgtaggcggccaggtttatgtgaccaagcactcgacgctgctcagcgtcccggacagtactttggccagcatgttctcgccctctagtccccgtggcggcgcccggcgccggggcgagctgcccagggacagccgggcgcgcttcttcatcgaccgggacggcttccttttcaggtacgtgctggattatctgcgggacaagcaactcgcgctgccggagcacttccccgagaaggagcggctgctgcgcgaggccgagtatttccagctcaccgacttggtcaagctgctgtcgcccaaggtcaccaagcagaactctctcaacgacgagggctgccagagcgacctggaggacaacgtctcgcagggtagcagcgacgcgctgctgctgcgcggggcggcggccgccgtgccctcgggcccgggagcgcacggtggtggcggcggcggcggcgcgcaggacaagcgctcgggcttcctcacgctgggctaccggggctcctacaccaccgtgcgcgacaaccaggccgacgccaaattccggcgtgtggcgcgcatcatggtgtgcgggcgcatcgcgctggccaaggaggtcttcggggacacgctcaacgagagccgcgaccccgaccggcagccggagaagtacacgtcccgcttctacctcaagttcacctacttggagcaggcctttgatcgcctgtccgaggccggcttccacatggtggcgtgtaactcctcgggcaccgccgccttcgtcaaccagtaccgcgacgacaagatctggagcagctacaccgagtacattttcttccgtaagttcgcagccccggcgtttcccagcacccctcgccccctgctgagccgccgccagtttgagccccgctggaggccccgcgggggtgtccggggcaggcgctggttaactccttatagagagcggctctccctgcacgattcccttatgcagtagacacgatttacatttcaccgattcggatatttccgt

SEQ ID NO: 5615 - DNA, 1748 bp, Homo sapiens; identical to SEQ ID NO: 5614
  source 1..1748: mol_type = unassigned DNA

SEQ ID NO: 5616 - DNA, 648 bp, Homo sapiens
  source 1..648: mol_type = unassigned DNA
cggctgtgtcgggagtaaaggttcgggctagtgtgcgtgcgggcgcgggtgaccccacctttagggaagccggcgcccaactatccaggcagtagccccggctgaccccctccctcctccttccctcctctcttccctccctccctgcgtgtctcctctgcaccggcccccgccgcggagccaggcggcagcaccgacgccgccgcagctcctgcccgcatcgcgctaacccgcgcccccggctcacacgtagccggagcgactgagccggcagccccgggcccacgctgcgcaccgtgtgcacggcggggctggctgagctgacctgcgctgggctccggcgccgcaggcggctggggagggcggcgtgggagaggacgctgagacgcaggggcggccgcgccgaggtgacaagctgcgcacctggaaagttacccggctgtctggtgaggttcgtgggccgggggtcttgggcgccggggtgtgagggcgcgcggggagggacggggtcggggtgcgcgcgtgtgcatgctgtgaatgcgttgcgcgatgtgcgcctctattccacacccagccggtctcttgcttgtgctgttcgagtgtggacgtgtgtacgcgttgcattcgctcggtgtggcagcgtttcgt

SEQ ID NO: 5617 - DNA, 863 bp, Homo sapiens
  source 1..863: mol_type = unassigned DNA
cgacccctaacgttgtaacctgtgaccgtgattaaatttcagcgatgcgagggcaaagcgctctcggcggtgcggtgtgagccacctcccggcgctgcctgtctcctccagcagctccccaagggataggctctgcccttggtggtcgaccctcaggccctcggctctcccagggcgactctgacgaggggtagggggtggtccccgggaggacccagaggaaaggcggggacaagaagggaggggaaggggaaagaggaagaggcatcatccctagcccaaccgctcccgatctccacaagagtgctcgtgaccctaaacttaacgtgaggcgcaaaagcgcccccactttcccgccttgcgcggccaggcaggcggctggagttgatggctcaccccgcgccccctgccccatccccatccgagatagggacgaggagcacgctgcagggaaagcagcgagcgccgggagaggggcgggcagaagcgctgacaaatcagcggtgggggcggagagccgaggagaaggagaaggaggaggactaggaggaggaggacggcgacgaccagaaggggcccaagagagggggcgagcgaccgagcgccgcgacgcggaagtgaggtgcgtgcgggctgcagcgcagaccccggcccggcccctccgagagcgtcctgggcgctccctcacgccttgccttcaagccttctgcctttccaccctcgtgagcggagaactgggagtggccattcgacgacaggttagcgggtttgcctcccactcccccagcctcgcgtcgccggctcacagcggcctcctctggggacagtcccccccgggtgccgcctccgcccttcctgtgcgc

SEQ ID NO: 5618 - DNA, 1288 bp, Homo sapiens
  source 1..1288: mol_type = unassigned DNA
cgcctcttgcgcagccgaccccgcttcggccccggcccaggccagagaggtggccctcggagatgctgaagttactccgcgcagggggaggggtcgccaggctcctctccaatcacggtggccgctccagctatttgcatacattatgctaataacagacctcctgccccgctcccacccaagcttcccgcctcccttgggggttccccgggccggcccgcgggctgggccaaggtgaatacattatgataataaggcgggctcctgctttgccttcggaaggggggcgcgcagcagcgggagcggcaggccggacgccgggcgccgggagggggtcgggggagggacgtcgtgctcggagcgcgcgcgcactcacacactcacacacacactcacgcgagcatcgcgaagggtatttaaggatcgcgcacgcggggctgcggagatccttcgggcagccgcgacttcggcttcgcgagtagcattggttccttgggtttatttcgttttcctctctcttctccaccttagtcgcccctttcgcgctgcgctgtagcgtgctctcacagcctttttgccttgaactgaatgcaggtgggaaacaggtcggcgtgccgaaagacaccgagtaggtagaaataaggcaaactcacagaggcgcaacaggtccggtcctccgtggccagggcgagccgcggccccgcgtggcgcctcggccgttgccctcggaccctgagcggccactgttggggccctcgaaagaggtgtcggtcctctgggagtcggaagagctgtctgggtgggtttcgtcttgctttttaccccaccgccacccagtccccggacggagggtgcttttcacttccagctgggaggagagaagaaagcggggatggtgcacgcctgcgggtctggacgctgagcaaggcaggggtccgtatccgctcgtgggcttgactccaccaactagttgtgcagccacagggactgaactttggaggaatcgacctttttctttccttttaggattatttgaggtgtagagggtgggaagcgaagccgagacggccgaccccgccacgatgctgctgaagaagcacgcagggaaaggagggggccgggagcccagatccgaggacccgacccctgccgaacagcattgtgcccggaccatgcccccgtgtgccgtcctggcggccctcctgtcagtggtggccgtggtgtcttgcctgtacctgggtgtgaaaaccaacgacctccaggcgaggatcgccgctctcgaatccgc

SEQ ID NO: 5619 - DNA, 1275 bp, Homo sapiens
  source 1..1275: mol_type = unassigned DNA
cgcttactccgctctgcctgctcgctcccactgtccccaagcccgccccgcccgcggcaagtgcgtgcccaggcgcagccaccggcgagatcaggagcgcagcgcccgcagcctgagggaaccggcgcagggcagcagcggctgcagctggattcgcgcgccccagcgctcagtggcggcggccgggacaccctgggcagcaccccgcaccgcagcaccccagactacgagcaatcgtgcccgtccccgccggggctggagggcgcagggccgccaccctgcaagttcgtgggcccccggccacccttatgagagaaggcgaagccgggcgaaggagcaggacgctcggcagcaggactcctccgcaagccccgcgggccctctgttcccgcgccccccgggcgcccaagaagcaaaatgcaaccaccgcgctacagctgagaggggaaggggccagcgccatccgctcgcccggaatccggtccccgcggcggctgcgcgtcccggccgcggcccctccggcccgggagtgagcagcagcaggaggagaggcagcggcccggggttggccggggctggggaggagggacgggacggagggagggcgcgggggcggggagggggccccggcggataaagatggcaatgtctctcatccaagcgtgctgcagtctggctctctcaacatggctgctttccttttgtttcgtgcatctgctctgcctggactttaccgtggccgagaaggaggaatggtacaccgccttcgtgaacatcacctacgccgagcccgcgccggaccccggggccggggcggcgggcggcggcggcgcggagctgcacacggagaagacggagtgcgggcgctacggagagcactcgcccaagcaggacgcccgcggggaggtggtcatggccagctcggcccacgaccgcctggcctgcgaccccaacaccaagttcgccgccccgacccgcggcaagaactggatagccctcatccccaagggcaactgcacgtacagggataagatccggaacgcgttcctgcagaacgcctcagccgtggtcatcttcaacgtgggctccaacaccaacgagaccatcaccatgccccacgcgggtgagtggcccagcgggcgcgggggaggggagccggcggggacggaggtgcctagagggatccagcgcctgcctccaggctccttctgggaagtccgtgcggcgcggaagacgtgtctgggttccctggaccgattaagttttgctccgcgt

SEQ ID NO: 5620 - DNA, 1071 bp, Homo sapiens
  source 1..1071: mol_type = unassigned DNA
cggcgctgagtcctgcccagcgcgacccggaccgacggacgcgcagagaccctgccgggacccgccctccagccggcgcccggggagccgccggccggctctacctcccgcccgggagccgggcagggcgagaaggcagcgcgagtggcggtggcgacccccgccggggttcctgcgacgagcggtgaccagcagcgcccgcagccgcggtcccgctctccactcggacgtggccaagcggcggcggccacgacgtccggcttcccgggatcgtccggctgcgccctgggcgcatctgcgcgcctggccccgcgccccgcggagagggcgatgggtcccggtcaggactgagccccccttcccctctccccagtcccgcctggcaccccctcctctgccccgagggcgagccacggtctgcgccgccgccttcccctccggtgcccccggctcgccgtcctcccgcgccctccctccccggacccgttcccggggccaccatggccgcggccatcgctagcggcttgatccgccagaagcggcaggcgcgggagcagcactgggaccggccgtctgccagcaggaggcggagcagccccagcaagaaccgcgggctctgcaacggcaacctggtggatatcttctccaaagtgcgcatcttcggcctcaagaagcgcaggttgcggcgccaaggtctgtgggggtcatggtcgggagatgcgccccgggtcgccccctccccgcctaaacggagcttctccaggctccttccctccctcggttttcccggcccaccccggccccggcctcccttctgagcactctgggtgccgtcgcggggaccctggagtccgctgtcgggcaacctgtagccgccgagaagtgcagccgccagagatggcaagttggctgctcctcgccggcggctcctgccctccgcgtccctgcaggctgggctctgggaaacctgttccccctgagtctcggcttcccgggaggatagggactggcactggctctggaacgcggggcaccccttcctgccacacccggggtcgagccaccgctcgc

SEQ ID NO: 5621 - DNA, 694 bp, Homo sapiens
  source 1..694: mol_type = unassigned DNA
cgccagggttgtcggacagctcgatgaccaggagctcccggccctcgaagctgcgccccaccgtgtaaatcctgctgatggcggtgcactgcagccacacggacacgagcgcctcgcgcagctcggggtagcggtggtactcgaaggagatgccgtcctcttgctgcagccgccggcgccgcctcatgcccgccgcgggcgccccgggctcctgggcttcggcgcccaggagccacccgcaggcagccagtgccccgcacagagccagcagcgcgctgccccctcgcccggccatcgctgcgctccgccgccgccggccgtgccttcctacgcgggcggcctcttttgtctgcccggccctgggcttagcccgccggcgctgctgggggcggcaagttccgcaccagcctctactcgcctcaccttccccggctgaatgagtgtcagcccgcgcactggggccacccagaggagacgggcaaagccgcggctccacgggctgcactactggccgcggagcccaggggagctgcaggagaaaccactgcgaggagggggccggcggagagacgggccggcgtggatctgggagggctgctggcgttatttgctggctcggaaccacgtcaacagccaaatggcgtccgggacgacgcaggtgaaatgacagctaaggtccggggttcgggaacgt

SEQ ID NO: 5622 - DNA, 694 bp, Homo sapiens; identical to SEQ ID NO: 5621
  source 1..694: mol_type = unassigned DNA

SEQ ID NO: 5623 - DNA, 1424 bp, Homo sapiens
  source 1..1424: mol_type = unassigned DNA
cgagagctcgaggcgccgcccctgccgccccgggattggcgtgaggagcctctgacgacatatattaacccgagcggccctaaagatgtagctgtacatggagatcttgctgggaaaatccgcttgctcccctcacgtcgtccagcccaggagaaccaccgccgtcaccccggagcttcctcggccaccgcgcagagccctccgagagcccgagccgcggtcttcgagctccaaggctcattcagggccccagatccttgccccgaaaggagaggatctgagaaaatggatgcactgagacctctctgaaaaccctccgagagagcgcgagaggagcgaggacacgttactcgcagctaaaatcacatttaaggaccaaaacaacaacaaccaaaaatttcattaaaacaataagcgcccaagaacccagatcgggctggtggggggaggggaagaggcgggaaggggagggtcgcacggaggtagctttgcagtgagcagtcgaccccgccgccccccggcacagctggaccggctcctccagccgcggctcagactcgcccctggattccgggttagcttcggtgccaggaccgcggcccgggcttggattcccgagactccgcgtaccagcctcgcgggagccccggcacctttgtatgagcacgagaggattctgcctccgcgcagcagcccgggaagcaggagccgaagcgcgggccgtggagcaaggcgggaaccggaggcggcggcggcggcggccaggggcgcacggtgccaggaccagctcgccgcgccccatggggagccggcggccgcagcgctgctgaggcgggcccggctggccaggcggggggacggggcccgggctgcagcagccccctctgcggctgccgggcgggcccgggcgcccgggggctggggggtggggggtgggggaggacgccgagcgctgaggcaggggcccgggccgagggcgcggcggggctgcgcgcacgctggggcgcgtggaggggcgcggagggcgaaatgagtctggtaggtggttttccccaccacccggtggtgcaccacgagggctacccgtttgccgccgccgccgccgcagctgccgccgccgccgccagccgctgcagccatgaggagaacccctacttccatggctggctcatcggccaccccgagatgtcgccccccgactacagcatggccctgtcctacagccccgagtatgccagcggcgccgccggcctggaccactcccattacgggggggtgccgccgggcgccgggcccccgggcctgggggggccgcgcccggtgaagcgccgaggcaccgccaaccgcaaggagcggcgcaggactcagagcatcaacagcgccttcgccgaactgcgcgagtgcatccccaacgtacccgccga

SEQ ID NO: 5624 - DNA, 1215 bp, Homo sapiens
  source 1..1215: mol_type = unassigned DNA
cgtgcgggagggaggacaagaactcgggagtggccgaggataaagcgggggctccctccaccccacggtgcccagtttctccccgctgcacgtggtccagggtggtcgcatcacctctaaagccggtcccgccaaccgccagccccgggactgaacttgcccctccggccgcccgctccccgcaggggacaggggcggggagggagagatccagaggggggccgggggaggtggggccgccggggaggaggcgagggaaacggggagctccagggagacggcttccgagggagagtgagaggggagggcagcccgggctcggcacgctccctccctcggccgctttctctcacataagcgcaggcagagggcgcgtcagtcatgccctgcccctgcgcccgccgccgccgccgccgccgctcagcccggcgcgctctggaggatcctgcgccgcggcgctcccgggccccgccgccgccagccgccccgccgccctcctcccgcccccggcaccgccgccagcgcccccgccgcagcgcccgcggcccggctcctctcacttcggggaaggggagggaggagggggacgagggctctggcgggtttggaggggctgaacatcgcggggtgttctggtgtcccccgccccgcctctccaaaaagctacaccgacgcggaccgcggcggcgtcctccctcgccctcgcttcacctcgcgggctccgaatgcggggagctcggatgtccggtttcctgtgaggcttttacctgacacccgccgcctttccccggcactggctgggagggcgccctgcaaagttgggaacgcggagccccggacccgctcccgccgcctccggctcgcccagggggggtcgccgggaggagcccgggggagagggaccaggaggggcccgcggcctcgcaggggcgcccgcgcccccacccctgcccccgccagcggaccggtcccccacccccggtccttccaccatgcacttgctgggcttcttctctgtggcgtgttctctgctcgccgctgcgctgctcccgggtcctcgcgaggcgcccgccgccgccgccgccttcgagtccggactcgacctctcggacgcggagcccgacgcgggcgaggccacggtaggtctgcgttagggtttgcggagaacccgagagtttgcgttagggtctgcggcggacccgagaacctgcgcgg

SEQ ID NO: 5625 - DNA, 1184 bp, Homo sapiens
  source 1..1184: mol_type = unassigned DNA
cgaatgttgcctccgcaccgattcaaacccgcgccgagcctcctcccattccgacaccacaagggagaagagcggagccgccgccgccgccgccgccaccaccgccaccgccaccgccgcggtccccggagcgagcgagcgaccctgccgcgcggggagcctcaccgggagccgcgctccgccagcccgccccaggccgccgccgccgccgccgctcacccaccttgccgcggcgcgccctcgctgtggccgtgaggaaccgagcccagcgctgccaagttgcctgggtctggagcgtatcgtgttacagcgcctggctccgggctcgggctgcgcgcggcggccagacatgataggctgaggctcctctgtttacacccggccgccgagggggcggtgcgccgcttaaccccttcgcgccgggccgccaccgccgcctcccgccagccccgcgcccagcgccccggctcggccgccgcctcaccccctcgcctcaccccctcgccccgctccacacacgcgggccggggcctgtgagcagccgtgcccccagcgaagacgggggaactgcactgagaacccgctcccggcaccctccgaagaccccgcggggcggcatcctcccctccacacacgcacgctcgcgagccgccccgggcagcggccgtgttcctcggcggggcttcgccggcggcttttgatcccgcctcagagctgttctccggcagcgctactttcccgtgctcacaaaagcatctctctcccaacccatgaacggatcccgacccctgctctgccaccattcatgcgtcccgcatccgaggtgtcgccttcacccacacgccccacggccccgcgaaactcggccctccagctcgcgggacgcgctgcctgccaggcgggcccggcggtacctcgggggcgggaggggtcggtcgcagggcccccagcctggcgcccgcggggcgtccgcagcgaaggggtgggtgtcgctcgtgaacgcagcagggaccagctcagcccgcgctcgcccctgggcctcggccaccgcctctccgccactttctcggcccctgcgtggaccggcccgtggcgggggctgctctgcgccctcgtccccgcagcagtcgcggacccccattaacgttgacgagtcagtgtcgcgacccggggagagaagacgg

SEQ ID NO: 5626 - DNA, 5820 bp, Homo sapiens
  source 1..5820: mol_type = unassigned DNA
cggagggaaaccgggccgacgacaagggtggctatttccgggctcttcgcgcccggcccaagcgtccctgggtggggcagcccaaacggggagaggggccccgtgggccgagggcccgaggccgcagcgagcttagcgtttggccaaatctggctcgcgcgccttcccactgtcctgttagggctgtgtgacctcccggagccctacgtccccgcccaaacagctcccagcgcccctgctggcacccggggcgccctcaccccagctcctgcacccggcgcgccgcgcgcagaccggacggaggggaaagttggcaagagcgcggcgcccgcgggagaaagcgttaatgggcggccgggtgggagcagcgcgctcgctcgcccacgtcacgccggtgcgggctcggctgacgaccgcggcgcctggggacgccggcgcgctccgctcgccaggtgctccgcctggaaatgtctccattagttgtcgccggctccccgctggagcgcgcgcgccgagcttccgcgcggagccctcgcgggctgccgggagcggcccagcgccaccgcaggtaggtgaggtcccccgctcccgcccccgccccggggttccgagacccctccccccttccgaggaggcggaggctccgcgcggccgccgaggggagcgggcggcggcggctgcggcgactccccggtgcgtcccgggctgcgagctgctccccgcggccccggcagccacacggcgcgggcgggagcttccccagctcaggtagggagtgggctccgccgcacaaactttgcgaggattgctcttgcgcttaaggggacaaagtttgctacccgtcgctaggctctccagaggccgctgcgtttgctgcaagttgcgggaagcagggtgcgcgggccggcgcggggcggggggtggggggctcggagtggccaggcctgagtcctggacgcccggacggcgctccgtccagcctcaggccgtacccagggagcaagcggcgggggcgcagcgggagagaggagggagagggccgcgggcccccatggagggcggttgggaatccagagattcaccgcttgtccctgtggctccttctcctaccactggctccgagggggcctcggggctgtgaggaaatgacctgccaacctcgaggttcgccagtgcggcgtcagcgaccgtgaggcctctcaaacccacaccccagccgggtgtcccgagcggtgggcgggcacaggcgcccccaaggtctctggccccaggtctcagaaagaaaggcccttgcctggtgccccgggctcccggcttcgcctttggctggagttaacttctctgggctggaaggagctccctccggacgagctcttggtgcggggaactggtggcccccagggtaactcctgaagcaccagggctaggctggccgaagaagggtcagggcccggcctgtctccccggaggccttccatggttccgacggccaacggtaaccccgtcaaaataggcgacccgcctgcgcttcgcgttaggggctgaccatcccctgcctcccctgcggcctgctccggccctggtcctccgctcttcggagcgctccaggccagcgggagcacctcatctccccgaagctgagccggtgctgtgtactccgggagccggctgacttctggcccacctgctcacgggtgtatttagtaccgggggtccctagagggaggaaggctcagcactccgagtctatgcagacgcgttcagctgatacctgagatgctgagcgtcctatcgttggtgaaagggacactgggtgcctccgctccaggcttggccttttggtgaaggcacttggaaaatattccagtattatctatgggagaagggtggcccagtgagaatccccggtttgggcaggcgggcctaggccaggctacagggtttcagtgagatgtcccggtggtcgccaatccacaggctggattgaccctgtgtcctggaatgagtagtggggcctgggtgaggccgggcgggtcaggaggcctcctgggcagttgcgagcttcccgaggcagggtgactgtgactgggcccggaccccaggcgctggggcctgctggcgggcaggaagtggagcgtgtgtgtgcggcggcctgggaaagccgattcagaggccaggtttctgggtcacggagaaagggtcgcccgctggtggggactggagcgtcgatttatgcacacaggctggaaaggcaaaagagaacaggagaaggtggcggtggtggtcaaaggaagcccccgaaagggcccccacgtactggctgccctgggaagtggaggctgcttctcccagactctgctcagaagatgaatggccgcctgttctggggcttcggctccagttaagccccgccgggtctggaaggaaggaaatgcaccagcctcaggtctgggtgggctgagctgttgcactagagcccagaggtgcagggcataggtggctgggcccctgggccctggctctccccctcagccggcggagtgctcacagtcgccgaggccaggtccccgagtataggtgaggaaaggacaagccacagctgaatgcctcccctctgggggtctctactccccatcccagcccttggcccggctgggctcacacccctccttcagccgggcctcattacctggagagagcgagtagtttgtaaacaataaataatgggaagtagaaggatgctcgggaaaaaccagaaaactgcaaggagtggggaggagggagggtgggagaggggaggaaggagggtgggggaggggaggagcaggaggagagggaaaggggttgagagattcatttctagcgagaaaccccggtggctagtttcttattatttacaggaaggtgatattagcgattcaggtgagaaagaaagaaacgcggcctgccgcgaaatcaatacagaattcagaaacaattattaatgtcatttgactcgtgttctttatatatttctcgcggctaccgacgctaaactgtctgaataatttgcatggagcggctattcattatttccgatggtttccctctgcaagcagctcggacgtggcccgctccggtccaacgcgatcggagaactcgtattttcatctgtaaattaaagcaattacgcagcagatattatatgatgtgtactgtggtctccagatagtcatcaatcaccttcaaccgagctgtcaaaagagcaggcagatttcgtttctgggaggcaggcttgcagctggggagagggcgaggacgtcatcattaattagagggtgaccctggggcgattcacaggtctgaacccaggaatctttctgagcaagtctgcacaacgctgccttgcacggcttccttcccaacttaccacgggaggccggcccagggggcgagggcaaccggggcgagtcccggtcccggagggcgatggcgcagaaggcggggaacgggttcgggatggcccgggcgcccccttgccgcccccttgccgcctgctcactggcctccgctttgaacttgggcaaggtcccagggagggtactggccgagggagtcctggggtgggcgctcggtcccctcttccgattgctccgtgcgccccagacagaaagctgggcaaaatggacaggggagggcgcctccgccaggcacccaacgccccctccctcgcagccagccctgcggggcgccgggagggacgagcttagcgggaggggccggggcctgggttgaggaacctgctcttccgagcgcgcagggccgcccggcagtccccggcttagccgcgaggggcagggggaagccggcggagcacggccggcggaaaggggatcggggaggaaagtcggggaggcgaggtgggggcggtgggctgagcgggaacttaaaagaccgcggtggagaagatggggcgttctccgcgacactcggctgcccagaggtgcaaagccggtgggcgcacgcccggggcggccctacagccctcgggccgccagtctcagggtgtcgggctccaactaaggccccgaagcccccacgcacctgagggcattttgaccagctcttgcgggctgtcttgcggccgcagtgggttctgaaagtccattccggcgtagggtggaaaccggcgggaggcgttgctgattctcgattaaacaatagtgacgagacgcgtgcggggcgcctgcgagccccttcctgccactcggagcagagcgcgccagcgcgaggccgggccggccgcctgcgcagcgccgggctaattttaactgttgattacatcttcagcgtgtcctttcataggtctcatttgtaattgagacgaatgattacagtggggcgggaaggagcagctgctcattaattaatttctaattaaaagtgcctctcgttctcgggtgactaaagagaaacaccgttcgctgggcgatattgactcggatggaatttatttgctaacgcccggaggaatggcccctccgtccaccgcgcggccgggactgtcctggcccctcccggcctgagccgccggcgagtgaccggcgagtctgcggccaggccgggctgcgcgaggtggggctgacgtcagagcctcctccgcttcaagccgcgcacatctgacttgacgggttcgcgcgactcgtttttttttttttctttttcgtaaaatatgtatttctgtcgccgctgcgaggccgctcggtcccagagccccctcgagcctccggaatgcgaagttaaaggaatcgcggcggccaccgctgctcactttgttacccggttagaaaagtttgcggagcgcggggatggactaaccggctctcctgcttcgccctcccagcgcctagaagcctgcagctccggagcagtggccgcgccacgccggccccagcgcgcagaaccctgcaggccccgcccgtccgccccgggccgcgcccgccatgtcctacccgcagtttggatacccctactcctcggctccccaggtaagcggagccccgccccgcccaggccaccgcaggtgccggtagggcggatggggcggggacggggggtggggagtgtccgacctacgactgcctgcggcttccgagctagcaaggcctgggtcgcgcgcccctcacgcccaacccctgctccccaaacccccggggaaaggccgaggcgctaagaaaatccgacgggccgggcccgggttccctgatgtttgaaccacaaggctcaggctgtgccccaggggagtcctaggaccccaaggaacccctggggaaggaggcttggcgcgcaaatggcgtcagaggccttggaaaccctccggggaagggtgtaggtgctcggctgggccccacgtggcggaggaggccagacgcgcacaagctagtggaaaggggcgagcatcctggtgtggacggcgggaggcccgggggtactcggggcacgccctcgtgggcggcgcgcgggattggcaaggcccagggccccagcctccagcccggcttcccgccagtcctcgcggcctctctctgcagttcttgatggccaccaactccctgagcacgtgctgcgagtccggaggccgcacgctggcggactccgggcccgccgcctcggcccaggcgccggtctactgcccggtctacgagagccggctgctggccaccgcgcgccacgagctcaactcggccgcggcgctgggcgtctatgggggtccctatggcggatcgcagggctatggcaactacgtgacctacggctcggaggcgtccgccttctactcgc

SEQ ID NO: 5627 - DNA, 1233 bp, Homo sapiens
  source 1..1233: mol_type = unassigned DNA
cgccggctgcgcagcccagcacaggccacaggccggggggtgggcccgggccctgcggagtgggcgggtctgagcgggttggaacgtcccgccggcttcaccgcaggccggcatctcagcctcaggccccacagcgggtctcccgtctccaccctcgcgggctctgcagggctggggctgctcctgagtttctggtaaggccttcgggagtcccagctctgcggagaccaaagcccccacatcctcggcagagcccgggcgagtgccccgcgggtggcggcggctgtggggccgtctgggattctccgcagcactgaccctgcaacctcctgtgtctgcgcttcgtggtgaggggcggcgggatgcgcgcgatccctttttgactcagccaaacggaaaagctcgcgcgtcccggctggaaggtggaggtcaggcaggacccggcaaaggcacattccaaacgaagcagaccccattcctcacctgcagagggaaggcggtgtggacggacagaaacggccctcacagccacagaaccaccgcggccacagcagcgcggcgtccggcagggagcggaccgtggtggaggcctctgagccgagcaggccacgcagacccgggaggcgctgaagcgggcgcagctgcgccctggagcaggcagaccaggccacggcggagggagaggcccggggacgcggcgcagcccctgcggagaggcacgggggcggcggggacgccctcccactggctgaaatgccagggaccggcctgggcgtggagcagccggggcgagcccgcctccaggcaccgccggctgccctaggcagggcctgcaggagtggcccggagccgggcaccgaggcaccgaggcggggacctggaggggtaggggtcggggcagggcctgccaatcaagtctacgggggtcgccgggtggtggaggtgggatgggggaaggaggctgagcaccagcctcgggcgatccaagattcctccggcctaatcccaggagggaggcagcgttggcgggtgaagccgtcaccctcccccgggaggccgcccagcagctgcccctccacgctccggggccactgcgccgggccttggtcaccacctgggccctggcccacgctcagacgaggggcagcgcgacttccccgtagccccaccccagcggctgtcgccgcagagcatgaagaggcctggctcctgcagaaacgcagcccagcgcga

SEQ ID NO: 5628 - DNA, 2865 bp, Homo sapiens
  source 1..2865: mol_type = unassigned DNA
cgcctcctgccctacccgggtggatgcccgcggctctggggctctccctatgccctgactctggggagccccggctggcattggctcgcgaaggtgacctgcggacagaccagtcagagatcacgttggctggtcgcggcgcgggccacaaagctcagcggaggtggggtaggggaccaagctgtcccggcgagggaagaaactgttgcttccaaatcattgcggctggaggagccgatctgcgccccagcgtgttaggacaagggcggcgcgaggggcccaggggccaaatggggcgctgggcaggaggggctgtctcctgcaggggaggaggaatggtcccctgccagggacctggggaaaggtaatagtcaggaggggaccgggccgcaagaagcccatcctggattgcagcacgggcagccagcgcgaattcagtcaggaggtccacggggaccggtaaacgagaaggggatgcggtgaggacgccggactggcgtttctgccgcgctgacacctcgactgctccctccccgcaccgcgtcccccagcctgagacggggaagccacccagggcaccgcgctcccaaacagcggggaaaaggcgctctgggcggcggctgagtgaccgagggaccggtccggagccaggagctgggaggcgcggggatgtggtggggaggaggggagtgggggcagtgagggggctcaaatcctgcggggacgcccgcttaccctgccgttgcggtcagtctcctgcgcctcctcgacgctcaccccgcgccgcaccagcgtccgcagcagccccacgttgttggcgcaggcggcgcgcaggagggtcgccgtctccgggacgctttccgggacgccctccgggacgctctccgcgctctcgacgccgtgctcctcctcgtcctcgaaagggtagaaagagtcgtccgaggcgatgctgcgggtgtctggcagactcgagaagtcctcaaactcttcgtagtcagcggggtcctcctcgacctgcgcgccccggggtggggacggcggtggtggggtcatgcagcgcgccccgccgccctccggcccggtcccggccagcagcaccatgccggcggccggggcgcgggccgggggccggggcgcgggcaggaagagcgggacgcggggcgcgcgccgaggtccccgcttctcgcttctgcgtccccagagaagccgtggcccgcgcgctccagctcggcggaaaccggcaccaggcggctgcgctcaaagaaaaaagtctccggaggctgagcgagcccctggggtgggcgggaccgcgggggctttccgaggcggggcggggcggggcgcggggacacgccttcccccggggccttcccctcgcgccccttcctggccagagttcagagccaggcaggcgctctctcgagcgcggggactgggcacctggcagcgttgccccagagctggggacagctggcgcgggagaagcagaagcaatcactaaagaagccgaacccgagtcgcgggcggcaagcggccccgcccctccctccgccggcccgcgggatgggggcggaggtggcggcggggggacgccggggcggagccggcctccagcttcgggaacctcggacccctggagccggcctccgccgagggcgtcgggcccccggacctgggtggggccggtttctcccgccgcttcagaggagcagagcgggttttctcccttcgggggatcccgggcttcggggctgactccacccggccgcggccgcttggaggccggggaatccccggggcgcttggcgggcagaggagccgggcgcgggagcggagccgtccacctgggacctgtgcccggggagcgctgcgggccgggccactctgaactgggggcggtcggctgctgtgggggagtcccagcccggaagggaggacaatcctcagagtcccccgtctcgcggaaccggggccggccgtggcttgagggttggtcagatcctgggatggggggcggggtgttccggaacctcagggagcatctgagtgggaacggacgacgaggaactccccgtccccatgcctggcctgtgtcacgtgcggggatctgcggactcacccccggaggctgcgactgggcgctgaccccacgtctggctgcccaaaagagcagggccgcgggcgacagccgcagtccaggcccacagcccctctggcccggccttgccctctccccgtcagtcctggcgccggggatgggcggggaggaggagggcgtgtgaggatttgccacagggagcccttgacttcggggtaggaggcgtcgtgagccaatcttgggggaaggtctctgcgcaaaggcgcggaggtgcgctcgcgcccgtcgcaggtcaaagactgcggaggccaccagccctgtgtccccctagcctccttccttcctttttttcccccgatcttgacagcgtgtccaccagctgccagccggtgggaggccctcgcggccccaaggtgaacacagctaggctggcgcagccgctggggaccaggcttgaggcccacgtgccgctgggcaagctgaggggcacgagggcaccgaatccgaaacagccgtgggaggtgtaggatgaggacacgtttaaactgcgaagccgctcgagccctcgtgtcacaccgcactggcccgacccgctgtcctggtcgcctggtcttccagtgtctccagcaggagccaaagggcctgctggcggcccccgacccggcatctgcagggccccggagggtggggcgcgcgggagcaccgatttctggtgaagacgccctcgcacctgggcggctctgagcgagcagcgaactgagactcgc

SEQ ID NO: 5629 - DNA, 1154 bp, Homo sapiens
  source 1..1154: mol_type = unassigned DNA
cgtgcgttcccaaggatgctcggccctctcccaacccgcggcctcctcccctctctcccgcggctgccgctgctgccgcgaaaaccaggagaagtggaacgcgcgcggcgaagcgccgctctcgcggcggcactgggcatgctccgcacccggggccggtttcggcggcggggcggacgctccctcactagccgggcgcccgggccggccgccgaggtttaggtggaggctgaggctgccgcgcgccgcgggaggagcctcgccctcggcggctgaggcggcggcggcacaggtggcgcgggccgcgcgcggggcgcagctcgggagcgctcggcgccgggcgccgcggcggccccaggctcgcgcccgcggcgacagccggctgagcggagctgcgggcgcggcggctgctctctcagcccggccggctggcggcggcgcccggagccccgaggagcccgcaggagcccgtggagcccgcggagccgggcagggggcgctgcgctcgccgagctcggaggggccgccgggccgggcgctgcgcactcgcgtcgggagccgcctctcgcccgcggcgctcgcccctgccgcccgccagcatcccttgtcccgcggccgcgctcagacaacaaaagcggaagatgctgcagttgggcaaggtcaggaccttgccctgaagccgggcggcgccgcgcacgcctcttcccggactgaggagctgtcgccggcggagggtgcatgtttgcgaggaagccgccgggcgccgcgcctttgggtgagttgcggggctgggcggccggggccgggcgcagcctcctcccggcgccgtcctcctcctcttgccgctggtgggggtggtcctgggctcccggccggcaggcggcggcggcggctgctgcggggtttctgcctgcctcggggaggaccgcgatcgcgccaggtccccctcggaagccgctgtgcctggaagggggtccggggttagtgcctttcttggagcggttaccaagtggctgccctgcgtgctccccctccctgccacccatctccccgggaggaagcgtatttagggcaacaccgacaatgctgctccccgccaccctgagaacatactcggtgcattcatgacgtccctaatatacgggaggagacgg

SEQ ID NO: 5630 - DNA, 1154 bp, Homo sapiens; identical to SEQ ID NO: 5629
  source 1..1154: mol_type = unassigned DNA

SEQ ID NO: 5631 - DNA, 396 bp, Homo sapiens
  source 1..396: mol_type = unassigned DNA
cggcggtctttcgccctccccccactctccccgcccccacccccatcccttggccgctcgaacccccgaccgggagcccagagccctgccagcgccgcactgtgcgccgcgcaagtcgctcgatctccccagcggtaccggctctaagcagtaaacatctgtgcgcttctgagccagggacgcgcgtggggggtgggcgtgcacgcgggtgggccagcgcagagtgggagcttgtgggtgctttccgtcgggatttccaactcagctgcctccgagagcctaagctgagcgccgcacgtgctcgtgccatctgctgtactggacgcagtctaatagcgcagagaggtttccatccggcatccagttcgatgtgggccgtttttcccttcccagcgg

SEQ ID NO: 5632 - DNA, 438 bp, Homo sapiens
  source 1..438: mol_type = unassigned DNA
cgaggagcaggggctgcgggccgggcttttgttgctcgcggtccccgggggccgcgccgcgccgggccacgtgggggctctcgccttccgagcgggcgtcggtgggaaacctgcgcggcgagagacagggggatggggcgcttttgacgcgactgtggggtgcgggtagtcctggaggaggatgtccggccaagctcaccctgcccaggtgccggatccccagcccaggctgcggcctgctctgggctcgtgaggcgaggccgcagcgccccgacgccgggtgggcgtgtgggtggagtggagacttgggtccctcggcgcatgggagtcccgccgcctgcggtagggaaccgcctcccacccctggcccggcccgggccgggagccgtgtcccgcgttgactcggtgtaactctccagctcatttctctccacgcga

SEQ ID NO: 5633 - DNA, 438 bp, Homo sapiens; identical to SEQ ID NO: 5632
  source 1..438: mol_type = unassigned DNA

SEQ ID NO: 5634 - DNA, 411 bp, Homo sapiens
  source 1..411: mol_type = unassigned DNA
cgcgctccggctctcggggagccgccttccagacctgtctacccgggagccccctccccgcgcacttcccagacttctcctgagacccgagagcgctggttttcccccactcgcgatagtcctgggatgacagtgcgggccccctcactcgcagctcccaccacctggcggccaggggttcgcggcccgggcgggcggcgccagtgccctctggagctgggcggggagggcggggcgggcggagcgggcatggtggggtgtcgggggccgcaggcgtagcgctctcgccctggccatggagcggccggcgcccggcgaggtggtcatgagccaagccatccagccggcgcacgccactgcgcgcggcgagctgagcgcggggcagctgctcaagtggatcgacaccaccgc

SEQ ID NO: 5635 - DNA, 1137 bp, Homo sapiens
  source 1..1137: mol_type = unassigned DNA
cgcgcctgccaggctcagactcacacgcacgccgcctctgtttgtacacagtgcgctcccggcggcccgctcgctcccctccagctcacgcttcattgttctccaagtcagaagccccgcagccgccgcgcggagaacagcgacagccgagcgcccggtccgcctgtctgccggtgggtctgcctgcccgcgcagcagacccggggcggccgcgggagcccgcgccccgcccgccgcgcctctgccgggacccacccgcagcggagggctgagcccgccggcggctccccggagctcacccacctccgcgcgccggagcgcaggcaaaaggggaggaaaggctcctctctttagtcaccactctcgccctctccaagaatttgtttaacaaagcgctgaggaaagagaacgtcttcttgaattctttagtaggggcggagtctgctgctgccctgcgctgccacctcggctacactgccctccgcgacgacccctgaccagccggggtcacgtccgggagacgggatcatgaagcgctcggtagccgtctggctcttggtcgggctcagcctcggtgtcccccagttcggcaaaggtaaggcgtcgggacccggacagctgggtgagggatgggctgggagtcccctgagaaacgccgcgcagggggccggaggcggtccctccggcgtgccaagggtggcgagcgccgctggcggcgcggaggaggcgtcgagtcctgggtgccccgagaaagtgcttgtaaagtctgagcagagtgcgcggggccgagcggggagaagggtgcggggtaccggggtgagatacaggaaagaggaggacggtggggagcggtagaagacagcgtccccaggaccagcgactctgtggctcactcggccactgggtctcggcgcaaaccctccctaggcagtgcgggcgatgctgactgcagacgtcgggcagggctttcgtgcgggcgggagcgggggaagccagtgcgcccgggcgtcagctagttgatgcgggaagaggctggggagctgcagggccgtccgcccccgggtgcggtgctctggcgcagggcctgggctgagccgttcgcaaacccagacccggcgctgggcgttttggccgcgg

SEQ ID NO: 5636 - DNA, 2383 bp, Homo sapiens
  source 1..2383: mol_type = unassigned DNA
cggactccccaggaccgcggcgccggctggctgcctcggccccccgcggccgcgtgagctccctcttggtggtggagggcgcatttcaatctggaaactcccagcccctaatttggtcccgcagactgacgccgctcccggtggggcggtgggggtaggagggcaaaggggaggtctcctccttcttggattgaggctgcaaccaacagccccgtgagcctctattcctggctgactgcgaatccccccatcccaggtcaggggccgggaccctacagaaagacccgttctcatcctcaaccttgcggcctctgtccggcggggaagttcagctgcgggtcagttcagctgcgggtccggccaagcctggcgcgcttaggcaccctagtccctggtccgcggccgggcgaggacggagggggaggggaaggggctgctgcctcctttcccaaatccggtccctaatcgccccatcccccgccgtctactcgctttgtacaggcagtcaaaacagagctagcggccaattgacggggacgggaagcaaagccgcctagcgcctcgccccctccagccggccccccgggcccctcctctcggcgcccggaccttggccctccctctcctttcccacttctctctttgccctaacttcgcccccatcccccgctcatttcctctcgcacccgggctcgccaatccctctttccaagtccctcttccagcccggccttcctctcgggttcgccccccttctccccaatctccgtcctcttccctcccttcgccctcccccccttccttcctcttcccctcacccaaccctggttcccctcgttcctcagtcccgatctctcccttactctgtccccgcccactctgcgccggcctctcagtccgggttgagccccacgtgtggacggccgcgcccccactgacagccgccgcccgccggcccgccccgcgccccgccgggcctctaaaacccccgcgccgcgccctccaccgccgcatcttctccagcgcccagcctcccgccctctctcttgctggccgcacgccccggccccgcgcacctccgcccggctccgcagccgctacccgcgcttcgttgccctgtgggactccgagcgagcccggagggaaccctcctcttcttctgggggcgacttttgtttgcttgcctgtttctttctggtgacttttgcagctttccaatatccgtcttcggagcgcacgggaatccgccgagctctgcgtgcaggcccttttttcttttgaggttcacattttttgaaattttacgccagggcttttgtaatttcctcccccgcccgctgacggtcctggagtcgctcggggctttaggccggttatgcaacgtgtaccgctcggggctgccggctgcacctccgccgcgcctcgccgctcactgcgctagacccggcgccccgcgtctcgcttcgcgggcagtcagggggccggcgctctgtcgaggtctccagctagagcagggagcccgagcccgagggagtccccggagccgacgaagggcttattagaccctgactcttttctgaggcgcgcagattttgtctttgatcactccctctccgcgggtctacggccgcgcgctttcggcgccggcgatggggagaagacggaggctgtgtctccagctctacttcctgtggctgggctgtgtggtgctctgggcgcagggcacggccggccagcctcagcctcctccgcccaagccgccccggccccagccgccgccgcaacaggttcggtccgctacagcaggctctgaaggcgggtttctagcgcccgagtatcgcgaggagggtgccgcagtggccagccgcgtccgccggcgaggacagcaggacgtgctccgagggtaagtgggcaagcggctccgcacctagggctccggcttgggggaggggggaatcctcagtttggcggctttctggcccactccgtcccagaccctttagctggagcctagagctgcagccccctttgccagaatatccaaagacccccaggagcgcgtcccccttttccttcccaaccccgcagctcagcgggcggaaagccctctctccgggggttgggcggcgggtggttagggggtccaggggtgccgatcgcagagcgtgtgcagagctcgcgctgcgggaacaggttctgaatgtccggcggcaggcgggcctgggtccgcctgctgcaggggccagagaagcctgcttgctccccacgtcggggccgccgctcgtgagccttttgtttgaggacgtgtgcagggttcacagctcaccttctcatcgtcaacccgagcgctccaccttgcgacgcgctttccttgacacgtcgg

SEQ ID NO: 5637 - DNA, 2367 bp, Homo sapiens
  source 1..2367: mol_type = unassigned DNA
cgggccggcttcccgcttcggaggttggggagggggtcgtgggtctctgcgttcccaggccaagcggccctggaggcacggactagcaggacgccgaggtggcgcgggtcgcggcctctcccgcagcagctgtcggcgagaaccaggcagggaggcgccgctgctgactgcatctcatgaaagattcaggcccggctgccgcgctgccatctcccggcaccttgcgccggaaacggtcgctctggagcccgtggccgtcggcgggcaggcttagccgctccagtccctgagaaaggcaggccacagcccgacctgccctgtggtcccatcccataatcccaacagcaagcaggctcaggctgggcacttcggggtaccaggagtaggttcggccaactggtttccaccatgaggcttcgcgcacagggttatctggccacgaggcaacgctggggagccctgtggcctgagggtgggcaaaggacaggctcccagttcccttgcgtccagcccgtctcccagcggcagccagccaggaacggcctgcggggccacaggggtggaggcgtcaccgttcgcaggcccgcagcaggatggtcgctgggggatgtgcaggcataggggttggacaaggggccccagaagtgtctgtcctgaggggttggtgtgccctttcctcaccagcccagcccctgaggagagggaagaaggcaattcccccaaccagggcaggtcgggcggttgccccaccctaacaccccctacccccaaacacagaaaacctggggtctgtcctcaaacctccctggctgccacgctctgggcagcggactctccctgccaacacgcaagaccagctccctcccgcaggctgagcagaaagaagaaaggtccaatctcaaaaccccaaactcgaccaccagcccccgtctaaacggaagtagggccagcccctcacgagtcaggtgggaaactgggcccagggagagaaagtgccccagggccaggctgggacccgctctggcttcgtccgcatgcggcagggcccctccacggaggtcccagggcgcgctccccggcctcgaggcccggccgccagccgcgcggaccccagcctacgccccgagggaggccaggacccctagccggcgggactgcgcgccgcccctctccccgcaggtcccggcgaacacctagcttcccctccccccacccttcccgcctcccggccagtgtccccgccttccccgcgggcgacgggcggcggcggcgggaggagcgggccgagccgaggaagccccggcctcgcgcgctgggatgtagcgaaccagcaggggccgaagaaccgtgcagtgccagagccagagctggatccggggccccagccggagccgaaacctgagccagagtccgcggcgggcgagcccggagcccacgagccgcagacgcagcgctgcccaggtggggtaagagacgctgggctaggggcgcagggtctccgcggtggaggggcgcagggaggtggcggccgagtcctgcgcagtttgctcctggcgtgtgtgggtccacccggcggcgcgggacagcgcaaggcgcggaaggtcaggagccttcgaggcagcgcgaggagctcgttcctgcgcccagggcacagtcatagccgccgtcaccgggtgctacctcacccaaccggcgggatcaaccctctgctttggctccgggcacctcaagagggtagcagcctcgggggcacgggccacggccccgcgaagggcacaacctgagaagcccgtggcagcccctcgcagcgtcgggtgacacagggctcccccacccccaggagaagtgggcaggagagagggccgcccgctgctccccgctgcgtccagggatggagggccccaccacccatggaattgctggcccctctgcgtggcccgggacttcagccgtggcttcgcgtcaagagggtatttttcctaaacgaaaccgcttcgttcgttcgttcgttcgttcgttcgggcagcaatgccgcagaaaagcagcagacgtcggtccgcgccctggctctcttcgccccggaccccgacgtcccgccgcagcgctcggaggtgcccccagcccaaggcagcctgctctcgccggcacaggtcgggctttttcttcccaggagagaaaccccaattcccttcgtaacgtccaataaagacattcccgcggcttctcccaggtttggttgttgacgcagggtcccggagcacgcagtcgcttctcaagaaccgggtctcggatttctgaaattgaccagcttcgtaaattggagcctattctcccgcggcaaaggcagggccccaaagccgggatcgc

SEQ ID NO: 5638 - DNA, 1235 bp, Homo sapiens
  source 1..1235: mol_type = unassigned DNA
cgaagtccagccgacccttgattgtcagcatcccggttacaaggtctaaggcgaatagttgccgcacgccggcgcggttgtggctgccgaaggagtaaataatttcaccgttggggccttcatccagatccgttgcaaggacttgtaccacgcgcgtgccggagggtgcatcctccaggacgcgcgcccggtacaaggactggttgaagacaggcgcattgtcattcgcgtccagcaccttgatgtgaataggcaggctggcggagagagctggggtccctccgtccaacgccgtcagcactaactggagactaggctcccgttctcggtccagggcgcgctccaacaccagctccgcgtacttggtgctgtcctcccgcgtctgcacgcgaagcgcaaagtattcatttcggctcagctcataggtttgtaaagagttgcttcccacatcgggatcgtgcgcgctctcgagcggaaagcgcgtccccggagccacggcctcgctaatctccaatttcatttcctgggtagggaaagcaggattgttgtcgttgatgtcctggatcaccacttccacgctgaacagctccagcgggttctccactaccaactccagagttacagtgcaagagggcagtgtcccacacagctcctctcgatccagacggtcgttcacaaacatctctccggtctcccggttcacctcaaagaatcttcggctagctccagacaccacccggaacctgcgggctgagaggctaccgagatccaaaccaaggttcgcgaccacgttgcccacagcgaaacccttctctctttcctccgggatctcatagtgaatgaccgtggaagccttgttcaaggcaccaagcagaagcaaaactcccactaccctcccggtgcttaccagtccgctcctccaggcctctgggaccatctcactcaaaagcagttcctctcagcggggtccagatcgtccctgagatttcgctgagaaactttcagcgggttagcgcttgggcgctgggcgccgagtccgacatggctttctggatgccgttgatttgctcgccggctgttcagtctctgcctcatcccggggcgcagaaaggggacgggcaggggcccgatctccagcgtcttcattggccgacagcggcacacagagtcccagccaataactgcacgaagaatgagctagcgccgggctctctgagcaggacacgcgctagcgc

SEQ ID NO: 5639 - DNA, 3043 bp, Homo sapiens
  source 1..3043: mol_type = unassigned DNA
cgactcaggagagctcgacacgccggatagctgcggccagccgtggccatcctggccccccgcctccgccttccccactcccgcgtgcagccgggacacgggaaaggaaagctttggaagtcaagcgccggccaaaagatgacctgcccgcgtgtctcctcgccccctcccccagccgtgtcacatggcggccccaaccaggcgggcagtgcgccccgccgcggagacccagggccgcgtcgcctgggcagtgggtgatgaaacttcccaggcgcattaccgcagagggcgcgggcggggcgcggggcgggggtgggggatcgagagctggtaccggggctcacctgttctccaggaggagggtggggacggggggaggggcgagtgcgcgccaacgccgggtgcgtgccctggggcgcttgggcgcggcgctcgtgtccccgccctcccccagccctgcgagccccccgagctgcgccgtggggtgacgggaccgagagcagttcctgtccccggccccggcgcgggggagacgtgagcgtgcacacgtacacacacagcaggggaagaggcgctccaagcggcgcccaactttctccttccctccacgggccgggtgagaaagtagccgggggctatcccgacccggcggttcttggggagggggccgaacaagaaaagggaggagatggagataacttccccggatttagcttttttgtctttgtttttgttctcaccacttccatcggatgactggagagtaaaagggaacccggagcggggtggcgagcagcgctttgagaaaatgcaggagtgtgtttggagacgcgtaaagttgcctttcaagctctggcctccgggcacgcgatgctccgcggcgggctgactcagggctgccttgggcctccctgccaccctcctggaaatgatgcaagtcctgactgtcacctggatccctgcagcccagcctggaatgcgtctggattaggggaaagacgagaaacgacactccaggtgttgcacggcccaccaaagcgggaagatagggcagttgctcagaccaaatactgtatctagtgcttctgctcctatcttcaatcgtggggttctttttaatgcaaagtgtcacaaggccaggaattcccatgtgtgctcagttggcccacagcatcattgtgcctaggaaactgcttcaatttatcaagtcctctgggctgggaatctcactgaattccaaacggcggaaagaggaaactttcccaacccgatgtgggtgtgacgcgagccaggggccccagggacactgtcccagagcacaccgtccccctttaacagcaactggagcttggattcgctcttatattgtacagtcctttcgaccattgccctggagcacccgcacacgcgcacgcatctccggccgcgctcacacacactcatacacacgcacgcaaacgcgtggccgccgccaggtcggcaactttgtccggcgctcccagcggcgctcggcttcctcctgtagtagttgagcgcaggccccgcctcccggccgtgttgtcaaaagggccggggtctcggattggtccagccgccgggacaacacctgctcgactccttcattcaagtgacaccagagcttccagggatatttgaggcaccatccctgccattgccgggcactcgcggcgctgctaacggcctggtcacatgctctccggagagctacgggagggcgctgggtaacctctatccgagccgcggccgcgaggaggagggaaaaggcgagcaaaaaggaagagtgggaggaggaggggaagcggcgaaggaggaagaggaggaggaggaagaggggagcacaaaggatccaggtctcccgacgggaggttaataccaagaaccatgtgtgccgagcggctgggccagttcatgaccctggctttggtgttggccacctttgacccggcgcgggggaccgacgccaccaacccacccgagggtccccaagacaggagctcccagcagaaaggccgcctgtccctgcagaatacaggtaagtgcatgtgcccccgcagccgggagctactgggagaggacaccgtgcacccacgcggcgcgccccaggcgtttcgccgggagccaggcgcccacccagggccacgcaaactcttgggatggcacgggacgtgcaaagggaagcgcgaggcaaggcgaggtccgcgccgggctccgagggcccggaatctgcacgtgctagcagggtgatgaaatggctggggcaggacttgttgctgtcctccccagggtcgaggggaaatgaagcagcgtctgacgctgccagcgccagcccccgcccccgaatcccgggtccggtgcaaagcgcgcttcatcccggccggcacgcgggaggcccagagggtccccggagctgggctgcgccctgcgcccggagaacttctcttcctggcctgccggcctcagtaagggtgccgcgtcttccccctcctcaaaagatgcccgacatcccagaactttgccggcgagacaaatggcattgcgaactttccccctgggggcactgctttcggaagggagcgtgagggcagcgcaaagcgtacctccgcggtgctgccgccatccccagctcctggccaggtcagcaagccaagaaatggtgacacgacccgaaccgtgcgcctcctctgctctaccggctcttggctcaccggcaagctgcaaagcagagccaggcgtgcagggcacggggctggcccttttcccagctcggaaagagaaagaaaatctgcctacagctccttcgctccacgacccctcccccgactttggggggccgtgtgaacgcggcagcggcggcgtgcgtgcgctcaccgcacgagctggaatgcacgagtgcccattagggacgccccaagtgagtgaatggcggccctgtgcggtcctgccccggcggcgcgtggggtcttacggatcctgtcgcctccacatgctggggccggcacccccaccaccccgagaccctcgc

SEQ ID NO: 5640 - DNA, 864 bp, Homo sapiens
  source 1..864: mol_type = unassigned DNA
cgcgatccaacccccaatccgcgatccaacccccaatccgtgatccaactcaaaatccccgatccaaatcccaatccgcgataccaagtctgcgatctagcccagaatccgcgatcccgcctggtccacccttcagcagcgacactggcggcctccgacctctcagacctagtgagcctcgcaaagccgcccggctcccggaagccgcaggtgcaggcgccgctgggctcgcgggttctcctggctggcccgggctgccccaggaccacggacggaaaatcgcaggcgcgcggcccaccccgccttaaggggagggcccgcctggccgtgtagcccgccccgctcctccttccgaagagagatctggtgctggcatgggcaccccgcggccaccggagtggcttcccggatgagcctggcttcggcgctgacgctctggccctgggggctgcctggctggtgtcaggtagcggaagacgcctggagagtcactcgctccttcccccacccgcccccaccgctgctcgtgccaggacgcgcagtttgcagttgcagctcaggcactggcgcgggatggcggagcttcccttggatggcgtcagggtcaccgagtgcacagcctacctggtctgagggtctgctcctcctggacacctctccggatcctgatccctggcgctgggcaatccacaggatgagactcatcggctgctggcgaagccgaccgcctgactttgctgcctgggcggctggccccgggatccgcgctgctggggacgcgggcctggtctgcggtgtccagccacttgctgcgggcgcgccacgtctaggctggtggctgcagccgcagctccgcgcctgcgg

SEQ ID NO: 5641 - DNA, 2071 bp, Homo sapiens
  source 1..2071: mol_type = unassigned DNA
cgttcggccggcgccgctcctcggaggttgtgcccctggggtggctggcggcggggctcccccggcccggcccgcggcgcttctctgccgccgcctcggggtgtctctgcttcgctgcgagcccggcaccgcggcgacggcggcgcgaagagggaagcgggcggcggcggcggccgcgccaagatgcgccgggtcaccgcaggctgaggcgcccgccgtccccgccctccccctcgctcgcctccctccctcccgcctgcctccctcgctcgctcgctccttccctctccccgccttccctccgcgctcccccgcccgcccctccgcgcctcgcctcctccgccccgcgccctgcggtgctgcagctgcgggcggctccagctgcccccagatgtgggctgggcggctcgcggggaactttcgcgccggctgcgagtgcggggccccggctgcagtccggctgccatggatccgccggcgggagccgctcgccgcctgctctgccccgcgctgctgctgctgctgctgctgctgccgccgccgctcctgccgccgccgccgccgcccgcgaacgccaggctcgccgccgccgccgaccccccaggtaggtgcggcccggcccctactccccgggacccccgccggcctggccctgtcccgcgtgccccgccgccccctccccaggcgtcgtccagcctgacttgggcaaactccgcgcgccccgcccggggccaagttggccaacttcggggccgggttggtcgcgcagggggcgccccgcaccgcccccgagcgccttgggccgggggagcctcggagcactggcggctcctgagtcgcggagggtggggacggagggccgggaaaagccccgcggccaagagcgcagagtcagccccagcgggtccgaggggggagccagggcgaggcggcgccggggctcgcgtccggggacgctccggaggagccggctgccgagcgcgtagccttgggccctaaggattggttggggcgccccgcagggaatccccggagatcggagggaccctgttccacccctcccagtcctcgggcgctcggggagacggggccggcagcgggctgagcgggagctggacaggcaggacaggccgctcgtgctcggggaagccgagactccgccgctccggaggctggcggtgagggcactcgggcggcaggggcccgccgaggggtcgtggcacacgggtaagggggccaacccggaatggcttccgagcagctccacgtcctgccaaggacggtaggtgcaagggtcgggggactctctgacggggtcgtcccttcgggcacggggaggttcccaccgagccccaaccctgaacggggcagggggcagagctcttggcaggcaaggtctccggaggagggaacggctggggagtggcggagccccggagtggtggccctgttaacgccccttcccggttgcaggaaagccggggaggtgcaggctggcttctggggtcgcctggcggaatgccccttcccttcgcagtggggcggggtctgggggggcgtggcttgccggcgggtctctgaggcactggggctccgtggtctccgccgatctaacgccccttcccgttgcaggcgggcccctggggcacggagcggagcgcatcctggcggtgcccgtgcgcactgacgcccagggccgcttggtgtcccacgtggtgtcggcagctacgtccagagcaggggtacgagcccgcagggccgccccggtccggaccccgagcttccccggaggcaacgaggaggagcctggcagtcacctcttctacaatgtcacggtctttggccgagacctgcacctgcggctgcggcccaacgcccgcctcgtggcgcccggggccactatggagtggcagggcgagaagggcaccacccgcgtggagcccctgctcgggagctgtctctacgtcggagacgtggccggcctagccgaagcctcctctgtggcgctcagcaactgcgatgggctggtgagtacgcacttctctagctcctttctctccgctgctctcgc

SEQ ID NO: 5642 - DNA, 1170 bp, Homo sapiens
  source 1..1170: mol_type = unassigned DNA
cgagcccgcgccaagagctacgccgagacgcgccgtcggtggggccacgcgagatgcaaccggagagtttaaaactagcccaggaccaaccccccagggatccgctcaactctccccgcagaagagtttaagtggggcagtggccgccacaggctgaggatgatttccggacgcgccccaggcgcgaccgcactactcgtcctcagttcaaagcctgagtgacttggcaccacttccccaattgttttttatttccttcgcatccctgttgtgtctaccgctttcacgtatttgagagcctaaatcatgttaagacgacttggagaaacgcccgatttgcctcccaagccacgcaaggatccacccagacgcacgcccgcgcggagacgcacgctggcacacgcgctcacacacgcgagcacacacacgcgcacactacccggttcgtgcgcgcgggtcgctgttcctgttgcattatgcaaaggtggctgggaaagcgcgttgacttacatttacatagcccatcttctccccacagtatgtgactaatacgtatcccggggaggagggagcgcggctgggggtgctaatcggaagggaacagacagtgagtgccatcttgctgggaggttccagaagcaaagcgccaacgacgacagtagcggtggcctcagctccaccagtaactgccgctggcaggagcaccacacgctctaggagtttcccgggtatcaagtatgggtccagcccgtcccagttatcctcttcccctatggcttcattcccgttgtcagtaccccgacctcagcttgcaaccttgatcttgggcttgattataaatgacgaaagaccgcggcagccttcaaagtgcgggagcgagccccgtactggtcagcgcggcggagggatctttccaggaggccccaagcccccaagcctgtggagagacttggtaacagctggcaaggcctgctccagccaccctcgctggctccttgcccctgcattcagcgcctgagggcgttattcgccctctccctgcgtcccacgcaagcggctcaaggaactcactcgatccggattccgcctcgtatgctctccaagccttcgccacctccgcaggcgctctagaaaggcgtgatggccccagctcagtgcccgccagcccga

SEQ ID NO: 5643 - DNA, 2168 bp, Homo sapiens
  source 1..2168: mol_type = unassigned DNA
cgcgccacaaacggggacttaacccactgcccgatctctgtcagaggcgacccatttgcgcttctgctatcgcacctccgcccgcgttcctgcgccccaggttccccgctgcctccccgccccctgcagcgcgggagcgttgcttcgcctggcctgctggcctcctctagaccttggccaccttctccgtggcaggaagggctacatgcactgacagattttccgttggtggtggctgggtggtggcgaggcgtgtttccgggcgcgcttaaaacctagcagctctctccaagtagcagcttcccctactccgcccctaggactgaggacctagccctcgatgccccctcacttctccccgtcctaccccgccatcacctcctaacctctccagtatactctcaagcctcacacgggcgcctgtcctccctttgcattccctagctcccgggcgccccgttcggttgaagtttacgtatcttgggacctaattgctcccaattatccgcgcagcctaagtcccgcgtctgcctggctctcgccccgggagcctgaagctaccgggcagttcattgggtgtcctcggggaaaaggttcaagctgtagagatgagagaagtggggctgggggaggggagaggctccagaaggaagaccacgaacacgtgcgaagaaataaaagccaccacgtgtgcacgcgcgcgggggcccaagggcgcgagcgcggagcacgccccagggggccagggacagtggtcccctgcagcgggcatagcagggggcgcgggtactcacacgaaagcgtggtagatgaacgcccagccgcggggtctctccagcacgttgtacaggtagttctgcacccgccggtacttgacgttgcgccggcagctctggctactcgtgtaagagagcggcttccccagcaggctcatccgggccccctgcttgccccggcggctctccctcaggccaccgccgccgccaccgagcgtggccgcgcgggtgcccagcagtagcaggccgtcgcccctggcggctgccgagttcagcagcaccctgccccggccggactccacatccttcatgccgctgcccaagcgccccccgcccgccgccgccgccgctgcgccgctcttcacccagagcccggcggcgccgccctcctctcctcccgcgtggtggcggggcatggcatcaccacgggcaccgcgagggggccgccagcgcctgcggcgggggcagcggcctcatgtgcgccggcgggtttcaaggaggaagccggcggccgacggggcgcccgccagccagagacctctgagccgggggcggggaagcaggcagccagcaaaccgcccgggcttcggggcgggaaaggaggggctgcagaggaggccgaggagtcccaatttctaacagcctttagcttcgaattctaaatccggacctgtttggggcgtcactttgagagggtttctcttgctccctcattcccgcgactaccactccctccttcccaaactgcccccggggatagagtgggggagtgcggggcgctccgaggcgcgctcccacgcgcgcacacccagccccaggcttccccttccctctctccactccccacgccctgcagcgaaacggccccagaagcccctctccgaggcgcgagttcggtttggttctggcaggggctttgcagctgtccggaaggtgaagtcagccttgtgtcctgaggagaaactggagatgcaggtcgctgtgccctcccgctgctacgtcgctgcgccggatcctgccatccttccgcaaggggtgagagcgggaacagccctgccctgccttccaggtattatctagcctggaggctggagcgcaaggtaacgctccgggaagtggcactcgggtccccgcacacgggcgagtcctcagcagttcagtggacagacccgcaggacgcggctgccaagtccgcgaggcaaggaccaggcatcttcccgcgcctcactccagcctgcggactgtgactttccatcccagtatcagacaagctcgcgagtaactgaacatcctttccagtccatgggtggggtgtggaaagggcgtaaaactccaaagtggctcctccgcggtgagcgagctgccccggggctctgcctgactgcagcgcga

SEQ ID NO: 5644 - DNA, 2053 bp, Homo sapiens
  source 1..2053: mol_type = unassigned DNA
cgggaagacctggaggtcggtaaaacggagcggtgcgggatgatgtctgggaacaccggcaaggtgtcataaaatgaacgccaaggcggccacaagaggacggccgggaaccgaacccagcgcccagcacggggcccttgtggccgacgtgacgtggctccgtcaggtggaaaccgtgcgatcctctcccgatccaactcacgagagataaagatgtctaaataaccacgaccgccgccgcacaccctgcagggccccgggggcggaggggaggggagcgcctcctcggcagaagcggcggcccaggcttgtttggaggttcgcaattcaccatgataaatgtaaagaccaattaaggtttgatccgtgcacacaggaggcagacggcggctgatagtggaaacaattaacgagcatgtcccctaattcctgccgcggctgctgagcacaccgcggctccccaggcgcccgccgctgccgcccccgagtcccagagcccccagtccggccctggagtggggcgtcctcctccagcgaaaaggtgcgaggagcggggccccgggtggccggggagggggcgcgccgggccgggaggcgcggagccagccgcctacggagcccaactgtttgcatcggggaccggcgggcggggcgcgcccgagtggtctcgccgggaaagggcggcgggcgctggagaaggcgcctggcgcgaagctgggcggcgccccgagggcggaggacaggtggccgcgcgaccgcagccaggtagcgaacggctcgggggctgcgcagcgcggtcccaaagctcagcccggccccgggcccagctcgctgccgcctgccacgggagcggccttgcgcggagggagggggcgcgagaccgcacccccgggcccggcgcgcctcggcctctgggctcccgctccccttccccttccggctcagcccgctgccccagacgtgacccccgcggaaggtgttggcgatgcgcgctgcccgggagcgtgtgattaatggccccgaggtcgtgggcggcgcatgcaccagccccttcttggcctggtcagggtgtgagggtatccgggagcacagcgaggtcatggcagcgggggcctccgggagcgcggcggcggaggaggaggaggaagaggagaagtaggtgacgcgggccgaagaggcttgtcccctctggccccagggctggcgccgcggcgggtcccccgccccaagcaaagtttggggctacgggcgctgcgctcaggtccctccccgcgcagttccctcggcggggtctgtgccgccgccgctgccagggcaggacaaaggctcattaacacgtgatgggaccgcgcttcataaatgggactggagcgagagggagccagagacagcgcgagcggagggagcggcagggactgcgcgagcgggacgaggcgacgggcgcccgggctggcggagacgggcggccccacgccgggccaggcggggctcgcgggaggacccagtgaagagcctgggaaggggcgaggctcgccggcggtcggagcagcggggcgccagtcccggtcgctgtcgcgggcgggcgctggagaccgggacgccggcgctcggacggactgacttgctgaccgcccgccggaggcacaccccactccaccccaccccgcctcgccagcagcccggcgccggcgccgcctcccgcacgctactccctctgccaccccttccttctccacttcttttccgcctccgcctcttcttgtctcccgcggcgccagcgccttcccttggcccgggcgggggcctcggctccctgcagagctctccgtagtcagtgggggatatttcgttctagcggacaaccagcccctgagctgggcgagaggtgccaagggagcttctgtcccgaggaccaggggatgcgaagggtaagacctggcagagttgcgtttggaaatactttttccgcctcccgccccctcgggtacgaccagtgtggtccccaagtgtccttcgtggagttcttattccgtgtgagcgaatcgtgcgtcgg

SEQ ID NO: 5645 - DNA, 1679 bp, Homo sapiens
  source 1..1679: mol_type = unassigned DNA
cgccccttcccgggaagactcgttacaagtcgcgctccccgccgcccccaacctcggggtcgctctggtcgtctgtgaagcagacgtccacgtcactgtcgtcgctcttgggatccccaggctccgggggatagccgggctcggcacccgggccgtcgcccgctttggcgagcagactctggccagggtggcgggacttgacatgtcgctccaggtcccggcggcgcacaagtaccttgccgcagaactcgcagcggtagggcgtattgccctcggcgtgcagccggatgtgcttgttgagattgctggggtcgccgaagggccgcagacagactttgcacttgagtggcttgtagcccgtgtgcgtccgcatgtggatcttgagcccatacttgcgcgagtacagcttgccacagtagaggcacaggtggccggtcttgggcttacctgcgccgctgcctccgctgccgccgcccccggtgcctcccgccgccgcgacggccggtggcaacgtccccgagtccaggcgtccgcgacccttcccggcagccatctcggacagctgctgattgtgcatggcgatctctcggtcgatgctggccagcgaccccagctcggcggggcttagggcggccgctgcaggcccgctgaagtaggagatggactccggatacttcagcagcccgccgaagtgcaatttgagcgggtaataagcggtggtggccggtgagccgtagagcagctccccgttgtagactgtaaaggccggcatgacggcgggcaggtggctgcactcaccacccggataggctttgagaccgcccgggtcgaggggcggcagcgcgcagcgctcgaggggcaaccccggcgcagggggcagctgcgcataacgcgctcctggcagcgcggcggctgcgggcggggcgcgctccacgtgcttgaaggcggacgcctcttccggggggacggagagcagagggaagccgcgcagggccccagagcagggcaggccaggcggcggcggcggcggcgggtccccagcgagcaggcacttgggatggtggtggtggtgcgcgtggtggtgatggtggtgacccgcgccgcccgccgccgagttctccccgctcccggggcgcccgcacgcccggcccccgcccagcagcctgcccaaagcgaggccggctccttgcttgctgctgctctcctcccggtaggggtcgccgtgagcggccgccgccgccctcgctaggccggcgggcttgaaagctgagcgcacgccggggtagaaagccaggctgccgacccccgccgaggagccgcccacgatgccgaggaagtgcccttgtcctcgggcggctccgctcatgtccagggcacggtccagctgctccttgcccttcttgggctgcccccacttgcctggggtcggcgaggtggccgagggcgcggaagaggcctcgcgcttgatgccctcccgcgcaccgcaggcctgaactggtggcgggcccagggggtggggtcgcaaagttcctgcctgggaaggcgcggcgaaatcgggcgccgggggttttggggagagaccgaggccatcagccgctgggacggcgccttggcgagccgcgtgttcgtggtgcaggaaggcgccgcctccaccgccgctgaacacgcagtggaaacgc

SEQ ID NO: 5646 - DNA, 1474 bp, Homo sapiens
  source 1..1474: mol_type = unassigned DNA
cgcgtgtcagaagtccctcccgcgcggcctcttccccctcttcctccgcagcaggaggcctgacccccgcgtcctgcacccgtgtggaccaaacgttcagcctcccccgccacaatcggacgggaactcgcgcgctttccgggctattccctgtttgtgctgagttatgggcgaatctcccaaaaaggagatatacgagtgggtcgtccaactttgaggggaaacgaggattctctttctcattttctctcctgatttctctccctacccggaccgcacttctcgaattatccccgtaaggaggaacgacgaatgccgccggtcccacgagactgccgccccccactcatgcccaaacaaggatagaatcttgtagcgaggcgacaagaaaataaataagcgggcgtttcaaaccgagtcctcgggtgtgcagacccgcagcggagtcgcgggagcgaggtgggaaatcctggccgcggcgccgggctccgcccgccggggggcgcggggcggcgggcgcatgcgcgtgcgcggtgcggccccagccctggctgccgccgcctgccgccgccgtcgcgatgcctattttagtcaaagcggctgcgggcttggggacccggcccgggcagcggagcttccggacccgccgacccgccgaggagcgcgcgtcgggctcccgtcgagcagctgagcccgtgtgccccgcgtcccgcgccccgaagctgccgctccgaactttggtcggcgctgcccaggctccccgccagggaccagccgggtaaggatgggaggcgcagctgcagccggctttccccccgcgccgggttgtgtgcggcctcgcgctcccctggctaaatcgggaagcgaaagttggatctcagcccctcggggagcaactttgtcggccctggcggcagctgcttgttctacgcgcccgggcagccgggggcgccgccctctgtccctcctcgctggccgcgccctcgaggggctcccggcccttggaggccgcccttctccccgggtctgggcgctgcggccacagagaccctcaacggtcagcggccgccgctcaggtcaggcagccccagcgtccccgggccctcggccccaccgagtgccggctcccgcgctctgcggcggcaagccccttggtgagctccgtctctgctctctccgccgagtctccggggttcctcctcgccccctgtagggccgcctcgagccgcgcagagcctgcgtgcagccgggcgcgcggtgtcgcccactccgtccccgctcggagagtagggtgggccacggcgctcactcctcacccccgcgtcccgagagcgcctggccgaggaggaccgttgccacggaccctcctcctttaaggagcgaggtcagagggccccgggagagcgccgatggctggggacccgaggtccgcgccacccacccgcaacctccttccccgagcctttgggaacgg

SEQ ID NO: 5647 - DNA, 675 bp, Homo sapiens
  source 1..675: mol_type = unassigned DNA
cggctccggcaatccccgcatcccggctgcgccggtcgtggtcggacgcccgagacgcgcggaggcacagcagaccttggcgtacaggccatgccgccgcaaacggggggcgcgcactccttcccaaagtccccagaggagacacgtacctggtggtagggggtgtaggcggctgcgaagtagggctgcggaggaccatagacttggtacataacatccagacagctcatgactctccgcagcggagacggttaagtgttttttcattaactctccttccccggagctcaggggtgctgcatgggcggcgcttggacccgcgctctggagtcatcaggcggagcaaagccagcgcgctccgcggctcggaatccagctggctcgctaccctcccactcctgcgattttactcccgaccgcgctccagggcagaagcgcctgagctcccgctagtgggcatttaaagcccatgcccggcgggcgtgctgacgccactcgggggctgcggagcgggagggggcggtggggggcggggaccggggggccaatggggagcgagggacgcttgttggaggggcagcgagtgtgtttcccggggcccacctctgacaagcatgcggccaagggtgccggagactatgcggttcccagcggatccgaggcttcgcaccgcga

SEQ ID NO: 5648 - DNA, 1133 bp, Homo sapiens
  source 1..1133: mol_type = unassigned DNA
cgtcggccaccgtcgagcccccactttatccaatcagatcgcggggaaggacacgcaaacctgccgagggctcgggggctccgggctgctgctgctgccagcgtcctgggaagtgacaggcattaggacctgctggcgcggcggcggcggcggcggcagctccagccgcgcccgccacacataccttcactcgctcggtgcacacgccgcgccgcgggcagtgccgcctgcggaggcgcgctcggggcccgcaggggcagcagcggcagcctggcagcgccgccgcgccctcgggcatctggcccgcgaagtttcgcccctgccgctctccgcgccgctcgcctcacgccccccagcgcggccgccgcccgacgcgcgctcgccctgcgctcgccgcgcgccggctccgggggcggcagaagcgcgcgagggccgctgcccgcctccctgcgcagcccgcggctcctaggcaccctgcgttgctgggcccggcgggcgggggtggggcggggagcggggcgcgggccgagcgggggcgtcccggctccgcggtccccggcggctgctgcagcggctgctgcgcgcaatgatgcgggtccgcgccgcgtcccagcagcggcgctgcccctcccttcgcccagatgtgtgaatcctcctcctacaacaaatccttcatcctgctccctgccgccccctcccagggggccaactttgaggaccgcaggggctgccgcccaggcggccgcaggcggcggtgtctaggcggaaaggagcggcgcgaaagcggcggcggcggggaccggggcctcggggcgaggagtctgggcggcatgaccgcggtttgctgagctgaagtcggtcgtgctcccagagccactccgcgggagcgaaccgagtgtgtgtgtgcgcgcgcgctcgggggagaagggaccaagaggagggttagggaaggaagctggggtcatggaacaggggtgcaaccgaggcatccagagcggccggaaagcccgagtggcggagaggccagaggtggcgagaaggggcgcggcggcaccggacgcaccgcccagcacctggctcccctgggctcccgaggatctgaagggtcggagcgcggagagctacggagccga

SEQ ID NO: 5649 - DNA, 1808 bp, Homo sapiens
  source 1..1808: mol_type = unassigned DNA
cgggcgggggacgtccggcagctctgcaaacgcgcagacacgcgaaccccatcgcctcgcgcgccctttggctccgctggtgcgtgtcggggatgcggccgcgcaggcgctcgctccctggcttcctggccgggtagcgggcgttcggctaccggagtccagcctaagggcccagccgaggtctccccgcgcgaggcggttgcgctaggtgagcgggtaccgcggccgcgcctcccttgtcatttactcagcggtcagaggcatcctgcgtctgggagtcccaagtgccttcggctgggtgcccctgtccgatcctcaaaaggaaagcacaaatcccgggtgcgagtctaacccaggaccgaactttcccgcgaacctgaagttaccatggggcgggagccaccttagcgccgcgtccgcccgcccctcgcaccggctaggatgctgcggaaggcaggggcgccgagaggcaagggtgaaagacgccgtccatacccccaaagcccgaacctgcatctcctctgcgaggcgcagggcgggaggaccgctgcagttgggagccggctccggacaggcaaagcgacccgacaggtgaacgcggcgggagggagcaaacgcgtaaaaaaccctgcacttacttcttcgctggcgccttccccgggaggcgttttggctgccgatgtattccataaagttcaaaatgataaaaagccaagaaatcagtcgcaagtgcatagtaacccagtaatgcttcccttcctttctcctctttcttttgattgttaattatatttaatgtttttaaaatatatgtaggtgttaggcgtatatagacagtgcccgagcagcgggacttctcctctcacatccgataggcgtgctgtgatggcaagcgaagtggggcgggtggacagggaaaccaactattgtactttcaaattatccaagcactgaactgcggcggcttcgctggggtggctggcatcgccgcgaaccggggttccaggagccgccggggcggccgcaggtagcatgttgtgcggcaactgccgcaggcgggatccgggcgggcgagcggcggcggcggcggctgcagcggcggccccttgggctcagaagctgcggcggctgcggctgcagcggcgggggcccctggagcgcaggggagcgggcgccgtcggcacagcggccatggccaaggggcggcggagagaccccgagctgcttctggcgtgcgcgagcaggagacgctccagtgttgggctgggctcccgggagcaccacataggggaggaggaggaggagggcagggaggggggagggagaggagggcagggagggggagaggaggggggatggctgtggggggcgggggggagctcgggggcggggaaggaaactgctggagcaacaaccctgagcgacctcaataactttcaatttcaagagggaaagagggagctggaaaagtacaggcgttgcgctttggcagagggacgggaagaggcgcctaaggggtcccgggtctacagcgcagcatctctggacactgcagtgacggccggagaattccagccagaagaatggggaaagcagtgcgtgcgaagagcccctccagaagggcagctctggcggggagacttgggcgcactggggctggcaggcagtgttgaggccgaagaccccccacccatcccagttcggctcctctccgcggcctcaagctaggcgcacccggctgtcggtggccgtgcgcccctgcgcccttgtgccccagcgcccccaccccatccccagcgccggcgcgc

SEQ ID NO: 5650 - DNA, 1323 bp, Homo sapiens
  source 1..1323: mol_type = unassigned DNA
cggtttcggctgcggtggccgcccacccacctccccactcccgtcagcaccctttccttcccctcacctgtcctgagcaccgggccctgggggtcgggtcgcctctccctgttctcagtcctggtctcactccaggagctgtcgggacgtcgggcgcctctggaggcggacgaagaaggcggcagggtcgggggcgtcagcgggaatctcggccgccgcgggcagccgcggtctccctccccatcccagggctcgggcggccaccgcgggcggatgagtcaggcgagggggcgggtggcaaggggtgcaagcggacggagggtgggggcgcccctatgcccgcgccgggggggcaccggaggcctcggggcaggggatgcgccgctgccggtgctcacagagggccgccgccatccgggcgcagagtccaggcgcgcctgccctcggagggcaccgggcgcagcaagccgggcaggggagagggagtcgccgctcaggcggcgccgccaccgcgtccaagaaagacaaaagggaccgggaacgggaggggaaaagttttctgctcggctccagatggatcccagccccaaacctcacgccataaagccccgaagaggcgggttgggggcgggggccggggcggacttccaggggcgtggctgcgcgcctgcgaccccggaccgtgccaatctcgccgccgccccaaaacctgtgggaaaccccagtcctgccacccactcctcctggaggacgcagacaggatctgctctgcaggagcccaggccggccgatccgcgtcccggccacaaagttgcacttcgagagcccaaatcacccgcagacaaaacccatctttgggaacaaagtacccgcttgcaggcgctcttcccgggctggaaggctggcgtgcggaaacggacacacccacccgtggggcccgcctctagctaccgcgggaccaccggttaccgagccagggacccggctcccccagttctccggagcggctggggagctccagccgactcgcagtattcccggagcaggcaccgcaggaccctggctccacgcccctcggacgctttctcctcagatgccgcccggcgggccggggtccccctggcgggctgcgcgggcgctgcgcgagctaaaccaaacctggccggaaaagacgcggccaaggcccgctcggtccacgcttcccgccggcccggcaaggggttccggagaacggcttgggggggcgagaaccatgggcgggggaaatggaagacagagggaactgaagcacgggggtcttcgatgagcagtgcggatgttcga

SEQ ID NO: 5651 - DNA, 1501 bp, Homo sapiens
  source 1..1501: mol_type = unassigned DNA
cgctactcgagccaatgaacgcgactgctctgacaaggcgcctctaatttcaccgaccctggcaaactgcaggagacattcagtccacgccacataaaaactattaaagtgggatcgccgcagttgaaaagcccgatcagtgcctggagattagaacgcgagcctttaaagtacacacgcacccggcaccgggaaagcccaggcgcctgtgaccctccgaaggactctgggtcagcatcctcgcgcctggaccatctagggggtcatcagaaagtaatacacgtcataagaaagatgtgggggagaccccgatgctcgcgcctctgccaggtggaggcggggtgcaggtagaagccgcgcgctggactgctggatgaactccgttacgcgcaggctccgcgccgaccccggaagggacaggcaggctcggaagggacccttggggcttggggacgtcttctagggcagagagcaccgctgcggtccgagcggcccgggccctcaggcgtggggcacccggcctccaagcgccccccggggacgcaggcgcccacgcaccgtccagctgcgcgtcctcagtacccagcgctcggcgtccccggcggagcctcgcgcactttcccggaaagtttgggggttctctcaactcaggctcccccgggagccctggggcgggggttggaagaaggggtcactcacctcgtcgcccggtccgcctcgggttcccgaagtgtctgtcccagccgcggttcagtgcgtccgtaattaagtatttattctcgttccttccagtgtcgaagtttccccttcgcgctgtgcctctggtgaaaacaggacatccccttcggccaccccacaacaaatagcgtacacaagcgggggagaagcggggcggagggagaagccggctccgagggggaggaggaaaggagaggagccaaaactccggactgcgacaggggggaaaggagaagaaaagaaaatgagagagcgcgcccagccgccgcagtcgtcactccccggcttttcccgcagctctttccccctctctaaggcagcgacaacttcacgtggacaggatggaagttttgcgcggaagccgggaacggccggagcgtgcgccgcgctgccggcagcctcgcacttgcgcagggaggtggggcgggggcgacgtcgccaccggctactgcgggctcgtgaggccgccgggggcctcgggggaggccgccagggacgcggggggcggcggcgcgcgggggacccactccgtttttatttgacctcgggtgactgcctattgtcatggtttgcgatctcgcgtggggaccgcccagggcctcggggccctggatgtcccgggtggcgccgccgtaatctccgtgccctccgcgccgcccccaccccgcccccacccgggccgactcgagcggctgcagcctccaggctgaggggagggacccgcgaccgcgctctcctccctgggccggagagccactgtcga

SEQ ID NO: 5652 - DNA, 1744 bp, Homo sapiens
  source 1..1744: mol_type = unassigned DNA
cgtcctcgcggttgccctcctcccagggccgccggtggtccaggatctggccatcggggaggggcgtggtcttgccgaagtcgatgagccacacgccggcgcgatggcagtgatcgtgcacaaagaggagcgagctgccgatcacctgcgagccccgcaccgtcaggccgcggccctgcccagagacgcccttgccgggttcccgccctagccctcgcggcccgggcacccgggcagccgccgcttacctcgtgcctcctgaagaactcggatacctccagggtgtcccggatctgctgcaggcggttcagataccgcctctgcagagggtggggtgggagaggagggcaaattaactaaacgccaaatgagcccctgctaacgatgaggagccgggacccacgctgtgcttggcaaatgccgccaggaggaggacccagggccccgcccagcgtggcccagaagggaaggagcgtagagcagttgcgagccagcgcggtgagggccatggtggggacacagccgagggcactgggccagatgacaggggcagtcctcggcttcaggctccccaacacctcagggtttgggatcccgctctcaccagcacttcctcatctccttgcacaaactcttcaaagacgcgaagcacctgctctcggcttcgcgtagtcttgaagtcggtgctgcaggagccgtccgctttctggatgtgggacaggagtgtcaggggccccgggcccgccagtggggaagaggacagcgtagagcagcggtacctcccagttgcaggggacggcgaggcggtgggagagggcggaggggcaggcggggcgggagcgggggatcgggaaagacagcgcgcagtggggctgcggcggtgccagcgaagcgcgcctgcctcaccttgatgccctcgatgcggaagccgagggtggtgctggagctgatgccttcccgccactgcatgtagcgcggcttggtgacggcgcgctgcgcgtgctcctcctccgtgggagcttcaggatccaccgccagcattttcttgtacatgtccttccgcagcttgggccgctcacgggccttggtcagctcctcctctaggtaagtcctgtgggggcgcaggcagcggccagggcatgagggggcgcacacggagaccccttcgagcactcgccccgggtccccctcaagcagctgtcccggccccggacccctacttgatccccccaaccgacctggcagggcacgcatacctgacgcccattttgcagtcgagcacacaaggtccgtcgaagccatcgagcaggtcctgcagctgcaggtagctttcgccgtcgcgctccaccacgccgtggaaggcaggcacgcagccgcgcagcgcgtcagccatcagccgcgccaggcagtagcgctccggctccgagcagcgcttcaggatcagcccgctggtgcccgccgccttaaaactccctgaggaccggcatccgtcagcgccgcccagccccttcccgtcgcgggcacccgcccacccgccccactgctcaccagtgtgccctgccagctgcacccaggcgtagcgcttcttgaaagggcttatgaccggcagattgaccatggtccggatcttctgccagtggtttttctgaaagcgacagggtcaaggtctgataatcggcgtctcggcaatgcataagccctccctccactgaaacagggtctcgccacgcccccgacccaccgg

SEQ ID NO: 5653 - DNA, 1801 bp, Homo sapiens
  source 1..1801: mol_type = unassigned DNA
cgcgcagcccaggacagcagcgcgcgggctacgggcgagtggagttgcaggggcccgggcggagagccgctgtcacccagggaagctctcgggactccgggcctcccgcgaagctccggacgggcgtcaccgaagccgagagtcccggccgagcccctccgcacggtgggcgccgcgcccaggcgagcgcgcgaggtcgggcggggccgggggccgcccggggagggggcggggccgggactctcgcggccgcgcgcaggggctgggaagctgcccctccggccgcgccgggcgaggggctgcgccggcccgcgaggcgcatgcgcgctgccgagcggctctcgctccctccccgcccaccgctccctcctccccctccccctcctctgcatcctcgccgctctccctctctcctcgcccgctgggtgctgaagttgggcggatggcagcaaaccggctccgctagaggaccgagccgcccagccccgctcccccggacccatcggcgcgctgcccacacctccaggcgaccgggtaagacgctgcctccaaaacaagcggtgctaagtaaatgacatcaaaatgtctgctttgcaccaatggatggatttttttcaaggtaggggggaggtgaaggaaggagggggcggagagcgcgaccgcccatgccccggcgggggcggctgcgcggcgctggggtctcagctgtggccgcggcgccctgagcgggagcgggggccgcgccgcgggtccgggaagttgaatcccgcgtcgctgcctggacgcggtccgctcgccgccctcagctgctgcagggaaccgggcgagtgtcctgcccgccggggaacgctcggccaggtcccagagttcccgcggagagcggggcgcctgctgggggcggccgggagggccgggccaggggcgcgggagaccccgcggggacgcgaggtgttgcgggttttgtgcggttggttgggaacgaggagaatgtgccatcaacagtgtccaatcgactgatcaccttgggtgctgtgtttcctcccttatctctctttacctttgggaaaatgcactgctcaggtggggaaggtgttcgaagaagaggttgcgaaaatgaatcctttgaccagcagtaaaataccggaggggtgtgtgtgtgtgtgtgtgtgtgtgtatgtgtatgtatgtatagggggtggggggtctcttttgttccttcccctccccttagtcaaaggaaagggagtcctggcgtgtgcggcgcggggtggattccacagccaccgagggggcgaggacgaggaacgcccaccaaccgcgagtcgctgcccgggtgggcgcatcggagcctcctttgctgtaggtgatggtggtctttccgtgatcgatggaatcatagtttaatctctgcctccccgccagcctccctgctgtccctcatcgagtgctgcggcagaggctgggtgcagacacggccgctttctcctcttctctctgcctccctgtctccctgaataaatgccggaggactaggggatggcggagggacagagctggactcggaagccgcgggtgggagctgctcctcgcgagcccgaggctgctggcaccttgtcgcgggcagcccgcgccagcctcgggagtccctgggctccgggagagcgagccggggtcgcctggccacaaagatgcccgcgcgcccgccctgcgtacgggacccgccctgcgccctgagccctgcgcctcgcccggagcccgggacgtcggttcacgtgggagaacccctgtcgcccggggacga

SEQ ID NO: 5654 - DNA, 1801 bp, Homo sapiens; identical to SEQ ID NO: 5653
  source 1..1801: mol_type = unassigned DNA

SEQ ID NO: 5655 - DNA, 1684 bp, Homo sapiens
  source 1..1684: mol_type = unassigned DNA
cgttccccccgggcgcgcgggcctcctgccgcctggagccgagctggcactggagcgcttctcctctggagcgcagaggcacccgacgccctgcggcagctcgcagcctttcccccacgaccttctagaacagccctgctctgcctccctccggtctcccgagtgcgcccgtcatcctgcctcgcgagaggtgaacgcggagaaagtaggatgaccacctacgctcccgagaaattctgggcaaagaaaggcattaccccagtccgcacgctgaaagtcgcctttcttttccttttttccccgctgtgcctgaatctcccgggacacttagacggctggagcctcccgactccaaggcgggcgacggcaaagttaaacgccagcgcgctgcggtccccgggcaccgaggcgtccccgctcccgccacccacacagggcgccaagtgccccgacccgcgagtgacgaggacgcacaggctagtgacacgacccgtagccagcactgagcgggacgacggggcccgagcgcaggagggtgcgcggggagctgaggagcgccgggggcccgggcgcggcgcgtacctgaggccgccgccgaggaggcgacggggagcagcgcggccaagagcagcagcgccgcccaggacagccggcgcggcgcgcgcagggtcgccccggcctcgggggccatcgagagcccggggtgggccggggctgggtgcttgcggctggcaggggggcgctggccggagtctggggagtgccgaggcgccgccgtcgggtccccgccgccgtccgtctgttctgcgcgctctgcgcggtgcccgccgcgcccctgccccgcggcgatcgctcccggccgcacaccggcagccgcgctccgccactgaggccgccgacctcccgccgagccttttagctgcgctcgggcgccccctgccggtgtgcggggccggggccagggccggcgggggcgacccgggcgacaggggcgacgggggcggcggggcccgggctggaggcgggcggggcgcgggacgaaggggccggagcgccccggactgacttagcggttctgaacttggggcggtcgctgtgccgggccaagtggctgaggaagttcctcccctcgtctaaccctctcattttctggctggggaagtcgcccatcgcgccgaggagtgccctttgtccccttacagaaacacctctgcgccccaagtggggactcgggccgggacccctcacccggtccgcagcgctgtagttcctgtggctagcccagtccttccacgtccctacccgcacccggcgcgcccacgtcaggggttttcagcgtccttagaccctgctccgtctggctgtcatttctagggcgcgcacgatgcgggtcgaaaaggaacccagttttcagtgtgccttgttgcccaggccaaggactcagcggacctcgcctctcccttttctgtaattgtaacactgccccaggtctccctattcctccttctccctattcctccttccagcctggaagcctcgcggccctccagatggactcggagcgcccctggaggctacagtgacctaagctctaggaaggccgggtcctggacgccgcgtgctgctgtccgccgccgaccggtgtcctcgcagagataacctggctgaactcaccgcccagcgc

SEQ ID NO: 5656 - DNA, 6657 bp, Homo sapiens
  source 1..6657: mol_type = unassigned DNA
cgtgcgtgactggacggtccccgcgcggagcgaggaggctcgcagcgtcggggggagggcggcccagcagggagggcgatgcgagcctggggaggggtcagcgactcggccaggaggtgaggacagccccctaatttccgggaagggaagggcagggggccgcgtctggggggcgccgggcagggtgcggacggcgaagggggacggaagggagagaggcgctggggaagggacctctcggaggcacggggcagcgtgcgggctgcggcagcgaccccgacccgggcccccgggctttgtcgggctgagcctgcgcccgctccgccgccgccaagttcctccaactttgcccgctgcgctcggatcgcgcgccaggcctgggggcgcagcaggggctgggggcgcacgctgcgcactcggggacgcccggggttcgaggtggcggggggcttggccgcgccgctccccgggggtggtccgggtcccaagtcccccaggttcagcgcccggccgcgctcgccgcttacctgcccgcccggcctcggttccggggctgcgcccgcagccgccgccgtccttcaagctctaacttcgctcccgggattgaaattcctccccagcttcgcccatcgatctgcgcgcgcggccccgcccctcgccgcgcggccgggggggaattcaagctcgccctgccccctcccgccccccttccctccctccctccctccttctctccctccctcgctccctcgcccgcctgcgcgctcccttccaccccctcttcctccgccgcgagtccggctcggagcctctggccctccccttctctccctggcctcccgagccccctgctctcctcggctccccgcggcaacccgctccttccctctcccggcgacgcgcaggggctggggaaggaggggaggtcctagaaagcgcagggggcgtcctcgcggtccgtccccggccctccccgcccacatctaaaaggtggagggggtgggtgggtgggtggggggagtgggggcgacagctgttggctgaacaagctacccgcgactcccaccacctcaagcaaagccaaggcgttctcaggtcctcccgtcggtccgccccttatccgggagggcagggacctaggggcggagaacgcagggcgcaggccgggcctcctctgcccagccctggccccgcttccttccttcattcaccccaacctctgtgaggacttcagggggttctggagcactcttcggctcagtttcaccctgacaacctgcctgtgcggaagcccccgtccgcatgttacaggaagggaaactgagtcaagagaggcccagaatctggccctacacagcgcgtcgaaggcagagccccaggggcagcctggacccccggcaggagcctcgggactccacgctcgggccgggcaggccccggcggtgcctggacaagcccgcgttcgcagaacggccggcgcctggggaccctctccagtccccgcgcagcccgcgcgtccccgccggcgccccctccccgcttcctgtcccccgcccgcctctggttcccggcctcagtacccccggcacgctctccgctcgccgccagcagctgggcaattcaacgagcatacaaaagagttgactcaattcaaaggcagcaaatcaagataaatcctatagtgtgtggggaccggagagggaatgtgaatgaacgcccacgacgccgttcagtcctgtatggaccggcctagcccggctgcagggcctgacacgcccgggtcctagggttctccaggagccagaatcggagagtgggctctgagctgccttggctcccaggcccccagcactggcccgaatttagtaatttagagcttgtggcctccttcggctggctgggtggggctcccgtgataggggtgcagagccttgaaggggagtgctaggacgaaagccagtgcgcccccacgatttcatgcaaatactggggggcaggggccctggaaacccagcacagccccaggggccggcaggaagggcaccggtggtttggaacacctaagctgtggcctttctccctctgccccgacctggaccacggtcagagccaggccgcaggccaagagcaggtccttgtttacccaccagatagatactgcaagcctgggatgtgccaggcctgggcctgtggaacgaggccggcggtgagcggggcaccctctcctccctgcctgtctgtgaggtctccccagctgcagctccactagggagaagctggtcggcccccagagcttccttggtcacgcttggaaggtcccagtaagctaccctccagcttctggcctggccagccttgtgcagaagatgaccaccgggctccgggccccagcctatccactccgcctgccaaacataaaccccaagagaggtactggatccccatttccagcaggttcccccaggcctgtgctggccaagtgcagccgaagctctggaatgagcctcctttgccttcgcaggtgtcccccgtgtgccctgcgctgtgctgggcgcctgcccggaggagccgcgccaggacgtcctgctacttcccaggagcaggcatgatgagtccatttcctcggggtgcaaactgaggccgagggcctcttcagagcgcccttgaccggtactgcctgaccccagaggtcagttctgcggtcactcggggtctgagatccacggagaacctcagaggtcaacttgaggggcgggtaggggtacgcgcgcggggccgtgggaggcgagatcccgcaacctgaggagccaggaccccagcagagagcgaaacctggagctgggggaggggacggcagaggactggaggccgggctgcacggcaggggtcgagtcctcgcggccgccccccccccccaccccgagcggaggctgcgccgtccggctgcgaccgagtccccggagtcccggccgggtcgcccctcccccgtggccgcgccgattggcggcctgctgttacccggacgccggcgccgccgccgcgaggacatctgtccggggcccaacgccgcgctccacgccccctgcccctcccccagacccagaaccggggagaggacgcggcggtgaagctgggaggttggaacctggagggcggcggagtcccggagttaacggggcggggggcggggccggcgctggccctggggacaaagatccccacgctgcctgagggctgggctctgcagacaccgaggcaggaagaaggactccgtattccccgtcccccagatcctcaaatccactcaggctcagacctgagtgtccaggtggggtgggggagaccgaaccctcctgggccctcgaggcgcgcgaaggcgacgctgaaggggggacgccgggacgctgcttcctccctgcacacgccgcccgagctgcatccctaaacgctccaggagcttcgcgggtcccccctgccctccacaacccccgaagctgcccccagcgacctctccccgccctcagatggggccgcaggggcgggcgaatgtgttgcgctcgccgtgggttgggaggaagggcgcggattgtaggaagtccctgctcctccctgggcagcctggccccggggactcgcgctcagcccgcggcggaggactcggtcgggaatggtgctgagattgcgcgggtacggcccagggccgtgaccgggtggccaccgtgcagtttgggaagagaaaaagttcgggggggggccgacaccccgagatcgaagagggaaaatgggaggaaagcaggcggcagggagggaagagcggcggaagagggaccaggagagctgggggtccgctctgggccccggggtcccgccccactcggcagcccagcccagcccagccccgccgcgccagcttcccggaccgggagaggctagggtcaccgacgcctattaatagccgcgagcgggtccttcccgggagctccgcagcggtcggcagagcccagccaccggctggggtgggggcgggggtcccgtaacaccccctccggaggttcaagcggcgcggggcggggcgctgcgcccccccacgccggctttgcgaagtcgaggcacccacagcccactccctccccacctccgactccgagaccaggtttcagatgaagaggggttcgtctgtggttcaacttggggcgccgcggctaccccagcgcactcgaaggcgcgcccagccccctccccctctttctgcccagccggctttttgctctcagcgcgctccggaaagtttcggggtccccgcggcgcctccctagccctaggggtccggagtcctggcccttccagccgcggcgtcggggagggaagtttgtccggcccaggctcggcggccgctaacttcgggtgcgcccgcctccgaacctgggtgggtggatggggacgcccgggagccgcgggccccgagcgccgcatccagagccccgcgggcggggagactcggccctggcgcggacgccgaggtcagggcaccagggatggggtggcccgggctgcgagagccgctggggaccctgcgctgccccccgccgccccccccagagagcatcctcttccctgcctcccctaggggcggggaccctccgatcccgcagcggcgacagaggggtcccccggccccggacagccccctgcccctcaggccccttcttacctgggccggggtgcgggccccgggctggaggcactgtcgcgggcgagcagagcgcgcgcaccccggttccccgagcgcggcggcggcggcggcggcttcccctccttcctcctcctcttcctcctccgggctcgctggctccagacagccctcctccccctcccgccctgccggcccctcccggagcccgcccggctggactcggcctgcgacccggagcccagcggagccggcgggagccaggctgcggcgctcactgcgtcaagcgcggggcgagcgcggggcggcggcggcggggaccgcgcgctcggagcccggggctggccgggcaggcgggggagcggcggctccggctccgactcgggctcgggcgcgggcgcagtggtggcggccgcggcagcgccgaggttgtagcacattctttctgagcgtgatggaaggtttcatgtgggagagcgcgcggggagggatggggagggggcgggggccgcggcgggggcgaccggaggggcggggggcggggtcgctgcccgcacgtcggtgggctggggggtggccggaggggggctccggaggggaagttggagccagccgcgggggcggcgtgggaagccgagtggcggcctcgccccctcctcctggcccgccccgctcgccccctgcccccgccccaggccacccagaggctcccaggcttcggtttggaagagaagcgtccgaaggtctgggggtcgggaccctggtggcgctgggaggtgggcccctgggtggggacacggctgtgctcacaggcgcccggcaacctcgtggaagttgaccccaagtcagaccctctgtgagcgcgcgcgtccgcgagggccaaagcacagcccgcaggacgcgcgtttgcggggcggggggagagcggggcacttgggggcggggaggtggagcgagagggtcgtcgggcccctggcggccccgcgtccccagagactcgccctcccctaaggtcgccgacccctccctcccttccctccccgttgcgcgtcgccccccgcctttcggccgggaggagggggaggcgtgggagcggcccggcgccttccgattcccggaaggttcggtttagcggatttccctctcccttcatgtgcctccggaatcccagcggatccgaaatcgcgccctcgggctctgagccgaggggtcccccgtcgctccctggtggtcccgagccctcgccgagcggtctcacggcttcccagggcgtctcccgctcccacccgccccttccccagcctgcggctttcgtgtgggctaaaaattccaaaccaggctcaagagcgccctcgcccggctaagcccccgcgcgccgcttcacaaaccggccgcgtgcggagctgcggagcccgggacccccagcgcgcgctgggcgcgacactctggaccccgctgccagcgccgcgcccctccggccggggagccccacaccgtcaagagggcagggagaggggaggggaggggactactggaggggagggggctgctccccgggtgtctttcccggaggaggtcccgggacaggggtgggggtggcgcgggaggccgcagacagcgcgccccgaggatggccgggccggggatgggcgcgcggggctcctgtccggacgtgggtccaacggcctctccgcagcccagaaactccgtccagcccgcgggacggccgcccgccctccgaccccgagcctctaccacacttgttcctgcaggacggggttggggggactgagaccgtgattgaggccggggcatggaggaagtgccgccgcctgctcccgggattgctggacacgaagggtggaggccaaggacggagcccctgcctgcggctgtccagcccttagtccctgcgcgggggcgcccagacctccagggaacagggagacagagcgggccgagcccgg

SEQ ID NO: 5657 - DNA, 546 bp, Homo sapiens
  source 1..546: mol_type = unassigned DNA
cggaggcggcggggtcgcgggagggagggggccgggcttaggcgattggcagcgcgagcccgggagcccccccgtgcccccgcccgccccgcccccgccaccatctgctcgggatttggcgtcggcggctccgggcgcctccagctccggctcgggctccggctccggctccgggcgccgaccaggtccccttggcccccgccgcgcgccctccaacctgctgctgccgccgccgcgccccccaggctctgccagctacccgcgctctgagcccggggccagattcccatggaagcgccgcgatgttcgccccccggctgctggatttccagaagacgaaatacgcgaggtgagcggcggccgcggaggtccgcggggagggagggaggggcgcgcggcggcgggggccgcggaggccaccttggttctcgggccccgccgcccggagcgctagaggggatcggcggacccctgacccccgcccgagaaaaccaggacccaggcagcctcgtcttctcgctgggatggagtaaccggggcgcccgc

SEQ ID NO: 5658 - DNA, 288 bp, Homo sapiens
  source 1..288: mol_type = unassigned DNA
cgcgcggcgcactgcgggccgggaacgtgctgcgcgctgacaccgggtcagctccctgtgatgggacttcctttccaaaaacgtaggcgttttcccgggtcgcagtcgcagtcgggagactgagggttagggcgcggccgcggggtctcctgggccggggcgcggcccacgtctcaggcctctgcggctctgaccagaagccgctgcgcctttggccgcttcccacccgtcccgtccccgcaatcccaggcccagggttacagcggctcagctctcttcctctcgcga

SEQ ID NO: 5659 - DNA, 947 bp, Homo sapiens
  source 1..947: mol_type = unassigned DNA
cgtgaggccgcggtgtcagtccacactccactgtgggtggcgggttcggccccgcgaggaggcgccgctctcaaaccccacggtcccgcgcagcgaagaggcgaggcggccgcggaaggcaggcgcagcccactcttcccgagaggccccgacatctcccgggtgagtcccgaaaagcgcgcggggactccggctgagcgctgggccgtcagcaacccggctcccagagagtcacacgaaggaggggaagcggctctctctggggcttctgggaggtctggcccgggcccctcccgcagcctccggcggccagtcccgcggctctggggcgcccggaccgagcaaaggtcccggcgggcgggccctctctccgccctccccaagcgcccgccccccgccggcccagcgcaggctcctccgactccgccagcgcagggggcgcggctgccggggacccagcagcgggcgcgcgggtaagtgcgcggcgggcgcgggctgcgggatccgctccgggctccactccggatcctctttggtctgtttgggtgtcccgggccgggggcagccgaggccgcgcggcgctttctctctgggccaccctcccctcgctccttcctaggggagacgaatcgattggctgcccggccgccggaacggcaggtcccgtcgctcccctcgcctcccgcattcccggcccggtcccctcccatcaccgcgtcccgccccaactcgcagtcagcatccccttcccatcctctccccgtccccgctgccacttccttccttggatgttggaagcgcagctggtattttcgttctcccaaccccccaaaccccccctccccattcgttcatcctttgtgttccggtctcttctctgggtgctgcggaggctctcccggctcgggggcgtgtgtgcagggaggcggaccgcggaacagatacgg

SEQ ID NO: 5660 - DNA, 1313 bp, Homo sapiens
  source 1..1313: mol_type = unassigned DNA
cgagaatctgccgcagggggagactccgccgccaggtcttgggaattgcctgggcgccgccaaagctcgagccggagctgtcatttggggcagcggccgggaagaggtaacgatgccagcaagaaagcagcggaggcaggaggcggccggaggagtggactggagcggacggagcctcgccgctctccagcccggagcgcctggagcgaaagccaagcgccctccgagggcgacctcccctccccgggcgcgcgcccacccgctgcagccggcagcccggcgggagaggtggcagctgcagctccgcaccggggagagcgagccccctgcgcgcgcgcccacccgccccctaggtgacccggcgtcctcgccgcgcccgctggaagtttgcaaactttctccgggggttccgccgccacgctgggaagctggggacgcggggggaggttcctggctcgccgtctccgctgccgcttgaccgcacttctggagggctccgcaccttgccaggtctctggaggcaaacacacacccccgattcataactggtccccgcgtcaggggactcgcgcgctcccacacacgcacgcacgccgggcggactcggcgccggctccacgttagcatccctccaggcgcgcggcgcggcggccaccgagcgctccggcactcacgcggcgcggggtctctagggtggcctcaggacacagccgaattccacagtctaccagcactcggggccggacttccctctggtccgccaaaatgtttacaaacacagatcaccctccagaaaaaaatgcatcgcatcttccctactccttgccctgtgacctgcccactggaccaagtaacctcgcggctgctgccgagaaccaacccctgcaaacaagtacactcccgagatggctcctgcggcaagtgcaacaaaagtggctaaatgcaaaagccccagaagtggccgagccgtatttttaggaacttaccaaacaagtgtggagaaggcaagagcggagcccgggtgaagggaccacgttggactgagcaaagattacaatacattctatttagagtgcattacatcacccccccggtgacgtcacgtgggattcctgaacttctaaatcattgcggtccgctggggagggacggagcgaggggcggggccggcgcgtcgagggggcaggccccgccccggtcccgccccgaccccgccccgcccgcgcggaccctggtgcacccgcccgggagcggcagcggcgggggcgactgcgcaagcaacagcttgcagagcccagcgccgtgtgacacgg

SEQ ID NO: 5661 - DNA, 848 bp, Homo sapiens
  source 1..848: mol_type = unassigned DNA
cgcgaagcctcgcggcttctgcgtgccctggccccgggaggataaggatttcccttccctcctacttgcgcgcggagccgagctcttgttgaggtgagggttccggaagcccacgcagctccgcaggtcggtggtggccgcggctgccctgcgggggtgagtgtgcccggccggggtcggagcccagcgtgtgcccggcagacggcggtgcccgcgcgcccctccctccgcgcccgcggtgacagcccagacaccagcccgggcgctgacagacgacttttctcacttgtcagttttctcgcttgtcagcagagctgctggtaagtgagagaaaacagaggggcgcgaaggcaggcgcggccagggagtgagcggggcgctgggcgcggggcggagccgggtgcgcggcgtccgggtcaggccccaccgcccgcgccggctcccgctttgctcagccgccgcttttctctcccttctcactttctctcctccccacccagccctccttttcacctccaaaccctttagctgcgcgctgatcgcttctgtggctttgtttgggggtagggggagaatacgaatagacccgaggtgctttctcttggagctggagtccaatcccaatccctatctctatccctatccctgtgcttatccctgggcattagcccgggaccatggctggttcccgcagctgcctccggagcgcacctggggccatggtttgccgcgatcggagtccgctctaagtcggagtctgggggcgcagaagggggagcgcgccgagaaagtgccgggcaaacgcgcgccgcgcctggctgggcatcgcgagctgggcgaggagacgg

SEQ ID NO: 5662 - DNA, 2406 bp, Homo sapiens
  source 1..2406: mol_type = unassigned DNA
cgggggaggggtatacgcagtttccgtgcggaaagatggtgtctttccttcacagggctgcgcgggcacccatccccgctgcaaagcgcccgggccaggcgcggcttgctccgggtcggggcgagctcgctgccctctgcggcagacagcgatgcgcgctccccgccccagctcccggctcgcccggcggcccgcgcgccctcccggtgcagcatgcgggcgctgtgacgttctcggataaatgccgtgtaactgtgtaggcgaatgagagctaaaaataagaacggaaaatctatcattaaggtatcattgcgccagcgcagctatttgaaggctcccatggtccccggcgcctgcgtttgaagcccgccttcaggctttggggggtatttgcagaaaactcccagcagcggctcgccaaccagacctcagggtgcacggggggtggcgccggtaattatggcaactctcaaaataaaataatataaaataaagtaaccaacgttcaccaaccaccaccccatctcaccccctgtactgtcctcaggtagctggggaagccgccgggagtgcagccggatgctggaattcaatgtgacccggctgactatgcaaagactaggactggacgcttttgcagctctatttcgccacccaccttcctccttccacctcgtattagaaataaagtggggggggggggcgagcctttggaggagaaaatgacaactggcacttaaccccaggtctacagtgcgccgcggtggggcgcaaagacgcaaactcccgggatggcgagccttcggggtttcattgggttaaacgaaaattgatctgatttgctttttaacatccgagggagagaaggggagatgaggggagggagggcagggtttgagtgtgtgcgtgtgcgtgtgcgtgtgtgtgtgtctggggagggggaggaggcaccaagttgcagcctgcgcgcggctctgcgcctcggcggggctgcgtgcgtgtgtccctgtccgcgctgctgaaacgggctcttcgagggatcggcgtcacatgactccgcctgcccctcgccagcgcgcagatcgccagtccctcagtttgcccggcaccggaggagggtcgggcggcatcttccgggtactggggctctgcggagcggagaagaggttccagcggggaatggtatatctggattcaagaagccgcggctcggcgccagatcctggagtgtagatatttggggggaggggagagctagagggagcgagcgagcgagcgccagagagaggcagcgcgcagcgcgcacggacggggggctgctgcgcggagaagatgtaagcgcgtggggtctcgctggcctctgagcaccatgcagaaggggatccggctgaatgatggccacgtcgcgtccctgggactgctggcgcgcaaggacggcacgcgcaaaggctacctgagcaagcggagttcggacaacacaaaatggcaaaccaagtggttcgcgctgctgcagaacctgctcttctacttcgagagcgactcgagctcgcggccctcggggctttacctgctggagggctgcgtctgcgaccgcgcgccctcccccaagccggcgctgtcggccaaggagccgctggagaaacaggtgaggcgagcgtcgcgtcctgacctccctgcgtcccggccgcggccctgggggctcagggccttcggctggctgatggcgcttgaactttggcccctctactcttggcgccctaggcgctctctgcaccctcagcgagaggggaggcttgctcccagccaggcgagtgactgcggcgggcagagggggcagggattgagggcggggagtagatgtgggctgcggctgcccttcgccggacgagccccgtgggaggcgggtacagaggggccgacacctggagatgcagaggaagatggggtcctaaggaccagagacgatgagtctggacacacgtccagccaaaaatggtgctcccaacccccactcccaccgcccagccctaatagccccgatcgtctgttctacaccgggaacgtgtaattccccgcgcttaggcatgggaagggcaagacggaggcgtccgagcgctgccagcccttgcctcgccgcagctgagggcggagagcggtctgcgctagctcctcggagttgggctggggttatggggctacacgggtcggttcggtaccatcgagcggtggtgggctcccagctggcggccgccggagcaacaagcccaaagattcccaaggaccgctctgatgcgccggggctagggccagggctgctgcggaggcagcgggacgaagtgggcgcttctctcctcccccgccccctgcgccgccgccgccgccgcagtcgcggctatagcgctgcgc

SEQ ID NO: 5663 - DNA, 1218 bp, Homo sapiens
  source 1..1218: mol_type = unassigned DNA
cggactcacgccggctctgccacgtgttgcccgcagtctccgcccgttccctccgcgttggcaacgggcactgactgcccgatacctcagcgatcgtagagactttcctaatgccgggcgcaccaccggcgggccagcggttccgttggcttccctgacacacttcctacagtcatttctttcagctgagatcttcccctttaatacctcgttaattaacgtgtaaccttttggttaaaatgtcagagctaagactaaacctgaagaaaagaatgaaaccacaggaagttcttcagacttagtcgccagcaaggttatggcccgaagcggtgcaggggcggcgcgccgggaagctactggcagagctgtgcgcactggggggtgctgcaagcgctggggagagtgtggagaggctgcgtggagctgcgcgctcggggtgggagctgcactcccaatgaagcgcgtgaagggcaagcggtgatgggttctgcgccagtggggctgggagcgtgttgggggctgtacgtggggctgcgcgcaaggtgagaactgcgcatgtgggcttggggactgcgcgcaccgaaggctgcaggcgctggggagggtgttgggggctgtgcgtggggctgccctcaccggaagctgcacgctcggggaagcgcagaggcggggtgctgcgcgcgctggggagcacgtggggggacacgcagggggacacgcagggactgcccgcgcgaatggcttcgaacgcatgcgctccaccctacatttcacagtcgccatgacgaccgggaggtccgctcgtcaacggctagtcaacggctgcggggacaagtccgttgaggctgccaggcgagtcaggcctttctggacctcgcctgactcggatgggctgtgcctgaaattgacccagctccactagggattatgaagaaacaaggagtaaacccaaagccgctgcaatcttcccgccccagcccgtctaagcggccgtacggggcctcccccgcccgggagctggaggtggaaaagtcggccctaggcggcgggaaactgccagggggcgccaggaggtcctccccggggaggatcccaaatctgaaaaagcgaaaaggcttggagctaaaggtggtggccaagacccttctcgaccccttccagttcgtccgtaattccctggcgcagctccgggaagaggtgcacgaactgcaggcgcgg

SEQ ID NO: 5664 - DNA, 1848 bp, Homo sapiens
  source 1..1848: mol_type = unassigned DNA
cgcagcacgagtgccagggcgcgcatttggggggtgtcctggcggtgtggagagagaagagagagggcgcgggtgacatcacgcccgggcccccttcccctcgccgggtgggtggggcttcggcgcgccgggagggcgcggggtcaagtagggggaagaggaggagcaggcatgaatgtgtctgtgtgaagaccggggaggggcggaggaggaggaggaggaggagaaggaggaggaggaggaggaggcggcggcggcggcggcggcggcggcggagggcggggagggagcgcgcgcgtggctcgcggcgcccgggctcccccccagcccccgaccccggcccgcgacgcgccgcctcccagccgccgccgcccgcctcgcagctgggacccactccgggcttggggacccggcgggcgggagaagcgggggctcccggcgcggcctggaaggagcgagaaagcaaaagtaaggcgagcagcactccaagttttcccaacttcgccccctgcggcggcaggcgtcctgctgctcagcgcgtcccctccgagcccgagagtggctgaaagaaaagggactgggcgggggccggggcggaggaagagagagtgcgagggagcgaggagagtccggcaacatctgttaaaacttgggggaggaggagcgcggggaggaggaggaagaggaggagagaagggaaggagggagcgcgcgggaggggagcgcggagccgagggacaacttttccaccccgtgagtagtgcaggcggtgccaggtcggggcggggggcttctccacccagcacggggcaccaggccgggatgggacctttttccagaaagtcgattggatgccaggagaggcgtacggctgggggtttctttctttctctttcccctccctcccgcggttgaaccaaatcagaactgtcactcagggcttgtgagtcagaagggatcggattacacgatccccgaaactgatgccggagctgcacgagcgggagggagcgggcaggggcagcgccaccggcgcgctcgcacactcgcactcgcgcacacccgccgctcccactcacccgcgccgctctcccgccttccccgcgcgccccgcggccgcccgcgccgcaccatgcccgcggcgggcgcaccccgcgcccagcccggccgctcgcggtagccgtagccgcccgcggccgcgcggagcggggagccgccagcctgcgccccgtccgcgggtctatgggaagttcggggacttgacagccgctgccgccgcaggtacgtcccgctcgaagttctttgtttcgcggaccccgcagcccgctcctgcggccgcgcccgcgcctccggggccagaggtggtccccagcgtggggacgggatggagtgaaaatggctgtcaaaaggcgcccagatttagagagccgccggtgaggcgtccgagcaaggcttgcattcgctccctcctcctggaaggtcctttccgaagagtccgacccgcggaccggccggagacggattggagaatttcacctcccggaggggggacgaagtttgccgcagtggtggcggcgcccctcgcctccgcccccatccaaagggttcagaagaactccgcgagccccgcacgcgcctggctccttcctttgcgcggtggcgctctacggctcgggcttcgggcgcgcacggcgctcgggatgggcggaaggaggcgggaggcatggtgggtgcgcgcggggacctccgccgcgggggccgccgccgctggggcttctccagcccgggctatgcttcggagggcgggggtgtggtgtgagcggatggagagaggcgcgccttcgtcgt

SEQ ID NO: 5665 - DNA, 2119 bp, Homo sapiens
  source 1..2119: mol_type = unassigned DNA
cgcgggaggcagacagcgtccccgtccttgcaaccatctcgcccgcccgactgggaagacagtgacaaagttcgggcgcagaaaaggcagggtcagggcaaccgccgagtggcagcggcagggactagactgtgtttgaccttggcaaaccccactctttctgggccggaggcatgtccacagaagggtggccagcaaggctggaagagccgaagtcctttcccaccacccatataccaccctcgggtccgcagggttgggaggcgagcccagcacgcgctctaggtgcgcaggggaagagcccagcgctgcgcgcagagccggccttggagcttgccctgggggtctgctctcctcgcccactttcagtccctctgtggggatgggtgcggcaaaagaccggcggacccctctggccgccgtctggccgctcatcagctccctgaccttggccaaacctttctctctccacacctgtctcccctctccacacttcacgccaggggcgcttcgtggattgtaactctgaagagagccctggccggagggtgccagccccgactgcgtccccaactcgtaggagtgaccttgaacacacccccactcggagcctcagtgtccccacccgccgcataggaaaaagcgcgcccgactccgggcattcccagcatcgtcccagcaagtgtgtccgagaccagatgaggggtgcgcggctgcacttaccgtcctccagagacgtgggcgcttggcggggaccaaggtggctgtgaccagcaagtgcgacgcagccaccacgagcccaaagcctatggccagcaggctgcgcacgggcagcaaggcataggacacgaaggtgaccaaaaggagctgccaaaccccttgttcggcggtcgctggccccccagcggccccggcggaaccccgggcggggccgcccagcgcgaaaggacagcagagcagcgcgaaggtgaggctgaagagcagcgccagctggccgacctgctgcagctggggcacctgcagggaccggacgttggttaccacgagcagcgccaggaagaggacgcagtgcaccgggtgtgagcccttggccaggccgggcgcgggccccggcgcgcccagcagctcggccagcgccagcgcgcccgccagcaggctgagaacggccagcgccttcagcgtggccgcctgctccagccgcagcgtgtagccgcggaacagcgcctccagctctgggcaagcgaactcctcgtcgcacgcccggagcccgcgccggcggcttgtcccggccgcccgctcggcgcccccgggctcgcccgcgccgcctccgccgccgcctccgccgcgcggcgcccccgccatctcagcgccatgcagcggccgcggccgcgggcgcgcccctcgccggcccggggcgccggggcgcgggcggcggcgccggggcgggcgggcggcgggcggcgaggcgccggggcgcggggcgcggggcgggcggagttggggcgccggctgccccgcgcgcgcgcccggagcgcgtcccctcccgcccgccgcgcctgcgcactggagcccgcccgcgccccgaccgtggtcctcggcggcgaccgcgctgcgacagccgagccccgggagccgcgaacctgggcgcgcacagcccgcgccccaactccgcgtcctgcgttcccgcccgccggaggagccgcgtgacctcgagtaccttccttgtcccctccgagcctcagtttccccaccgtgcacagtggaacccaccctcttggcgtcacctggggagtcgaaaatactgaaatcctgcgaaattccctgttgcggggcagttaatcttggaaaatatgtgccttcccccactcaataaaaccaggccactagatttgagaggggcccgcgtctgactgcgaacccagggccctcgcccctacgagacggagaatcgacgtccaagaatccccggggtcaggaggaaggtggaggcctggggcgtacgtcccttccatgcgcatgagggaccccccgcccctcggcaattcttccctaagctctagggtcgcggagaccctgtgggcgggtgcgggctgcgggagctgtgctggggaggcggcgg

SEQ ID NO: 5666 - DNA, 562 bp, Homo sapiens
  source 1..562: mol_type = unassigned DNA
cgggccgccaggagggggagggggacgcgcgccgccgggcccgccaccctgcacccggggccgctggtcggtcggggcaccctcacgctcgccccgctggcgagactggagggactcgggacatcgtaaagcactttccccagtgtctgggagcgcccgctgtacgctcagcttcacgtccctggaactggggccccttggctcccgggttcaggctccggccccaggatgcgagtgcccacccgagggggtgggaaaagttgatcctccgcaagggaggggaaggtgcaattcattttcccagacaaccaatggaatacctctcgtctctcttccctcccacctgctcacggcagaagttaggatggcgccttccatgttggcctgggtgcacacacaagtgcgtgcggaagggtggctgcaggcggaggtgacagcgaagcaatcccgcagcccgctcgacggctctttgcgtctcagacctctccctggcgtgtaagacaccgtgtgtctccgtaaaacgggaatgccacatctgacagcgcaccccttcgccctacgg

SEQ ID NO: 5667 - DNA, 1404 bp, Homo sapiens
  source 1..1404: mol_type = unassigned DNA
cgcctgtcctagcgcggctctcgggggaggcagcagcgccccctgcctcccggcctggcccctgcggccgcagcttcccggctctgccagggctgccggcggctccgcttgctcagccagggctgcggctcagaggaacgcgcgccggtgccccgggttgccgcgccgctggacctcagcctgcatcccgttcccctctccctgaaaaggcaccaggaaaagagagagggagagaagagttcacagcaggtaagtctggtttgggtcacctgctactccagtgggagggtgtgctggagaccgcggtgctaagcggggatagccgggatttgggggtggctgtgggtccgaagtggaggacgagcatggtttgggagataaggaaccgtcctgagacagagaaggctcccgggagcggacagagagtgggcgaaatcggtgcgcagtaatcgcggcgccagcttcagcgcggcccctggggcgcagtcccaccccgcctcagcagctgcggagccttctgacgagcctccgcctggcagcactgcacaaagttttcctcctgagacgcgtccaggaactttgctctctccctggcttcctggttcccccaccacccctcctggtctgggcagcagagagcgtctatgaatgtgtccccggcttccgcaggctgcaggttcatttggagacgctttagtcgggaacatccggggagtacttgaccaaagggcatctgcgccctcgctcgctcctttccttgttggtctgggagaagggaaaggggcaaggaagaaggaagggaagcgtggtggtttttgttgtagcgttttggaagaggaatgggcgacgcctttttcttcgccggggaatcgcgacgttccgtctgatggaagtgtgcatccttttagatttagagggaaagttggagtcaaacagcagccacaaagctggctgtctgaaatgtggttaaggcaaaacactcgggggatctctttgtagtagtgggcttggctcgctttggaaaggccggatttgactcgtgctgggcatttaaccaggagtgcggtccccagggtgtttcctcccggcttctgcccaacgagcctggagttaatgcgttaatgggctaccctggtagcgcacgggccgttttcggcactgtttctccttctctgatgactcgagttcaacctcctgggctgagttgctttgcctccgtcacagtgcaaggagggaagttgacaggaggaggagacgccgcgctgtggcagggagctttgggatccaggggactggaagagagccgcgcgccagcagctggggccgctggtgtccgggattccgagttatggggacaggagttaaatagccgaactttcagcgatttcgcctcgagcgaagcgg

SEQ ID NO: 5668 - DNA, 819 bp, Homo sapiens
  source 1..819: mol_type = unassigned DNA
cgcgggggcggcggggtgacagtccccgtgcatgaatcagccacccctcaggctccgccccggcgggggtcggccggacgctcgccccgcataaagcgggcacccgggccgcctggagcagaaagccgcgcacctcctcccgccaggcgctttctcggacgccttgcccagcgggccgcccgaccccctgcaccatggaccccgctcgccccctggggctgtcgattctgctgcttttcctgacggaggctgcactgggcgatgctgctcaggagccaacaggtatctggccgctccaggagcttctctccccaaccggcggagagggcgcagcgggccatggggccccgtgtaggcgccctccaagcctcgctttctccaggtccctgccgcgcgctccgctggcaggggggactcgctcccaagtttgcactttctctgcagaggcccctccgctcggaaggggacagaactccccgggatgttctttcctcctaggagctacgcctgaccactttccctctcttttgctctccttctgccccttcttcaggaaataacgcggagatctgtctcctgcccctagactacggaccctgccgggccctacttctccgttactactacgacaggtacacgcagagctgccgccagttcctgtacgggggctgcgagggcaacgccaacaatttctacacctgggaggcttgcgacgatgcttgctggaggatagaaagtaagtgccctgcgcgcacccaggactctcgcgctccttgcgccggcggctggtagcagcttcgccagtttcccacgtctcgc

SEQ ID NO: 5669 - DNA, 1128 bp, Homo sapiens
  source 1..1128: mol_type = unassigned DNA
cgcgagggcccctagcggttcgcggcctcgggcggattcccagaacgagtgcgggccgcccggactggcagactgcgagccccgaggggcgcgggacgcagccggctcagacaaagaaaccggcgccagcggccgtccctgccgcccctctccttccctcacgcatcctcccaggaaaaacagggcacactgacggccaaaggggctggccttccccttcagacagctggacgggaggtgccctctgcggggctttgacgtccctcgcagaagagtcgcgggctcagcggtcctcgacagcgtccccgtcccgctccccggcgggcgcccctccctgtcctcccgggtgcgaaccgggcgctggccggggactccggggacgcgtgcgcccctcgccgcgcgaggtgccgccgagccagcccgagagggcggggggcgggcggggcggcgcgcgggggcgggggagcggccgggacacgtgtggcggcggcgggggggacgcggcgcccggggctttaagaaggtgtggagcggggcgggcgctttcccaggcctggccgaggggcgtcgcgcagaggcggcggcggcgcacggaggcggcagacgacgcgctctcggcgcccgcagccccggtcccgcgctcccgcggcccaaagtaactttgggagccgccgtctcccgcggaacttctcggcgggggcccgctcccaggcccgctcccgagcccgttccgctcccgtccgccttcttctcgccttctctccgcgtggctcctccgtcccggcgtctccaaaactgaatgagcgagcggcgcgtagggcgcgcggcggcggcggcggcggcggcggcatggagcgcagtggctgggcccggcagactttcctcctagcgctgttgctgggggcgacgctgagggcgcgcgcggcggctggctattacccccgcttttcgcccttctttttcctgtgcacccaccacggggagctggaaggggatggggagcagggcgaggtgctcatttccctgcatattgcgggcaaccccacctactacgttccgggacaagaataccatggtaggtaccgcagcacctccgcgctcgccgccgccgggtgcgcccgccagcgc

SEQ ID NO: 5670 - DNA, 1128 bp, Homo sapiens; identical to SEQ ID NO: 5669
  source 1..1128: mol_type = unassigned DNA

SEQ ID NO: 5671 - DNA, 1128 bp, Homo sapiens; identical to SEQ ID NO: 5669
  source 1..1128: mol_type = unassigned DNA

SEQ ID NO: 5672 - DNA, 1921 bp, Homo sapiens
  source 1..1921: mol_type = unassigned DNA
cgggcgctgccccctgcggccccctccgccgaggcctgtgcgtggcggggttcccaggagcggcagtccgtgcggcctgggggcggccccctccccgcatcgcagcggggcgtgcaaagcgtctgcggctgtagtgtgggcgctcacttcacgtgctcggcggcgtgcgaggagcagtaatacttcttgtgggcgatgaaggtggacaggctgctgaacttgatgttgcaaagacggcagtaccggtggttgccgttgggcagcggcgccggcgtgcccttgctgggagtctggacgcccttgtccgagtaggaggggggcgccggcgggggcggcacggcctcgggcgcggcggccggggacgggggcgggccgggcggcggctcctggggctccgggccgaggccgtcccgggggccacgggacccgggctgcggggaggcggcgggggcgggagcgggcgaggggccgcggtcggccggcgtccgggcctcgacccccgggccggccaggggcgcgccgagcagcaggccgtgcgccaggcggaaatgctccagcaggtccccgcgcaccgggccgttcggggggcagtaggggcaggcggcggcgggcaggccgagcgcgccgggcggtggcgcagcggggcacgagtacttcttgtgcgccaggtaggcctcgaggctgtggaagctcacgcggcaggccgtgcactcgtggtagtcggccagcgccggtgccggggctccggggagcgggcgccgcggcttcttgctcaggtcgatggggccgtcggccgcggggccgggcgagcgcgcaggggcgaggccggggccgcttccgcttccgcttccgggccgcggcgactcgggcgcgggggcgtggccgggcggcggggggggcggggcgccggccgcgtgcagctcgtagagcttgcggcgtctgcgcgtgcgcacaggcgcggcgggagagggggccgggggcgcggccggcccagggggtcccgggggcgcggccggtcggcgcggcggcgggtcgtggcgcgaggcgcagtagtaccgcttgtgcacggtgtaggtctcgtggcggctgaagcggatgttgcaggcctcgcacagcgtgcggctggggtcgtcctccgcgtcgtccacggagctacccgggctctggctgccctcgctgccccggccgcccgcgccgtcctcgggcgtggccgcgcccccagccccctcctcgcgcgctccggggcccggggacgagcgcggcgcgtcgggttcggcgggctggccggggggcgcgcgggccgggccggggggcgccttgggcctgcgcgcggcaggcgcgtcctcgggcgcacggcggcctgaacagtagaggcgcttgtgcacgtagtagttgttgacgttgctgaaggtgatctcgcactcgaagcacgtagcgcccttgggggccccggggaagagcccggtctgcgcgccgccggcgcccgcgcccgcgccctgctgcagccggctgtgcaccagctcggacatcttggccaggatctccgaggcggggggcgccgcgtcgggcccgaacacgtactgcggaaggaacagggccccggccaggcccagctcgccgggcaccgggctggagcccggcgtggggctggacagctcggccttgaccctggccggggcggggctgcgcggcgacggcgtccgcgacggggcctggggcccaggctctccggggcccaggatgggggccgcctccggctcctccaccgcctccaccttgatgctcctgggggccgccgggggctcgctgctgcctccattctgggccagaggctccgctctggcctctccgttggtggcctcggccagggcctttctgtccagtcctggcgatggggtgggcgccaggcccaggtccgcgg

SEQ ID NO: 5673 - DNA, 2872 bp, Homo sapiens
  source 1..2872: mol_type = unassigned DNA
cgggtgtcagggcgcgttgcggcctcgcgggtgggcagaggcgcgcagaaaacgcgcgggtggcgcgcgcggccacccagtgggtcccgcccgcgccgccggcgccgccgccgccgccgcacgtgcgccgccgcgagcgcgaagggcgttcggacccgcgctctgcccgcccgcctgcccgccggggccactgtggacttccaggtaacagccaagtgagaagccctccctatcaccgaaaggtgtctgcgctcctcccacgtcccctcaccaagtgccgcgaggtgcgatttcaccccaaacccacccacaaacagccaggcgacctctctaaagcggaataaaagtaaaaccaggccagacaccgggggaagccggtcgtgctaacgcgtggacagggaaaggaacgcgatcaaggcagcagtcatccctgtgcacggttatcccgaagcgtcagtagggcccaggagtttcttgactccagaaacaggagtgtcccctttccatctctctccttcctggagaagtacttctgagatgaacgctgaagtgcccaacttagacgcgagaagcgtgcacttgcccaactgagtaaataaaggtcagcagttggatcaataaagtgtgtgcttctaaccgccagatgtttttactgttgtttctcctcccgaggttgggggtgggggtgcggggaggaaggggaaaagacaacaaacaattaaaaagaagagagtaaacaaacacacatctggtgtttcgacacacattctcctccagccgaggtctctccggacgaagcaacattttgcattatccaaactaaaaatcatccgtgagccaacagcaaatctcccctctccacccctttttcccccatcacaaagcaaaatgaaagagaacaacaagtggtgatgctgggtccggaatgcgaccccaacgccgagcccaaatttgacacatgtcacactcgccccggcaagcagggcgctgcctttggggcgaaactttgtcgccaccgcgggaggagcgcggagcagagtaaagtcgcagctcggcccagcgtggaggtggctgggacagggtggggtgcggaggtgtagcgcgccagagtgagggccaagaaacttaccgcgaccggggacgccgtgggcagcgtcccgggaggtggcacccgcggcggcgaggcagaagcccccaaacaacacacccacgcgcgagtccgggcagctgctgccgcgagtggggggcgcgcccggggagggggggggccgaggaagccgcagccagcggacgcggccgccgcataaataaccggggcgggcgttcgcgggcgggctgcgggtggcgcggggctagagctagggcgaagcggcggccgcggagctgcacgcgccggcgtgtctcgcgctttctcggaggctcgcgctgtctcgcgcagccgctccccccacccggatctgtgtgtgtgtgtgtgtgtgtgtgtgtgtctgtgtgtctgtgtgtgtgaatgtgcgctggcaggcgcgcgcacccggccgcgcgcgcgtgttgttggcaatgcgaactgtacacacactgctcgcggggctgcctctcctcggaggggcggggtgggggacaggacgccgcagaggattctgaagtaccgccggaccacttgtttgttttgttttactttgcgttgttattgtcgttgttgttgttgataggtttggaaccagctggttaggatgcctttctcccccgtccacctatctccccccgttccctaacttctttaaggagggggaaacgcggggaagaatattgttcggatttgcagcggagcctcctggctgacgtcaggtccacctgctatgtaaacaacccgctggagaacttgtttgtgctacgccagaccttcccccacccccacccttctccccacctcctgctccgccttctccagctcgccccagacggcgagtcagggaagggggtggggagggaggcgagaacaaaaccgtatgctgtattggcaaagccgagttgtgtctgctgcttcttggcagtccccaaagtacgtcctctcagcagacggagctgctggcaaatgaaacaggggattccacttgaagtgcagaaagcctcgaagggatccaaagccctcggtggcagggagttaaaagtacatggtagtcggaaagggagacccgagcgtgcgttaaagcgctgattggcctttcttttcacggtgtgcgcctctgcggcctggggtggagagaggccgagtgtctttctcttcattgttgccctggttcctgtctcacttgggccaaggagttctcgggcttcctcgtggtcgcgcagcccaggtcaccggggcgcggcttggaaggaaggggccgccaagctgggacttagagagtctgaggttttcgggaagggtcctatcagtgactgaggggagcaaaagtaaccggaaagaaaggaaagaagaaacggtcagagcctgctccgcgcgcacttcaaagccgaggcgcccgcgtgggggatgcacgggcccagccgccagccctgggtcccggcttctatccaccgggtgtgacccggctgggcggcctgcttgggacccagggcggtgacaggggaaaggccgagggaggagagagcgggccccggaggggacgcacgaccggaatcttggcgaggggcttcctccggagccccagcccagaggggggccagcgctccctccccgccgtctccctccggtccctcccctgcccgcgggccgggcgactcttcgccggccgccttttccgcgcgccgcagactgagcccgctgctttgctcgcaagtcagtcgcaaagcgtggcgttccgagaggcgc

SEQ ID NO: 5674 - DNA, 2906 bp, Homo sapiens
  source 1..2906: mol_type = unassigned DNA
cgcgccccgctctccctggctcgcccgggcctagggcgccgcctgcagttgcgcgcggccgcctctagatggaactttctcaccaacgcaaggcccggccggagcagctacccgggagctgggcggcgaggggctactttctctcattccggcgggtgcaggatcggggggcctgggcagtaactagtggggaggagcgctggactgtgcacgtcgagcccggcaggtttccgcatgcggcatgcgaagggaatcccgaggtttccctgcagaacccgagcacggctcccccggagtttcctgccccgcgtctgcggctccttgaatcatctcaataaaatgaccgtcccggtagccacccatgccccttcctgcgcagtgcccgcagcggaccgcgctgtgtggtacctcgagccctggggactctgttgcacgcgtccctcagaccctcgggggcggggagtggggagacaatcgccagagccgcggggcgggacaaatggcggaaccgccgcgcggcgccaggcaaactttgcaagggaaccgcgcggcttgccggctctactttaagcattcccgaaaagaaagcatgtggcgggacacttgtcatctaccatgtgttattctcggtgacgctttctggagctgtgttcaccggggacccgggctcgcgggtgctgcccgctgtgctcgggcgggcgtcgcgcctccccgcgccggtcccgggctcgccaggcagccggagccgctgggctcctccacaaccatattccttcttctaccgctcccgcttcttcccaccctctcactctgtagttgggtcctcccctttttcttgggggcggggaaggggggatgatttttaaaaatcagaactattgacatttctggtctcctcgtcgcttcaggctgaagagcggagggggatccgcgggccgagggtccccctccctgcccgcgccagggccgctgggtgacaccgaaatccagaggctcccgcccctcgggggttcctcctcccgcttcccgaggtgactggttggcgcgaagcgattggcgatcccgggcgcgatcctggccgcggctccccgcgccgcgccgggtgaatggccgcgggcggaggatcgggaggcgccgggcgcagaccaatcgcggccgccggtgggagtatttgttattcacatggaagagacttggcgcctgctaggccagctcagccccctcagcccagagatcagccacaagtgcggccgctgtgctcgcctcacgcggcggcggcggcggcggcggcggcgctgacatggagctgcgggcccccggcgggcttcctcaccgcgccctctgcggggagcagggtaagactcgccgcccggcagcagaaagcggctccgaggaaagcaagtgccgaaccacgggacaaaaagcccctggcccccaaacttccccaaaacgccctgcttgttggaaaaggagaatccccccgttttattcccctttccgttttcttctctaaaacctttcagcggacagccaggtgcaccattccttctcatatcactctagtgatttgtttttcctgagcacaagtagatggccctgcatgtccgtagtctgtgagagaaatagcgggcggaggtgacgggaatggggggagaaggagagtgggcaccagggggcgaggggctggccgggcattggagcttgattgggtgtctgttgattttacgttgcaaagaacaaggcagccacccctcttgtctgcccatgattacattacagtaaagaggttcagaaaagagggagactttacccggaactcccaaggcttggagatgtgatcccccaaaagtttagtcggcgaatgggagactgaagggtgacgggaagggggcaggcgcgctcggcgctctgactgggcgtgcggcggcaggattttaaagcgctctgcctcggatcgtctgccctgggtgacctcccggacctgccctggtggaatccggacttgccccgccgagatgacgaggtaccttcgtttcgcgaacctaacaggagggatttctgaagttagcggcttccgggatgagtcggggtaacccccgccctctgagcgtgggctggatggatgtctaaccaggatctagggaggatgggggtcgcgggggaagccgggcgcttcggggtcctcgacacccacatccccgcacggcgcacgctctgcctcgagtttgcgttctccgagttagcacggcgagcttgggatttccgtgcccctcttttgtggctttcgagaaacgccggagttccgtgtcctgctgggggttggggggatggagaaaaggtctcggggatcttgtttaaaaagcaaaggcaaacgcaccccaacagctcctcggtagctcccgcggctggcgcggccccagtttcgggcggccccgcgcggggcgtgggcgcgggcgctcgggcggccaggtgcggcgggggcggaggctgcatccccagcgcgccggaatgccccggggcgcgggaaaggcaaaagcagcctggcgctctccccacggccccagtctctatctacccagaacccggcttcaacagcccaaggaactgagaagaaaaaggaacctgcgctgggaaacaggggctcctggcgggctgagtggtcgctgttatggtagagatagaaacggagaggtagagatggaccgctcagccatgccaagcgcgaagcccatccgcccagccagaaagctcggatatcccttgagcttcgtacagttggtgaaaaaataacagaatcaccaaaaaagaaaaaaaaattcccttcgtctgacacgcgctcccttggtgcaaatgaaatgcggagggacacgcgagtcacccagttgcgcaaaaccgcacccccgcgg

SEQ ID NO: 5675 - DNA, 2906 bp, Homo sapiens; identical to SEQ ID NO: 5674
  source 1..2906: mol_type = unassigned DNA

SEQ ID NO: 5676 - DNA, 1696 bp, Homo sapiens
  source 1..1696: mol_type = unassigned DNA
cgaaggaggggctggcggcagtgcagcagcgaagcccgggctctcggtcctgggagcctcgtggccccggccgccgtcccccgagtccccaccacgcagttccgaactccgaacgcgagtccgcgccccgtcagcagtcagcgggggtgaggatgacgcgggccgggcgagaggcaggccaaatgcagcagccccgccgcgggccgccgggcccctgagccccgctcttcagagccagggggccccgggtgcgggccggagggcgggggccggcgcgggctctcccgccgcagccccgcgccgctccagcctatcagcggccacccaactgctccctccgaccggcccaaaatagctgcgaacgcctgcgacttgcgcgcggcccctcacttgacgctcactccggctcgctcgcccgctcgccctggccccgctccgctcgtctagagggggcggggaggaagcggcccggggaggggggaggggggagggggagagaggaagagaggaggaaggaaggaggaaagaggaagacgggcggccggaggcgcggggctgcgcggcgccggccggcgcggcgctggaaggcgccggcgttaaccccgcgaggcaggcgacggagggggagcggcgctaatacataagagcactgcatcacgctaatcttctcccagaacagtatgcgtcagcagtacattcacgttctgactgaaggacaaaaggatgagagagcagtctgcgtggctgccgcctgcaacaccgcgagcccggcgcgaggaggagacggtgggcgccgcgcgcaggggccccgctgctgctgctgccgccgctagccagcggggactatgttcctgggctccggagcgtttcccgcagccgcgacccccgctgctcacgccgctgcagcagtccgctggcggcgcggccactgagggcgccgggagccgaagccgcgaactcgctccctccgcacaaagccggagccggcggcgcgccgggggccgggcagcggcgggcggcgacgggcggttgcgcgccgccgggggctgcggccgccgccgccgccggacccgcgcccgcccccggactctctgaaggggcctgcggtgcgggcgcgaccgcgggcgccgcgcgctcctccggccggcggaccgggtccgagcgcagccgccacgccgctggtcctcgggggccggacggagcgccgccccgcgtgccggcagccggcggactggagaactgaccccccgtttttgtctcttccaccctccgagaagaggcgaggagaaagggggtgtgtgtctggggagggcgaaggcgccgcgaacacctcctcttaactctcgccgctccgcgagctcacgaccgcaatcagctgccgccggcccggagcggccgacgccgggagagggagcgcagcatccagcgagtgcggcctgggcggcttcggggcgcccccgcactccctccggcggcggcccgcagagcgggccggggccgccggagcgcactttggcgatgaagcgccttcccccgcggctggagcgagccggtgccagggtccaaggacaaagccgggaagcgctggtggcgccgctccttgggcggaggggggggcatgcacctgcatagcccgccgggccttggctctcccaggcgcgcctcaactccgcggcttcgccggctccggctccgg

SEQ ID NO: 5677 - DNA, 2054 bp, Homo sapiens
  source 1..2054: mol_type = unassigned DNA
cgacggccagcgcccagagctgcaaattccgaggcggctgagcgcctccctctgagcgcgcgccgtgcgctccggtcacccatgtatgcccctctctccgccccacatcgccaccgccagggtagctccgtgcgggccgaggggacccaggggggtgtcggcaaacgttggtgcggaggagagccggcaagccgggcggcggcgggtgggagcatgtagggaggcgccccctgccccctctgccggccgctctccctcgctctagatgtcagccgcgagctccgagccagcgagagcgagccagagagggagcggcggcgggcggcgggcggcagggaggagaggaggcgaggcgagggagggaggaagggaagcagggagggcgggagggaggagaggaggacccagagagcgccaggcagctggagtttttgcagcgcttggccgggcttcaatgcacagcagcagcgagccgcggcggcagcaggcagcccgggagctccggcggcggccgagccagcggcggccccgctccctgccccctgcaaactttgcgagcagcccgcccggggggccgggggcgcgcccgggaggcccggctcggcccgcggccgagctctccgccgccgcagcgccagccgccgcagccaccaccgccgcagccccgcgcctccccggggagcagccggcggctcccgcggccccccagccccggccccagggcactgcccggcgagtgtctcggcaagggtgggggctgccgcggcgcggccggccgcgggctgccggggggcggccgccgctacccagagaggcgcgcagaggcgccgagagcgctccccggcgggtcccccgcgcactcgccgcgcccgggcagcggcccgaccgggcgagcatgggcggcgcggagtgacgccgctgtgcccgcttggcatcaaggacattcagcccgcgggggtggggacgaaggggggcagcccggcgtcgccaccgcagcccccgagagccgccgccgctgctcgggctccggggctgggtggaggaaaggggtgttcggaatcgatccccattttccgacctttttgttggacattacgcccaccttggacgccgcaagagaagctgtcaagccccgcaggctctgattcggcgccctccgcgttcctcggctgctcccggcttccctgtgcctcggtggagtatttgcgttcggggctggggctggaggaggcagccacacgcgcgcacacgcacacgttcagaggagggcgagaggcagcggcataggctccatctgcagtgtcaatgcggcgctcccgctgaaggagggaaacgcggcgcgtccaggtaaggagccggcccgccggggagtggggccgggcgggcggcgagggcagcaaggtcggacagacctgggccgacccgggagtcctcagtgtcccggagccagcccgcggcacacgcacacgcacacacgcaggcacacacacagatccacaccggcacacacggcgctcgcgcacctgcccacgtcccacctggacgcccgcggaggtgcagcggccggagcagggatttcccgggtgtgttctcctctcacgctcctggactcagacttctctttcccgggactttcggggtgggattctgtgtattcccggctctgcctcccacccggggaggttgagggagcaatttttcagctcccagcccctttcgtccctagctgggctttaaaatgggagaagtcctgagaggtttccggagacctacccagtgtcatcgcggccccgtggcctttggacaccctgggatttcaacgggagacagacccacagatattcggacgcatatttggagagagtggtggcccagcgcccggggaggaggccagataggcggttggggctgcagttctgtagggcggcgcatatgaaacagacactgcgtttccccagtaagaggcagcacaaacgcctttctgaagcgtggcactgcttccccgggaatgcgccgagatttcaggcagaaagcggcttaaagcatcgccgcgt

SEQ ID NO: 5678 - DNA, 1258 bp, Homo sapiens
  source 1..1258: mol_type = unassigned DNA
cgaacaacgcagcggcgccaggcgccagggtcctcacttctgcctcctggatttcctccgcctttctgcttcaccgagggccctgtgatccgattccatcgaattaaccgctgtttaccgagggtctgctgcgcctaaggaaggcaccgggcgacgagcaaggcggggacgcagtttggggacgcaggggtccgggccccagtccagagacaggaggtcggcgcttcgacttggcacccgccgacgaattcactccaaggttcccactggcggagctcctgctacctcccccctcccctaaatgcagctcccgctaccttcccgcgcccaggggctgctgcctgagcccagctctgctcactggagggcggcggtggagagggtgctggcccagcgtcggcagctgggctcaggaccaaggtgggcgcccgccggtcctggtccccccagcctcacggtgcaggacccagggcgcggccactcgagttccccggacgctctccttcctgatgctcgctgtccctgccctggcgtccccagcccggggtcgcagcctgtcctcctctctctccccctccgccgcagcccgtcgcctccgggcagagttcatgttcagcttgggctttcgctcgggatttaggaagaggccggcggggctggagggtgcgggccggcgcgggagggcgcgggaggcggggagcggcggcctctgattggccggggcgggggagtgagcggagtttcccacaatgccccggtgcggtgcagccgcggatggatgctgcgggaaggggctgccatttgctgcccctgccagcggcgcgcggacctgcccgcgctcctgcagccgccgccgccgccgccgccagcccgcccggcccctgcagcggcgccgcctgcgctccctccgcggccgccggagcgggcgccatgaaccccagctcctcggcgggagaggagaaaggggcgacgggcggcagcagcagcagcggaagcggcgccgggagctgctgcctgggcgccgagggcggcgcggacccgcggggcgcagggtcagccgcggcggcgggggccgctgccctggacgagcccgcggccgccggccagaaggagaaggacgaagcgctggaggagaagctgaggaacttaactttccggaagcaggtctcgtacaggtaggtgcggggagccggcagccgagacaggtgcgccgcggcgggagacccactcttctacccagcaaggggcgcttccgcgg

SEQ ID NO: 5679 - DNA, 628 bp, Homo sapiens
  source 1..628: mol_type = unassigned DNA
cgcggtggcccccggttccctcccaccccaccccacgaaccggcgtctggccgccctgaaatgaatgactccgccgcgtcccggcgccgcgctcccagcgctcccctccgggacagcggccaaggtgactctgaccgcctccgggtcgcgggtcgggcctgggcaggggtccctgggccaggagagggaggccgctccgcgcttaccctccaaggccgccttccagctggtgctgccctcgtagcccgacccggatcgccgcagcagcccctcggggccgcgggcctcagcctctgcgggcgaacgcggcctgggggcggcgggggcgggcgcggggcgcgcggcgaggggcggcggcggccgggcccgcgaggggggctcccgggccggctccatgcggggcgctccgccgcgccgcgcccgcgctcctgcaccggggtgcggggcccagcccgacgcgcactcggcgctccgcgcgccctgcgggccccccaggccggcctcgggtgggctaggaccgcggcgctggcaggccggggctgagcccggctccccgcgctggagcctctgcgccgggtgccgccgcggtgcgctcagcgcctgccccgccgagccgcagcctccacgc

SEQ ID NO: 5680 - DNA, 1075 bp, Homo sapiens
  source 1..1075: mol_type = unassigned DNA
cggaggctcgcccccgctaggggtcccgggggtgcgtgatcatgaaccccagagggctgggctttgatttgagtgccgatccgttaatgaggacgggaggataaggttgccgacgcagcggaaggtaggggggaagcgactcgaggacctgacgattatccccaggcaggggcttcccaagcaggcacggaaaccaacttcaccaaaccgcggagtggggactgggcccgggcggtgttcagcagggcaggggcagggccagctggcgcgcaggcatctgcagggtggagcagaataaccgtggggacccgtttctctggaggggcactgtccacttcccatatgagcctcaggatacccccgtggggcggagtctcggagacgccccaggtcacgctctcgccgccccatccctgcttgcggggggccgagcagggagggaggcccagcgcgcgctgtgtgtccgcagtgttcacgggcagcggggacgcttgcgcccgggccttcgacgcgcagtctggagagctgcggagggtgttccggggccacacattcatcatcaactgcatccaggtaggtccctctgcccttctcggggccgccgcccgtgggagggaaggtgccccgccccgatccatccacgcgggcagcggtgtcccccccgcctaccgcgtcaccggtgacgcccgcccctgcgcccgcaggtgcacggccaggtgctctacaccgcctcgcacgacggcgccctgcgcctctgggacgtgcgcgggctccgaggtgccccgcggccccctccgcccatgcgcagcctctcgcggctcttcagcaacaaggtgggctgcgccgccgcgcccctgcagccggcctgatcccgcggggcccctgcagacgccagcccagacacccagcggctcccagagcgccccgccctgctacccgcggtggtggcgcccgatggccggcgaggggcgaggagcgaggaagcccgggcgggaggagagcccgtcgcaggcgtctggtttttctttggtggccaggaggcgctgggagcgggagtgctcgccctggggaccgc

SEQ ID NO: 5681 - DNA, 5566 bp, Homo sapiens
  source 1..5566: mol_type = unassigned DNA
cgaatcagtcctgccgctggactcctggccgctgcccgggccggcgtcagcttcacacaatgtcgcgtgagtctttgtgcgtgtgcgcgggggaggttcgagatgttttcctcccggtaagttcccgcgccagcaccgccccccagctccgcgggcctccccgcggcgagccgggacgcgtggtccccgcgggctcacctgaagaaggccggtccgagtagcgcgtacagtagacccacgccggccagagcatgggctgcgcgcccaggttggcgccggcttgcgagctgtccgagtccgagctcaccgacaggtcgccgccgcccaagccgcgggccttgagcgacccgtccagggggccgccggggtcgccgcctttcttggcgccaccgtgcagcgagagcgtcttggagccgccttccccgtcacccggagagtcgctgccggcggctgggagcggcccgcccgcgccgggcgcacatggcgggttctgccggggctctcgggagcccgagcccaagagctgctccgagccgcccgcgccgccgcctccctccgcaccgctcgcgccgccttcgccgccggctccgccgccccttcctcctcccgcgcccgcacagcaggtccccgcgtcctttcgccggccgaactcgggccgcaggatgttgtcgatgaagaagttggtgatgcggtgcgggtgctggtggttgccgggcgcctgcaggaccgcgggcagcatcagagcccgccggcgcccggtgtccgcttcgcccgggctgctaccgccgccgccgcccgagccgccgccggggctggattccggctgccgctgtccctccaccgccgccgctgcttcgccaggcttggggtcattctcctccatgctgttcacagtaaatcccacactggttctccggggacgcccttccaaatcagccttcggccctcccgcggcgcacacggagacccccgcgcccccaccccgccgagtcttccgagggcgtgcgcggcggccgcggccagggctgaggtcctacaagtcgccggccgcgctcggcgcggagccacctttgaatccacgaactgggttagaaacaccacgagccgccccgctcgcccagacgatgagagattcaacagagccaagtcctcgacttcgccgcgcagccggggtctagacagtcgcagtggtccggcggggacgcgggccgcctcccgggctccccgctcctctccgcgtccggccgcctcgggctccggcgccgccgcctgggccgcccggggcgagagctgcgcgcatgcaggcagcgcgttccccggcgctcacgcccgcccgggccggctccggccgccgccgccgcccggccgtccccgcccgcacgccctagccggccctcgagggtgccgggcgcccgcggtcagcgcgcccgccaccgcccgcacgcacatggaggccccctcctcgcggccgccgccccgctgcgggccggggcgccccaccggcgtgcggccgcgcccccgccgagccccgcagagctccgcggcccgagtcgcatgggtgagagacgcgaggccagggcccggccgggccgggctgggccgcccgcgctccccggccgtccgccgccctcgccgcctcggcctccgcgcgggctcggaaatttccaggccactcggcgcaacctgagacactttcactctggatttttgttcttatttttaacagagccccctcgagtgacgtcgcaggccggtctcctggacacgtgcctcgggccaatggccgcggcgccgcgcgcccacgtgacgctccggccgccgctgggtgacaggagcagcccgccgcccctcctccccttaaagcggccgcgtcccccgctccgggtgcgggagcccaggaacccggagagacccccgaccgcgtctcctgcgctcgcccgcgctttccctgtcgcttcgcggttcaggggtgtgagtcacccggcgacagccccgccaggtcaccccggggcgcgtaggtggacacgcacaggaagatcgctatttttaagatttccatattgtttaccgtggggcgaaatcccacaattccttgcacaaaatgcataaataatattaaatgagctgccgagatacaaagggacttttgtggtccgctttccttgctgatggagaggaatagtgtcactcccatttgactcggtaacccggcagcttcctgtcttaaacgcagagctggcgcgcaggacactcctcctgcagacacttattgtaagtgtgcgtgtgtgtgcgtgtgcagggaggcgcgtgcatacggccgcattccacccggggacagcgaccctcatgaaacatgcttagcgatccgaaagagcgggggaatgcagtatgcggctccatttgcgaagggagaaatccaggagcctcggaggttctaaaggaatcctttttgccaaggagaggaggggtgactgttcagctaagacttcaaaaccaagtcgcccgcccccctctaacttctctactctgattgaggagctcccagaccggtcatctcgttttctttgttttaaaatcctttaaactaattttgccggagagcagggcccatttgaaacgagaattaggaatccaacggcaagggtgggagccccagttggtttctcccctcctctctcttcatcttttctagactttccttccagctgttgtcagaatgtccaactggaagttctgtttcctcttctcttccccctcctccctcgggctccttcccatttgctcttgtctacccaccaaacacccgttgttaccccaggctcgcctgtccatcatttaaaatgcatttttatggaaatgtgtgaattcctggaaacatccgatagggcagctctgggggtgcgggagcatttgcacgccatgagtaccctcagtgcgggggaggcggggaggccgcagcctggcacggacaccctagggctgattggccctgggcagctgcaccgtgctcagcaacccagacccccgcagaggcagccagcaggttgctgccaggccctgagtgaacttggggagtctggcaagcatctccgaggcagcgtggcctgccaggccacctggggcctgaaggttgcaccctggccttgcgaagctccttccccagtgtccatcccacgtgctgtccttcccctgcaggcttcagagtgctggctgggctgggatgagaaacgacagttcccacagctgctcccaggaaaattacccccccacccaggacgggaatggtgggggaggaggtgctgggctggcctcctggccactggacgtggctctggtcagagtgtgccctctgtccggtgtgtctagggcagggtggggaagcctcttctcgctggggctggattcctccactttttcttcattggaggagtccttaccaaatgttctggctaggcacacatctgccaggggtcctccccgagtctcaaaaaatcaaaccccacagtctacctgccccccgggaaaatagggctggtgagagtttgtgggaagtcttattgacgcttacttggttttttggggggagaattttctgcaactctggaaactctgatgatcaccagtcaggaaagggagggtccaacgactctgggtctcctgaacatgatattggggggaggaggggccctgagctctttggttcctgcaaaaccatcccaggttaatggctccacctgtcccatgaaagccaattaggcggcttcctgagaagtattttctgaattcttgggactctttgcctctgactgcctcagtataaatggccccaagacgctgggcttcagccctgtgctttcctgcgacccagaccccaattcgtggctgcaacagagactctgggaagcagagcgtcacctccagggcgcctggcgggccggtgggcagagacctgccctcgcagggtctgcgggctgggccctggggttggctggaggaagaggaattcgtgggtcgctctcctggaaaggaggaaggtgagaggtggagggaggaataggagaaagagaaataaatgaagagagagataactagagggtaccgggccccccagagtggacccaaacacgaaacaactctgggaaagcggtaagaggggtcaccgttcaaagggccggggaagctgggatggggctgcagaaagttgagctgcccaggggctgggcggtgctgagttctatacacacggaactccgcaaggtgtttcaggaagcttcgagaagcgcgcatgaggaccggcctcggccgcctgccccagctgggacggcgcctcgcgctttctggggatgcggggcagtggcgtgtctctcctctgcgatgccagccccggctgccgcgctcccgcgagcccagagcctccgctttctcccccgaacgaccgccgccctcaaggtcggcctttctgtgcggatcagacgagccctctccggacattagtttctcccgggatggaaagtggggcactgacccgggaaccccgttttccctctagcttcacccaggaatcggagagcgcccgcgaccacccgcttgcggaggacggtcctccatatttctcaggctcgctgcacaaagaggggcctcggagagggcgagcaggaaagcagcttccagacgccgtgcgcttcaggacacggacgctagttttgcaaacaaaacctcagtgaagcgccccggagacaccgggcgcccggatgccgagccaggctcccgtttttatctgaaaacgaggccagagaagggtgacttttccggcccctctgcgtcccctccactcgcctcgcttctctagcttgacgtggtgacacttggaaaaatggactcaatgaaagccgttcgctcgcggcggtctcgttactcgcggggcagagacgcccaacaatccctgagagcgagatctccacctcagccaaagcaggcctggccagccctgcgccctcggctgggagccgagccccgcagccaagccccaggcgccgggcggggaattggggccgataggagagcaacaccttccccggggcgagcagagagccaccgtcggctcctggggctgacgttccgacccggcctgtagacaaaggccgaaacgaaggggcgcggggagcaggggtggggcgggcggggccaacgggcggacattgcgtgtctgcgctctcctctgggcgaaggaggaccggcctacaggcccaccgggcgagctcggggacggggtctgggaggctgggtctagggtctgagacttcttcagaataacccccggaaggagggggttaaatgcggcagcggcgggcctgaaaagggccaggagcgtcgtaggaactggggtgcacaggccctcgcgtgcccagcgcttcgcctttccccgccccaggcctgccaggggcgcgcgtggcgcgggcagagcctggtgggtgggttggcgcggacagaagctctgccggggagcggggaggggggggcagtcgcattgcacgtcctggttctgccccgatcgctggagaagcgc

SEQ ID NO: 5682 - DNA, 5566 bp, Homo sapiens; identical to SEQ ID NO: 5681
  source 1..5566: mol_type = unassigned DNA

SEQ ID NO: 5683 - DNA, 1164 bp, Homo sapiens
  source 1..1164: mol_type = unassigned DNA
cgaacgcctggaccccagcgagcgggcggttccctggcggcggtgaccaccgttgtgctcgctgcctccacgcggcgcccgtcaaccccacgtgctcgcagccgcgcggcggggccgggcgcccggagctgacctcagcccccaggacagaaagggtggccaaacgcagacctggcaaccccccgagtcggcgaccacagattgctggtggctgcgccacggtttcgggagggtcagcccctcgctgggttctcagggcactaagaaaagaggggcatgcgagcctggaagctggagagagtccggggctccccagagcgggtgggacgccgcgtccccaggactccgcgccacgcgtactttctccaccccgacacccactgccactcccacagcggagcgaggggccccgccgagggcgagcgtaccccgtgcggctgagatgcccggaacgcctccccgcgccccggcttccccagaaggggccacagtcggcccgcgagtccccgggcgggggctgagccgcagtgccaaccaaggcgaggtcaccttggcccgcgcgcctttcattccagggcccctccggcagagaggtgactgcaggtcaccgccagccgggcccttactccccgcctccgccgtcccggcccccacaccccggaacctccccggcggagcctgcgagcccgggaacgcggtcccagccagagtggaagggatagcgcgggaacccggcagagagaaaaagcgggaactgggcgccgccgcttcacgatcgggaggagattccctcccggcccctcctggatcccactccggggaccgtttcggggctagagcccaggctgggagagtccctgggcgcatccaccgccccttccaacttccttcttctcatcctcagttcgggtggcagtggccacccgccgggtctgcaggtggaggggagtttgcgcgcaaaacttacggtcggcggcggccacccctccgcgggaggcggtcagactctggagccacacggccagagtcagcacgagcagggctttgctctccatctcggggcgcgtccctctggaggagctgcaaggcgcggaccgactgatgagccggctgagccggaggctggagagggctggagccgcggtttggcgctgagcaagtcgc

SEQ ID NO: 5684 - DNA, 1495 bp, Homo sapiens
  source 1..1495: mol_type = unassigned DNA
cggcgcgcactctacatcgcttgccctgtgccccaaaacgccgaagctaacttcccacgcggcctcttgctcgaccacccacttctgcgctgccaggcacaccgaggggaccggctctccctccaggcggcccattccagcgtttcccgctagagggcacacggcccccgtgcaaagcgcttatggcgcggggcacgcgcgcacgcagcctcgactcctatagcccaggtcccactcccgggctgggctcagccgctaaggcgctggggaggggccgtgccagggagcgaagcgctcccgggactctgggagggtgcggccgggactgctgtcccttgccctgagctctgggcgtaggcgcccggtaggactcggcgcccaggtgagcggcggcccccaggaggggaagcaccgcgcgactcaacgggcgctcagagcgcagggcgaagaggacgggcgagggagagggggagggagaggccacggcatccgaggaggaggaggagtaggaggagcaggaggaggatcgtggggcccgggccgcgctgcgcacccacctgggctctggctgcccgccgcggactccggcttcttgccggagcctcgctccttcttcttgcccttccctttgcctctgccttctttgcgctcggacatctcgccggagacggagcgctctacgcggacggctctcggcgcaggcgagtttggtccaagggctcggatcgggtttgggaaaagtttgtccctcgagggggagagcgagcggccgcgctgaggcgctcgcgctgcgcgggggcgtctcccgttgcctgcagggagcgcggcgcggacgcggcgggcggtccggccacctggaacgggcgctcgccctggctctcggggctgctcctgtcgccccgggaagtcgtcgatgggtcccaccgctggcggctcgcgtcctggcctctgcccggcgccctcgcaacccgatcggggagaggttatcaccgtcctgctcacgctcccatcgtccggcagccgccgccgctcagctcctggcctccgcgcgagcccggagttccaacaagtttcggggaactcctcgccggctctttttcaattgccccgcagccacccacctcccgcccgcaggttggaggcaggcgcctccttcgcaccctcccctggcctcgccccctccctcttccccaccacacccccaccccgaggcgcggacacgccaccgggaggagcctgggctcggcgctcccgggcgcagccccttttcctcccgcgctggccgggcggggggtggcggcgcggctgccgggaacccccgacaggggtcgctggacgctgcgcggagaccgaggccagcgccccggagacccgggaacccaggcggagacccgaggctctcgctgcccgctcccctccgcagccaggcagcgcctgggagggctgctccgtcccattccacgcggaaaaggacggcgcagagaaaagtttgcga

SEQ ID NO: 5685 - DNA, 352 bp, Homo sapiens
  source 1..352: mol_type = unassigned DNA
cgccgccgctggtgggtggcggcggtccgggtgctttctggattgcgcagtaaagaggcatcttgggagatggggccaaggttttagggggtgccactcgcgaacggttcatccgctagactaggggggctctttggctgtgcgtctggccagaactggccttgacgatggaagtttctggaaccaaagcgttgctttctctcccttgtgttatagctggagctgcgggagcgcctgccctgcccggagcccgcggtcccctctcggctgccccgcggtggcgtcacgcgcccctcccggagcaagcccggtgcgcagggccgggggcgtgggcggctgctgccagaggcgc

SEQ ID NO: 5686 - DNA, 1141 bp, Homo sapiens
  source 1..1141: mol_type = unassigned DNA
cggggaccaggcggtgtgccgctcgggcagttagtgggccgggcgagcctgcggggctggaggggacgcggggctgggaggctggggagctgggggctgactccgggcgggcggggcggggcagggacctgccggcctggggcgggcgcaccagacgagctctccgcccgcaggcccccagcgcccagccgcgtcccggctgcgtcccgccggtcccgccccgccccgccccgcagagccgccgccagtagtgggagacgtgcgctgagaggcgggggctgcgctcggcggaacagcagccctcgggcggagagcggggccggggtccgagagcaggtgatgccaagagctgagcgggactcgtgagcgcgcggttcagcacctaccagggcgtcccgtaaaaaacctcgccttcgcctgtctctgggaaccataggtaagctttgggctttcgaggtgcagttctaggtagagctccgtgctgggaggtgggaagggggcttgaccctggggactcaggcagtctggggacagttccaccaggggccggtgcctagaattggtgagggaggcacctcaggggctgggggagaaggagcgagcgctcttcgcccctctctggcacccagcggcgcgcctgctggccggaaaggcagcgagaagtccgttctccctgtcctgcccccggcgacttgcggcccgggtgggagtccgcaggctccgggtccccagcgccgctggccagggcgcgggcaaagtttgcctctccgcgtccagccggttctttcgctcccgcagcgccgcaggtgccgcctgtcctcgccttcctgctgcaatcgccccaccatggactccccgatccagatcttccgcggggagccgggccctacctgcgccccgagcgcctgcctgccccccaacagcagcgcctggtttcccggctgggccgagcccgacagcaacggcagcgccggctcggaggacgcgcagctggagcccgcgcacatctccccggccatcccggtcatcatcacggcggtctactccgtagtgttcgtcgtgggcttggtgggcaactcgctggtcatgttcgtgatcatccggtgagcgcggggacagcgcagcgctgggggctgggcgg

SEQ ID NO: 5687 - DNA, 3297 bp, Homo sapiens
  source 1..3297: mol_type = unassigned DNA
cgagacggacaggaatcgaggagattcccctgtagcgctctccaccttccggacagaaatcctgtagaccacgttcacttctccactccgtgcatcgcccgtggcccgtgggcagcagctgctcccctgggatccccctcgcctgtccgcgagctctcgcacggccgcgtccctgctgctggggtcgctcgctggccctggctgctcgccaggattttcctttgatgctgtcaagtccgggaagctcacgatgcacctcagtgcccgcgcgccgcctctcccaaagccccttccccactcactcccccacaagcgtggagggagatggggtaggtcgcggcgcctatagaccccctcccggcgcccactctctctcttccacttctctagcagcggtagggccgcagcgcacgcaaacctttccccaaaacgcccaccccactctcagctagccgcttctctcagggctcctccgcccgagctgggtgtggggatcgccgcgcacacagagacgggaaagccaccccggtcccggagcgccgcttccctagaggcccctggcccgtccgctcccccagcgctggaggacagccgcgcacacagaccctcccctccaacgcccaccgcggtccccagctgcagcctgcacctccacttcccgcccccagtctcccgccctccgccccctgctttccagtctccgcagtccgggcgcccagacttgtttcgacttcccagggcagctccgagggtgcggaagatcaagtgcccgggtttgttccaggaaaatcccggcggcgcctgcacgttaactgccctggcgcaggcgaagggtggagggcacttctctgttcattcggttttcaagagcgtgaacagaggctccgagtgaacgcccatacctagtcggtcttctagggtccacgcgtggggcgtccacttcctcaccctgcccctcggtgcccctgccctggttgcacttctcctaaaaggaggcgctacgattccaggaggctctgtctccttacccttcccagcggcgctcaaaccaccagccccgggcgcccaaccccttccttgtcctctccctatcccgtgagaaagccgacgcttccacccgcctggtctttccgaaatacgcttcgggtggtcaatgcgatttctagggtctaaagactagactcccgcgttccccaccaagacaccgacgcgaagccgcagaggtggaatcgcggacgccctggcaggcccgggacatattgatcctggtggcgcgatgcccctcttcgcacgcggacgcactcgcagccccactcccccaaactcgcactgcgggaaggaacccccgactcgcaccggctcccgccccgcagcaacggcgacaccctgaggtccggacgagcggcgcgcccctcccagcctcggccactttccagcacgaagcctcagggcgagcccgagacgaagaaagagagttcgaggaactgggatactcacgagcccaccgtccaccctgccggccggggaggaagccccggccggctcgcctccgtccgccgtgcgcatgcgtcccgcgggtgccttctcaatattgcagcgcggagggctgccctctctacgtcggcgattgctcaccgcgcctttcgcctttctccggctctcggtctttgctctagccctcttctcccggcctcttcctccccttgctctgcctcctccccgccccctcactccttttacccggccgggcaatcccacgtctcgcctccctccagcggcggcgcactccaccgccgcgggtgctaggggtacccccgaggccccacgcggggcgcgacctccaccccggccgcagccccactgctccagccccgcattagcaagtcccaagagtgtggatgcgaagccaggcgcgcgtagagggcgtccgcgaagccctctgtgtcatcgcctcccctcggcgcgcggggccgagcgagactagagtgtgctggactgcgtgctcggacctcgtgaatgaagggagcgggaggaaggagcgggggtgggcggcaggcatggagggggcgcttggtccccagagcttcgcgtctgtggactgcgcgtctctggagggcagccccctaccttctccccggcccggggcgcctctctgagctctgtccccgccccaccccggcgcagcctaggcctccggtcttcccgccctggaaagcggccctcgccccctcccagctagccagagcgcggaggccccacccagcaaccgagcgggggataagggggggaactaacccctgactccagatcccgctgagaccctcggcagtcgccctccgcgtccccttctccagggactccggagtccggggaaaggagtagaccagggggcagcgggagggggaacccagccgcccagctctccggactcgcagcaccgcgtgtccccgtagcccgcagcgtcccttcgggagtgggacccggtggggccgcggggttagttccctggagcccggagggctaagctgaagctggaaactgacctgacacaaaaataacatcacgtcatttcctcccttgcctgccgagagggcaggggagtgggagagcgagcgctgggagcaggcggaggcgcgtttgggggaggctcggagtaggcggaggagagcgacacgctgagagtttgaaaggcagcctcggggaagagcgagggctccctcccgttttcttggaccatggaaaggaaatggcccaggaaaaagtagcttggagtgtcttcccgcggggaggggcggtgtcccgggagccgccaatgtcccgtcctaggacttgcccagccacgtcccggccttcccgaccttgccaccctccctactgctagccccagcggagcgggtcagttggggttaggaagaatcgggagaggctggtgtcctggggaggctgggtgtggggcgtagtggagaccacggtactcaccggcataggcgagctctgcccagcggtggcgtcttcttccctgggcttggctaccggatgggggggcctcagcggacgaccccccgagggtcggccgggcagtgccagcgccgccccgagcaggagcgagaggcggcccggcagctcctcgtgccccctcgagagccgggcggccggcagggcgggaagcaggggggagaagtccaggcgcctccggggagcctcgggagggggtcgccggagaaggtgagagaagaaccttgcgaggctggaaagcgggctagaaaggaggccgaacagcttcggggcggcgggcga

SEQ ID NO: 5688 - DNA, 2213 bp, Homo sapiens
  source 1..2213: mol_type = unassigned DNA
cgaaggcgacgggtccaggacctgcagaaaccgctgcggtttggggcggtcggggacccacggcttcctggggcggctctgaacaggccttggggcgcagcgtccgctttctaaagaagcctgggatcgggtcctgcctcgctgcaagtcacgcttcccgtgagtccacaagtgcaaaaccagaaaagaatgtttcgcccaaataattaaagagcggtggcccccgcgggggcagcggaggcggtcagcagggtccccgtccccggggagaagtgcccacgatccaagggctgtctgctctaggaacttcttaaagaattacagacactgagagcattcggggtctggtaggaagtgcagtgtatctcccagctttagggtaactaggacagcatgaatcttttaccttgtggtagaataaacggctagcgcctcgatgtggcgcgctcgacttttcctcacagagcctaaaagtcacgctcaaccaaactgcagcgttcccgcctcagctgggcaccggcctggaagcggcctggaatcagactggactcgaggaggtaagacctcggcagcgcgaggttaaccacaggcctcacccgcggcctccagcccggccccaccgcagccggcggcagacaccccaaactctccacacgccgccctcagcgaggcgcctcggggaaagcagcgtgaggcagtgagccgaggggcggggccaggaggacgccccgcccccgagcccgccccgccggagggtttgattaatgaccctctaagccgcctcagcccccggcgtagcctctccggtgggccaggtcctccgcccgacctgccttagccggtcggagcacacacgcctggccgcggggcgcccgcataaaagtcacagccagcggaggttggaaacagccgtcgacttgggcatcggccggacgaggatggagtgaccagcgcggccctggccacacaggccctgctccacgcccctcgcccgccctcacgacggagcggagctccactcagccgctccaggaaaggtgaggggcccgtcagacgcgtactgcgcagctctcgggctcggaacggtggcgggtgccgtaccccgaggtgaggctaagggtcccccgctcctcgggcagaaatcccccctggcgtgaaaggccgagggcggctggtgagccgtggttttccgcggcgtcggcgagaaggagccgcgccacctctcgtgcgtgccgggttggataaagtcacccaagcgcgaacgagtgctgatcctgagctgtgcttccgagatctttcttcccgggtagagtagaccttttgcttaatttgcccctgaaaagcaaagccggcactgcgcctcttcttatccttctaggaagcccaagaactccggagttccgcaactctccccagacgtccggaagcaaatcgcgtcccaggcaaaacgagctcgcttgagagcgcccttagccccgttgggctgctggtgggcgcacggggagaaccagggggctgcgcctctcgggttaagcccgaccgccccccggcctcaccgcaccttcggtcctttgcagcgcgcgcggcgcgggaagctgccatggaccgcggccgcccagcgggcagccccctcagcgccagcgccgagcccgcgcccctggccgccgccatccgcgactcgcgtcccgggcggaccgggccggggccggcgggccctgggggcggctcgcgttccgggagcgggcggccggcggcggcgaatgcggcgcgggagcgcagccgggtgcagaccctgcggcacgctttcctggagctgcagcgcacgctgccgtccgtgccgcccgacaccaagctgtccaagctggacgtgctgctgctggccaccacctacatcgcgcatctcacccgcagcctgcaggacgacgccgaggcgccggcggacgccgggttgggcgccctgcgcggcgatggctacctgcacccggtcaaggtaagcgggcggggcgcaccgcggggctggggccgagaccaggacaccttgatctgccctgccagtcaccgtcttgggtagatgctctaattccttttcgggtgaggcgggaagccgaccgggagaacgacctcggcccgcgagggtactggtggcaaggtccccgccgcgaaagccggctccttcgcggttcacaggtggctggagaggcgtttaaagccgg

SEQ ID NO: 5689 - DNA, 363 bp, Homo sapiens
  source 1..363: mol_type = unassigned DNA
cgcgggggtcaccgcgcccgcgaacgcagagtccacacgtggattcccgcgcctgtgatgccccgacccgtcccgggtccccgcacagacaatgccgcgcgtccttcccgcagccactccgggacccgcgccccgcgccgcccggacgtccccctgcgtctgccggggacactcaccgacaccaggaactccagcgtgcccacatagtcccgctcggtcttctggagctcgctgagcacgcacacgcgcaggcgaagctgcttctccaggtccttggcgctctcggcgcggctgtctccgcggctgtcctcgctcatggtcggcggcggtgcgcagcgcggcgctgcccgccgtgctgagcgc

SEQ ID NO: 5690 - DNA, 960 bp, Homo sapiens
  source 1..960: mol_type = unassigned DNA
cgtagaaaacgctgcaggggccaggcgtccgagacaccccgcggggcagtgggcaccaggcccaggctccggctgcagagcggaggggcgtcgggcccaggaaaggggctgtgggtgggggtacgggggagacccgaggggtgctgggaagagggctcccctctccagcgccagccctggtgtcgctgtgcactcggagccgcgcgaagggcgcccctcgacccggaggcacaggagcgtttagagaggaaagaaagaaaaagccaccgctggctcgaatttctggaagccggagccgggttttttgccctaaacaccgaggcagaacccctcttagcgctgccccggcctctctgttacccattttcggtttgcttttggaagaaccggttcctcagccccccgtcgccgcagttgtgacacaagtaagtgcagccgcgctgcccggggcccgccagggtcccccgcgcccgctccccaccgtggctcgcggcggccgcgctcccgccccgccccgctcggccgccccgccggcttctgcctccagttgggttgccgtgacgaggagacgttgttgtgaaactaaatctgaccctgagttcccaggcggcggccgagagcccgcggctgctgatgcccctgggccccaccccggggcaggagggcggcgatcggcgcccgggaagcggctgaggggcgccgcgactctcagcgagcgccgcccgagccccagcccgcccgggcagcctccgaggcctagggcgccgccgccaggtacgcgaaagtcacctggaagggagctgggtgcgcgcaataatggggccttgagccgtggccggcaggggagaggtgcagccgcccaaggcccgtggcgtcgggcgctgcacgtggagggatgtgtcaagggccggtttgttttccttcggggaggtggtaactgattgggacgtcgggggacgg

SEQ ID NO: 5691 - DNA, 1404 bp, Homo sapiens
  source 1..1404: mol_type = unassigned DNA
cgcccgtccctcccaggcccggtgggaccagacccgaagccaaccctcgccaggcgtcaggtgtagaccccaggccaggccagagcagttcctgggtcttcggaccgggatgcccgccctgcccctcctcctggccccgcccggtctgtcacagggggaggcctcggcctcgcattccgggcagcgaacttcgccggccgaggttagccccgtgcgggggcctcccgcgggaccgaccgccaagcggcattgtccgtcccgggcgcccgcccggttccagacgcaggtcctgcggccgccccgtgacaagcacactgacgggccactgtcctttgacgagtgctaaaaagttcgtttgttttgaacgtcaattttcaagtgatcttcacgaggtttcccctcccggttccttcgctgctgcctcgcccgcactcggtccccagtaggtgctcaagaaacgtccagcaaacggcagcgcaggcgagtctgctctgcgcgctggcgcgtttcactgcccacggatggcgggcgacctcacgggatccccggttcgcaggatccccgcccccgaggctgcctctgggccgggaggggttaccccagaggggcgtccactctcgacggcgggggccggggcgccgcgggcaggggagggcgcagcctccaagcagccccagcctggcctagaccccgcgcctagcgagccggccggccaggcccacaccccccacctgccgcccgccccaggggaagggtccccccgacgacgcccgagcccccctcttcctcggagggccggaggccggcgcccattggccggccctgggcgacgccccgcccctccgacgccacgggccaatgagcgcgcgctgtcagctcatcagccgggctggctgggcggctcgggagcccgagcggtggcggagcggcgagcagcgagcagcgcctgcgggagcggccggtcggtcgggtccccgcgccccgcacgcccgcacgcccagcggggcccgcattgagcatgggcgcggcggccgtgcgctggcacttgtgcgtgctgctggccctgggcacacgcgggcggctggccgggggcagcgggctcccaggtaagcccccgaccgaggtggggggcggcgggcgcggggggctcgggcggccgaggcgcggtcccggagggcttcttccccgcggatcccgagctcgccccgcgcggccccgcgccccctgcctctttgcaaagtaacttctagggccggcccggggcgccccctccccgcagcccgggcggccggggctcctgagtccggcggggccgcaccaggggtgggtgggccggggccccgggaggggaagcgcgagcgcgggagcgaggaagaaaggcggcggttcccggggaccccgcgt

SEQ ID NO: 5692 - DNA, 1247 bp, Homo sapiens
  source 1..1247: mol_type = unassigned DNA
cggggggcaggccgcgagagggagaggatcccgggagcagacgaagaagtggagcagctaaagtctgcgtcagaagaggttggggactgcgagaggagaggctggggcctgcaggggagcgcagcagcttttagcatcgatccaaactctaaagactcgtggcctttgcctgacctcgagggtcgggaatagacgcctgtctttgtggagagcgatacccaaccgagaaaatggggctgttccgagctgggccctgcgcctggcccagggcgaggcttctctggctccgggctggcccctgaggggcgcaaacggcaggcctggcggttggggccgaggagggagggtaccaccgccccgaggcagcacgcagcctgcagcagaggcgcctgctccaagctgtctcttgggggcgccgccgccgcttccctcctccggggccgctcgctcccaggaaagtggaggcggctggcgaggaccgagagccggggccgcgctgcggagggaccacacctccgggagttcgagggggaccctggcgcggcgggccagcctttgctccccggccacgggccggcagcgcccgccttcccccggtcagcgcttgcggcccgcgccgcgcgcaccgcccggcaaccccgcgcgcgtcccgcgggggcgctgcgtcttcctgccacaccggcgcaccgcggcccctctcccccacacctccggcccgcaccacccggctctcctcccaccctccccacccctcctctgccctccctccccattcctcccctcccggcgaggggcgggagggggcgtggcggggccggggtttgtgtggctgggacccggctcctcgcactccgagtccgcccgaggagccgggccccggccgctgtccagccgctccgtgccccgcgcgtcctgcgccgccgccaccgcctcctggggagacgcagccacttgcccgccatggatactcccagggtcctgctctcggccgtcttcctcatcagttttctgtgggatttgcccggtttccagcaggcttccatctcatcctcctcgtcgtccgccgagctgggttccaccaagggcatgcgaagccgcaaggaaggcaagatgcagcgggcgccgcgcgacagtgacgcgggccgggagggccaggaaccacagccgcggcctcaggacgaaccccgggctcagcagccccgggcgcaggagccgccaggcaggggtccgcgcgtggtgccccacga

SEQ ID NO: 5693 - DNA, 1861 bp, Homo sapiens
  source 1..1861: mol_type = unassigned DNA
cgctcattgggcgacgtggggaaacaagctccagcccccgaagcgcgaccaaaaggagaaatcaagttcccaccgccagggcgggggagggaagctgggtgccggcaggcgctccgccggagacgagactcctcccggccccagaagcgccccgccagggccagagagggcgagcgtggcgggagggaagcctctgtcccccagcggccaggcgacccgaagccgagcgccgtgtcacacgtaccccgcctcgccctgcttgcggcactcccgtgtaactcctatgaaaatgtcctcccgtccctgacgccccgcggtgcaacctccacccctcaacgaggagggggtcgccgcaggactgggaatccagtggccggcgtcccagcattttcggacgcgttccgtgcctcccccagtatccccttgagggatcgcctactgcgattccacgtagtgtcggttacctcgccctagccgcagggagcatcaaacaaaagaacttttgcaaacttttctctctggacactcgcgggtctcttaaatctggcccccatctccccagaacttgcatgcagtcaaacaggaaagctggcgcgggggggatggtgtgcggaggaagggaccccgaagtttccaggtcatccctggtctcgaggagcgcgcggagtggagccgttccctcgcgggcccgacccaggctcccccctcctgccaccctttcccctccgtccttcccagaccacgcagcaagacccgccgagggcgaagaagttgggagtgacttcaggggcctctgcggctagaccaaaccgcaattctcggtgcccccattcccgcggaccgcggggtaacgccagcgagcagcgcttttctgaggaagggaagagggggaaagggtgaccggacgagcgcatttgtcccagcggatctccggtgtatacttggggactgggggttccccaggtggcgctcccctattccctgcgggctcctctcgtagcttcaaacaccctaaacggcgcgcgcatcctccgcctggcccactcaccgactccgccgacacgcaggccaccaagcccaaggtgagcaggatccacgcgcgccgcatattccccagggaccggctgctcccagccgctgcttgcaaccagggcaaaacgaagcctcctgcccagcgctcggcgcagcccgcgcacacgaatccggagcagagtaccgcagcgattgcggctcaggctcggggactcgggctcggggctcgggggcgctcgcttcctcctcctgcgcctgctcccgccgcccgcagctgcgccccgggaacgcggcgccctctcacttgttggtttctgcactcccgacacggagttggtgctccgggaaggctgctctctgaagctcttcttgctctgctgtggttttgctcctccgcggactcctttcccgtgccgaggttcagtttctggttttaaggaataaattcgctggcttgaaagggagctacggcagaagtttaggggcagagcggcgggagcgcgcgatccgcgcggctggagctccgggggtatctggagagcagcgcgtccaagcggggccactggctccgcggctgcgcccctcctcctcccgcgccgcgcctccctccccgggtcctcctccttctcctcctcttcttttcctctggctccctccctcctgagcctgcttctccgggctcccctgggcgactggggagaggaggcggcagtgtgactcccagataaacccgggagaaattcctacaggattacacgccgattggcagctccgaggaccagtgggcgccgcggctccgcgctgtggctgcgccggctctgctcaccgg

SEQ ID NO: 5694 - DNA, 3044 bp, Homo sapiens
  source 1..3044: mol_type = unassigned DNA
cgccgagggggaggggctggaagatggcggcggacgcacacccacccgaccgcgacagagcttaggcccctagcccgcgccgccgcccgctgctcgcagccactgtgggcagccctgctctgtcccgcgttgctggtagagccgccccgcggaggcgtgggaccagggtggcgtccgcatcccctgccagcgcgccttcgcccgggtccgtccagggagcacctgtgcacggccatattggattctgtgccccagtcactgcctcagcgcggcgggaaaggagagggtacgcacagagcctgggttcagccccagtcccgctggggccccggagccaagatgaccagcgaggaaatccggaaaggcgccaaggaaaatcacaccgcctaaggctcgccaccctcacctcagccggccttggcgccctccctccccgacacacacccctgctctcagacacccctaaaacagcccgggcggccggcgctggccgcagccctcgtggcctgggcgccgccagcgggagggagggcggcgaactggggcgcgcaggcggccgcagggcagtgggcgagggggcggagggcagggagagaggcgggaatatggagccaggtccttacttgagcacggactgctccttctcctcttctttcttctgcctatccatgacggccaggatgattttcctctcctcctccgtgaggtggctgaggtcaggcatctcgggctgcagaggcggctgagaggccgccgggatgggagccaggcggccccggggcccgacaggagccgacatgtttggtggagccgaaccaccctagggaagcggggaggcaactccactggcagcggcggcaccggcgcggcggctggggcagcctccagcgctgggacaaatacatacaaatcaatggccttcaatccaaggcgacagcccccctcccccaagaaaagcagggggaggggagggcgagcgcgtggggaaggagggctgaggagtgcgcttcgggaaatgtttcttcttcccgggggcgaagggctgtgaagtgagcggttcaagggaaaggggaactggaggccgggacgcggagtgcgcggagaggcgggggagggtggtggagtaaggtggcggggacagctaagggtggggtgactggagggagcaggcgggagggcgacaggcggaccggggcgcgagtgtgtccggccgcggtcagggccgggagcgcgcgcgccgcctcggaggggaaggggtgcctgcgaacaagcccccggggaactcgcttcgagcgcccggaggcggagtactgccggcccgaggggcacccaggcgggagccgagagggtcgtgaggaagcgaggacggtttcccggagaagcaactcatccgtcccgccggctgacgcatcacagggctcccgcgcgccacagagggagaactcctccaggcacacccgggagcgggccgcggggccggaaacccccgcggagaccccaaccccacccaccccacccccggctagagtggagaagcgaaagcggagaagatatgacgggggctagcggcggagagtcccggggccagggcccttcggctgccaacgcccggatccaggcgagctccgacgtgcagcggggtctggcgccggcccctcctcatcacgcgcccggcccagggtcgctcagccgccgccaccgccgccgccccttgggtcgatggagtcggcgcggaaggcccgcgcgccctgcgccgccgccgctcagtgccgccgccagcacctcctccgcccctccgcctcccgggctcatcccgcgggggcggcgtcacctcctcgctgcccaggcccgggcaccgcgggcgccccgcgggcggcagccgcccctcccgagcgcgatctccaggctgggtccggggccgggcggggagggaggagagactgagcgtgaagggagagggcgcccgagttttcggggacggaagtgtggagaataggagcgtgtgagggggcgcccgaggtgtcgggggcgggggaagagtatgagcaggggtgggggcaggggtgccaggtgtagcaggtagggaggtagaggcggcgagtgggggcgcccgagggaccggggcggggcggggagcgtaagggtggcaaggcgcccgagagtcagggctggagctgaaggtgggtgacagggagggggcgcccaggtgtcaggacctgaggagaaagagtgcgcgtagcgggagggccccgaagtgtcggggcgggatcctggaaggagggagaacgtgaggagggaggaagggtccctggggtgtcagggatgggggccaggaaaggggcagagagctggaggcccacaagtggggatagcgggggagggaggttggagcgagtggggaacgcaggtggtgtcgagggcggggacagggcgaggggagcggggcgtgaggaagttgtgggaaaccgcgctggacgctgagaatgtgcggaaggatcctgaggggaggacgcgagacagcgcgaggagagacgaggagagttagggttggccgggagggtgcgaagatgaagcgaccactggaggctgtgagggtgaaaggagcaagaatcgtctagagacgggctgggccggtgctggggccaaaggcttctgtctgtcaggccctttttggcgctcactctagaaagaagaggcggagacgcgaagagatcgggttagagtcagattttcgaagcacggagatgggttcaatgaaaggacgaggaaagacgagaaaccagcggccggagaacggaggtggccgccgccgtcctttgctctgctcggggctgggcgccgcccggagagccctcccggagggggcggggcggggccgggtgaacagagctgggcgggctcgccagctcttccaggcgccctgggcaagcaatgtgggtgactgagctcgggtgtgtgtgcctgtgtgtgtgtgtgtgtgtgtgtgtgtgtacgtacacaagtgagcgtgtgtgcgcaccccacccagccttccacacgcgcgc

SEQ ID NO: 5695 - DNA, 1603 bp, Homo sapiens
  source 1..1603: mol_type = unassigned DNA
cgacttgatctctgcgagcgtgcctgtttcggaaggtgtctcttgacccgccgtgtcctctaagcaccatcgggacccccgggcacccgggggctcagggccatgcactcccctgcgcgcccaccgccttgaactcacagcttccgcgctgggaagtgactggcggcccctcccagggaggactccgcgcgccaccagggccagacaccacccgaatccccgctcggctgagcgtcctggcggcgtgagccggacccgcccgaagtcccaggacacgacctgccagccaccagcccgcgcccgcagggcagagacgcacggccgcccgccgcagaggcgcgaacttttacacctactttttgtttcgcttcgggtttggtgtggctctggcaccgcccaggatcgggaccctgacgctctgattttccaccgcgtggggaagttacctccctcgccccgaggtctcgaccgcccagcttttctgagaagtttctaccctggttactaaaagtggttcccaagagtagtcccacgtcaatcgcacaaagcaatgacaacaacaataataagcgtctaaaggagcgggactgcccctccggctggacgacagcgccggggactcgcagcgtgcgcgggtcggaattaaaaaagcagcccgggagcgcgagggctgagcggggcaagcatgggctgctcctcgcagcctctctcctgcccgaggctcgggctggccgtctgtctgtctatgactgtctagttgtcccttcgactgctcaggcaaagtttgagacatctaggggaccgggagcggatctcccctagccccgccacccacccaccgctttcccgtcccgcgcaccccgctcctgggcaataatcccaccaactcccggccccgcgcgcaaacttacgtttgatctgccggggtttgctttgctttcgccgggacatctcggcggcggctgctgccgctggggctcccgcggtgcccgcggtcgcggctgccgctccctcggctcccgccgccgccgccgccgccgccgccgctggccaggctcggcccgccgccggccggactccaggtgctccgggcgctgggctcctccgggagccgcggattcacgttcggagatgagcaagcaaatgagagaagagagacgggggcacagagagtgtgacagtgaggaggggagggggagaggagagcgacggggggagaatgggaatgtacaagcgaacggtcagggagagagaaaaggggaaagagaagagaaaaataacacggaaagaaggaagagaaggagggagggacgggagagcgagcagcgaggagagggggagcgcgggggcgcagggcgcgggaggaggagcgcgctcgctcgcccctcgccccggcgtgcgggacggatactccggcgccgccgccgccgctccgggccgcgcagctcctgttctgcggcgggaggcggcgaggcgcgcgagggaggggcgcgccggggctgtggggaggggagactattccatcagccaaaggaggattggctgcatccaaatccagtccggatgcaaactacggccccggccttggtcgggcgaagtgcgg

SEQ ID NO: 5696 - DNA, 1365 bp, Homo sapiens
  source 1..1365: mol_type = unassigned DNA
cggtctgcatctccatcggaaagtgcgcttgccacatcccttcggatcacttcgtcctcccgagagcgttctgccttctacagctcggaaagaaagaaatcttagctgtgaagtgaccgtggagaaagcgcaggaagcgacacaattggttagggaggcagagagtgtgagcgggcgcaccccttgcctggggaccgcgctcgcgggcggggacggagcatcccagtggctgcacccgccgctccgcgctcctgcctggcgtcgccaaccccgcggcggccgctggaattccagagctgccaggcgctcccagccggtctcggcaaacttttccccagcccacgtgctaaccaagcggctcgcttcccgagcccgggatggagcaccgcgcctagggaggccgcgccgcccgagacgtgcgcacggtaggcaacccacaccaaggcagccgcagctgcggcgcttgggtacaccgccgtggactccaaatggcctaagagcgttcttttagccctgcgctctcagtgcctttagagttctttcctttccccggagcgccggcacaacgcattatgccgctgggtcggagcttagggctcggcagaggttgctaattcactgattataatcaccttcctctccaactcgtccgcagctgcccgctctggattaagccgctccgcggctcgtgctaggcagtgggttcgcttcctccttccctctcttctttaaattgggacgtgcgaaggcgcagctgcctccccggggctctctccatcccccacacaccctgttttcgcttcttgtctctcaggttcgtggcggagagatgctgatcgcgctgaactgaccggtgcggcccgggggtgagtggcgagtctccctctgagtcctccccagcagcgcggccggcgccggctctttgggcgaaccctccagttcctagactttgagaggcgtctctcccccgcccgaccgcccagatgcagtttcgccttttctcctttgccctcatcattctgaactgcatggattacagccactgccaaggcaaccgatggagacgcagtaagcgaggtgggtccctctctgccaaaggtgcgtggtgggcttcaggggtggcgtgtggaggcgctcactcacgccctggctccgggggctcagatggtcagggctgtgctctccaccccagcttttgcgggtccccagtccccacctttaggaccctggagctctacaaaacactctgttttctgtaccctggaggcgcggggagccggagcgagacgcgctgggagctcggcgagccgggcgccaatcgggcgctcagggctaagtcgtgcggtccgcactcatgttcgccgc

SEQ ID NO: 5697 - DNA, 419 bp, Homo sapiens
  source 1..419: mol_type = unassigned DNA
cgtggcgggcgctgcccacccggcggagccgagcggcgtgcagaggctacaagtgccgtagctggtgattgggggactttctccgggaaccgtgccgggagagcgcgcggtgctggagccgcaccgggtggccgaagcagaaggtgagtggcggggagtgggatggggtggaggctttgaatgcaagggtgagagccctggagcctagcagagctggagcgcatatccccgctctctctccttcgtctccgagtactaggcggacacatccgtacctcgaatgcctcagtgggcgcagagttcaccagaaatggatagccggattcctcggcgcctgctgggggcaccgctgccaggtgcttggggctcgctctcccggctttgctcgcacagggcgcatccagaggtcgcctccccga

SEQ ID NO: 5698 - DNA, 3675 bp, Homo sapiens
  source 1..3675: mol_type = unassigned DNA
cgcagcgaggccggctgcgcggccgccgcgtgggtcggagtccagtgccccctggtggcgccgaggcgggcaggcggcttccggaccgcgcggaggcccgacggctgtgactcaggggtggcgccgctgccagggcggcgggaggcctgactggggttccgtcgtgggctgagccacggcgcaattaattaccagctgctgggaatccttgtcgcccgctcgcggtgactcacccggcagccaggctcacttgccgagcgcgggggccttggtttccaaaatgaatctggggagagtgcctgctcggggtagggctccccgctccctcgccccagggcgcccgcagacccagcgaggacctgacggctcagacgtagcccacagcgcgggctccccttccctggtgggcacccgtgatccctgaaagtggggtgcagagcgtcccagctgggaggcctcggtgaatcactggggtcccagaccctctgggcccggggtccctgaggccagggagcccgagcaccgctccagggggcgacccacagaagggactggtctcctggagcccgcgagctgcccgagggttaggtctgattccccagccaccccttggccagctgctagcctgccgccaggcaactctttcccatctccatcccttccttggctggggtcaggagaggaagaggagcccaggggtctctgaggcttgggtctgtccttttggagctccagggctccaggcgggattcaggaagccgaaggtcaaggaaaagcccctcgatagcctaaagggagagggcggggagggggaggaggtaaaggaggccaaaatgggaaggagataaagcctggagagggctcatctggaagcagggaataggtgcgccccagcccgagcctcgtgttcctaccccaggtggtctcgagggggctatcgcgtggctcagggctgcatccacggcgcaccttgcgcccagctgtggggaaccaaagagtgattatatatatcaaagagtgattatatatatatatatatatatatatatgtgtgtgtgtgtgtgtgtgtgtgtgtgtgtgtgtgtgtgtgtgtattttttttttttccttcagtaaagcaacagagaggttactgggtcgggggattgcgatgtctttccccgctgtcctgactccaaaagtggcggcccatgctgtccttagcgctctccagggaaacgactcgggtctgcaggtgctggcccaagcgggctgtgccgctgggaggcgagggggccgaggcagccctcgggaccccaccactccacgaggccatgtccctggccaatgacacgctcccgcgccgggtggctaggtggggggtggggggtggggaagacttcgtgaaccgctgctgccgctctcctgtgtgcccatggccccctccccttctgctccccactctctgcccaatctgcctgaagctgtcagcctgccatctctggctgaatcccgttttcctcctccaaccccgagtccctcaaactctccacccgccagggctgcttgcgctcttggggagcggggctagaaggacccaagaagccgcgtttatcctcccatcccccgccaaaacccgccggcggctccgcccccgccccctccctggcggctcaggccgcccctcccgggctccctccgcgtgcgccctgcgccgcgctgggtctgcagcgggagctgccacagcagcctcgccagctggctggggaccaggcgggaggtggcgcgccctggaggctgcgggagggagggagggagggaggcccggcctcggcgtagcccggcccccgctccccgaggccctcccgccggagcggggctgccaagcgcacacacacacacacacacacacgcacatacacacgcgcacacacacattcgggctcccaacggcgcgcacgcacgtagcgcccggggcagaccagcgcggcggccgcctcccgggacgcccggacgccggagggccccgacccccgcgcggctcatgcgcccgcgtccgccccgctgctccgcgaggcccgcgggacccctcccgccgccgccgccgcgcccgccgcccccggaggagcgggctggccgaccgccaccgcgccgtcccccggccgcccccgaagccgctccatcgcggtccctgccgtcctggggccgcgccccgctcccgcgccttgggggttgagccgagcaaacttcgcgcaccggccgacgcccggcggggaccccgctgcgcacccgcgcgcccgggtgggcgctgggcgcgcggacctttggggagcgggctgcccctcccgctgcacctgctcggccccctccccgcttgcaggggactccagagacaccgccacttcgcaaacttttcctccccaccaccgagagggggcgaggaggggtaaaaggggaagcaggttccgctgggcgcgcggacctgcaggctccttgctgggcaccgccacccgcgagctggacccacaggggtaccgggccccgcggccgccctccggccgctttctggctccggttcccgtccctgcgtttcccgcgggagcggggggcggggtgcggagggcagcaaggcccgcgcggtacccagcggggccgccctgcatggccctgcgcagtggggcgggctgcttcggccgggtctggcgcagggtgtcggggttcccggacgcctggccccggcgctcgagcagcctcctgtgcctgtccgccttctcggctgagcccgggcccgcgccgcccctgccccgccagccgcctcgcggtggcggtggctgtggcggccccagcggagggggccccccccagcctccccgccccccgcctccccgctgctgctgctgctgctgccgccgccgcttacaacttggaggcggcggcggcggcggcggaggaggaggcggcggcggccgccgggcgctgcagtgggacgcgcgcggctgtgagcctgcgggacatgccccccgcgccggctccttgctggcggccatgaagaggcagaacgtgcggactctgtccctcatcgtctgcaccttcacctacctgctggtgggcgccgccgtgttcgacgccctcgagtcggaccacgagatgcgcgaggaggagaaactcaaagccgaggagatccggatcaaggggaagtacaacatcagcagcgaggactaccggcagctggagctggtgatcctgcagtcggaaccgcaccgcgccggcgtccagtggaaattcgccggctccttctactttgcgatcacggtcatcaccaccataggtaagggctgggcgcgccgctgggctcccgcgccccgggaggagtccggggaggcggctgagcgcgccgcgccgggctgggtgcagggcgtcgagggttaaacgcagcctcccttgggggccttcccgcagcgccccctcctctctagggagccccccctccgcggcgcctccgagcctcacccttcggggaccccacccggtgctctccaccgcgctggtgtctgggccgggcgtgcgagccccgagcgagtgtgcctgagccgggagggcggaggcgccacttttgcgaagagagtggagcgctaagaataatcccatagcagacacccacccacccaccgccccggcgcgggctgggctgcgcgg

SEQ ID NO: 5699 - DNA, 3675 bp, Homo sapiens; identical to SEQ ID NO: 5698
  source 1..3675: mol_type = unassigned DNA

SEQ ID NO: 5700 - DNA, 3378 bp, Homo sapiens
  source 1..3378: mol_type = unassigned DNA
cgggccgggccggcgaggggggctccggccgagacgcgaggcgcgtcacgggacccggcggcgggagcggacggcgagcgagcgagcgagcgggcgggcgggcgggcgggagggaggtggcggccggggctgcccaagatggggccggagccgcgggccaggcgcggaggagacggaaggggcgggcagggccgcgcgggcgcggtgcgggcgccctctcccggcagtcagcggcagcgcgccggccctccgccttccgccactgcggccccgcgccggccgcctgggcctggagccccgcggcgtccccggaggacgggctccgcgccccacgacccactcccggaggcggggtcgggccgaccgggggcggaggacgccgcaggaggctgctcggaccccgggcgcttgctaggccctccctggggcccttcatgccaggccccgcggctgtgtccgcaagcgcagatggtctcgggactcgggccaccctgacgccgcagacccagcacgctgcggaccgggcacgttggatctcgggacaagtgcggagggtcgggggctggaagggatccgagagcagagcccgcgtccccatttcacggacgcggccaccgaggtccgagaggggccggagcctgcgggagagggaagggcctccgagggctccacaacttggctgcgccccctccctagcccgggatccggatgagtgctgcctgaggccgaggcgacgaatcgccctctatccgcccctgcgcgggaccccggcaggaacaagcgcccgtccctgggatcggaggcggcaaaccccaggctcgagccccccagcgcagcgcccacccgcggagccgcgcgcctctctggcgcatccctgggcttcgcggctcggccctcagccgccgggtctcccgggccagccttctgccccccagatcgaggcgcaacaagtctgaaagcagcgccaaggagcagctagcgagccgaagggagggcgtggggcgccgggcgctccgggatccccgaacgcgcgcaacgtccgcctccggggaccgggcgcgggcggcaggcgagcgggactgactcggcgggctgcgcacacccccttccaaggccccgactgtgcgcggacgggggcgcgcccaggaacccccgccccctccttcgcctgcttgaccttgctgggtactcaaagccggactcggcggcaccccggcgtgcgggcgcagagtttcgctgccgcccacgggagggagcggctcgacctccctcgttgcctcctcggcagccggggtcgcagacgagtggaaggcatgagggttctaggagacgtgacagtcgcctccccagaccccacacaccgtataccacctccctcccagatagaaaagggacccagctcccctttcccccgcctccgcccgcgcggcctctgctgttcccccgcggcggctctcgctccgagggggcgtgtgtttgtgtctgtggggagagtaccgagggtctccgtgggttcccaggatggagcgggagagcagacctcccagctccctccccaacacaaacgacaagcggctcctctggggcgggagtgcaggccccctacccgcccacacgccttcctgcctttcaactactccggagttgcagcccaggaatctgcgccccagacccggaggaagaacggggaggtcgcggcggggacgggtgctgaaagagggctggcttagggctcttcgggtcccagcctaggcgcctgcgctccaagaaacttagaagcccaaaataaaagtggaaaggggtaaggtgcccagcggcctggggctggggtgccagattaggcgttctcttcaggctgccggggagtggccaagcaggagccgccgcggccaggaggagggacgcgggctcggagccgcagcctccgtcaagccctcccggtcgcatcgcttcgcggtgattctcagctccgccgccccctcccgaggccggaggagctctctacctcgcccagggggccgcggggacctagggagagggctcctggccgggtccagagctcccagcctccccaggagggggcgggggccgtgctcgttcctcgaggcagctccgcgcggctccaagctagcgcggcgacggtggagggccggcggcctctgctcaccggcgacgcggacccgggagtgctcggcgcccgggagtgctcggcgcttggagcggagacggcatagggccggcccaaagttgagagcggcttatccgcgcggcctgtccgacccagtggaaaggtagacaaggagggaagagccaggcgttcgcgtgggggtggggggcgcaaaaatagccctccgcccgaagtgggggagagtacctccagggagtctccactgccaatgccaggtctacaggcgagggcttctacgagcgagggcttcgagaaggagtctggggttttctcctgcctgccccgagctctgtgcgtggggggaggacgtctcgggcccttacaatgtctgtagggggccctggacgtgattagcaggagggggacacgctcgggggctctccggagcctgctgcgtctatgtgtggctgttgggggccatggggggctcccttagacccccgccagcgtctgtgtgtgctgggggtacagcgggaacgccctccccagcctgccctgtgcatgtgatgaagaggggtgccaggctgtggtgtgtggatggggaggaggcggcggcgccgaggagcctctcctgcgtccagggtcgccccctcctcagcctgcccaatgcgggctcgcggggacctgccacattccatcgccaccgctggagaaggcagggggctgagggggtagggggtgggggtccaaactcctgagctctgagcgcaaaacctcggagctgcgaagccccaaacggcgaagttaggaagtctgggcgcccgcccctcccccgaccccctcccaccctcgctgcgcccccacccgccgcgcccccagccccccgccggagccttccttaccttccccagcagcagcggccccgccggcgaggactcgatccggcgagttgcaaatccccgcgagcgcctcgcgtcgccggcggctgagccgggcgcccgaccggaggtggggggggctcctccagccgccgccgcccccggcccgctctgggcctcgccgggacgccccctggagagcacccgccggcgcacgcaggccccctcccgttcccccgcgcctgctggagccccccgggcgcccggagggtccggatgcccgcgctgcggacgatgctggcgcgcgggcccgggccgggccaggacgcggcgcggccgcctgtgctcccggctctccggctccgcgctcgc

SEQ ID NO: 5701 - DNA, 1108 bp, Homo sapiens
  source 1..1108: mol_type = unassigned DNA
cgggggtcccgactcctcccaggcccgtctccaactccacactgccacccgctcggcgcccacccaccctctccagaggcgcatggaccccgccggccgggccaggccacggcggctgcgggccacagcgacccctccgggacaggacgggtgcgggccctccccacccgcaggcccgccggcagcccccgcccgcgcccctgcccggcgcccctcccgccggcccggccggggtctcaccgcgtcggcgctgagctgggctaagatggcgaaggtggagagccggtcacagaggcagcgcgtccggagggcgtcgaggggcaccgtgcggcagccgcgccacgaccagggcccgagctgcgggggggcggaggaggagggtctgggggcgggcgggacacgggagggagacaggcggagcgtcagcggcggcggggacgcgggcgccccggcccccgagcggcggctccgcgccccggccccggccccggcccgccgccccgcacctgcgcccgcagccgcgcgcccgtccgcccgccgccgccaggccccgcggcccgggcgcccatgccgcgctctgcgcccgccgccgccgccgccgagagccgcggagcgcagcccgagggagcgccgggcgggggagccgagcgatcgggggcggggcggggggcgagagctggcccggggcccggcagtcgcccgccccgcgcccccgccgcccccagctcctccggggcccgcgcccccggcccgcgcgggaaggagggggaggcccggaggggcgcgtgggcgcacgtggagcggggagggtgcgagccgggtgtggcctgggggcgcggggcgggttcggagcgcggcgagggtccgctccggagctctccggccccgcggcccagggcgccggctggagctgacgaccttgggaccgctccatcccccacatccacctcccccgggcctcatcacccctggtgcctgcggctcatctcctgggacagacacagccttccccgcggggaggcttgccgctggaaacttccctctgcggtctgacccagccgcccgctgtctacgggccgcgactgccccgcttttcatctgagcacgc

SEQ ID NO: 5702 - DNA, 1700 bp, Homo sapiens
  source 1..1700: mol_type = unassigned DNA
cgaacatccacacgcacacacacactcgggagcgcacggacgagctgccttctccaaggccactcaaacgtcccaaccactctcgggcgcgcaagtccaagcgcgggagccaggacttaccgccaagacgctctgggcgaggaaccccacggtcactgtccccagcagcagccacctgcatgggaaagggaggaagagagacgtgaacgtgcgggcccggcttgtcagtccccgagagttacaccgaagggtccatgcgcgcgtgacccacggggaccaggcagaaagtcgcttaccgccgtagggcagggccggccaccgcgcgctggtctctccccatgctggcggttcgtccactctgggccccggtcagtcccacttagcctagaggcgacagacaaagcgagtttagcgcaggatgagggaggcagcccatcctcaccgccggtctcggtccgcgagacgcggggacagcgcggtgcgcggcccgcatgcaggggtgaccggagggccgtcccccccacgacccggaaagaaggagagcctcccgttaggcccctgtgggtgctccttggccgaggagctcggtcttcgctctcccaccctccccctttctactcccaagcaggagagcgtgcagccctagcctgcacaaggcgctccaagtcggtgctctcgggccagggtctgggcgccgctcgggggtcgctctcacctcgggctcggcttcaggggctgctgcccgaacgcattggcccttccagaagcacccgccggcggcacaccggcagggcggccggccttgctgggctctctgggcgccggccccgggggctcgggcggcccctttcggtcctcggcctggatccgcgaacgcgcgggcgcgaggggttgggacgcgggagcctcttgagtgcggagcgcggagccctggtgtcccggcgcactgcagccacactcccgggccgcgcgctcccgccgcctcttacccgcgccgcagggtcctcccctttgaggcgccgcccgcgcaccgccgggggggagggggcagcgccaacaaattggggagctcggcccgccgcgctcaggtctccgcttggagccgccgcacccgggacggtgcgtagcgctggaagtccggccttccgagagctagctgtccgccgcggcccccgcacgccgggcagccgtccctcgccgcctcgggcgcgccaccatggggccccggctcagcgtctggctgctgctgctgcccgccgcccttctgctccacgaggagcacagccgggccgctgcgaaggtgagttcccggccagctccgctcccggcgtcccgccccgagcttgggcgccccgagaggcccctttgtccgcgcctggacccgtccgcctgcccctcgggggtcgcgcgtggcacggccaggtgcattctctgggccggggttcgttgggggtccctgtaggctacgatcgcgcattggtggaccgagcctcctttgttatggtatgggtactggagagttaaggaattcctccggggaagggaggagaaacagcccgcgctgtggcggggtgagggtgcctgggagccggcgggatttgaacccgcgtcgcgggtatgctcggcagctgggcgccttcacccgtcccgggtgcgcgagggagttgggggctggagggccgggagcgcccaccccgcgc

SEQ ID NO: 5703 - DNA, 692 bp, Homo sapiens
  source 1..692: mol_type = unassigned DNA
cgacccgcgaccgcacatcctgcagagacccggcctcgcccctgcatccttcgtagatcccgccctgtgaccacacccctcgcccttcataggcactggcccgcggccgtgcacgccccgcttttattggctccgctccgtgaccacgcccccgcaaccttgatagactccacccccgaggacccttctcaggagcacagtgaccccgcctccacagggtccgctccgccacactgacccttccgtgtcgctcgcgggaccccacccctgtccgcctgctccggtgcccatggggaagcctggtgccaggggtcaccagtcagtccaattcaccgcccgactggtgggacaaggacaggtcagcgggtcacaggccggaagtgagactcgcccggccgctctgggacgcgggaagaccgaggcctcggtggttcccctctctcccgcctggctccctcaggagaaggagcggctaaggtaggacccgacaccgcggtcgtacccgccttcttttctgtcccagagtacagcctgggatctccaggggggagactgaatgagtgctgtcgaggaccggcgagagtctggaacgttcgcgccttcgtaggagaacgaggaggtgacggacagggaacggggagcggccgttgggtgggacgcctgagaccctcgggaaatggccgggtcgccga

SEQ ID NO: 5704 - DNA, 1924 bp, Homo sapiens
  source 1..1924: mol_type = unassigned DNA
cggcggagtaaattgaacgttattctccgatcaaacaggagcttcgggtccacctgtttggaagctcccaggcggcttggaggggtccggccttcgggcgcgacccgcaggggttgccttgcccggctcgcggaacggacgtttacccgtcgcagccacgaacccaccaacgacaccaagcactggccgggcagaccaggcgtcgtggaggcgccccagccccccagccccccgcaacgacgcgtcccaggggtgcgcagtgcttggcgcggtgaccggacccggccgccttcccgaccgcgcagagcgagaggccacaccctggatcccaggccgggtccctgcggttctgggagggaggtcccggacgcctcccagatctcgggcttctgtaaccccgaggccgggttttaaaatcacggctcttccgagttacacggagagtccgtggtcaagggtcaagggcggccttcgaccctcgggatcgtcttcttgagaaatggctgagagctaagcctagagctgcgcagggaagggagccaaagagctggcgccgagcgcgaagggccgggaggcgcggggaggccccttacccgccccactgtcctgcccgccaatgacgccgatgacagcgacagcgtcggccgagtgcttcccctgctccgggtcgtccaggcaccgggtcctccttcagcactcgcagcacgcactgaagaagacgctacggaagtctccgttttccagactcgggggaattaggaaacgcgcccggcgaccctcgggcagtagcaccgggccaggtttgctttcggaaccgctgacgccactcgccgcctttcccgcctgggcctctcgcgggtcgcaggggtggaagcccgacctgggccagggcccggatttcttcctcccggcctctgcgccgccgcccccggtgccaggacgcgctttgctctcgccgagacccagacgcgccgaaagcctcgcgcgggcagttccccgccccacgccccgggctgcgcgttctcccgcgaagcctctgccgagtgcgcgcgacggcgccgccggactcccccggaccgcgctcccgcgcacgcctgaccggagcaccccgcttcacgggggcgttctgcgcgtccttcctccccggtgcgatttccgttctttttcctctcgcggtccccaggagcccaggcacccctcgacgccgctgccggcggaaccgggaaccctccccggggctccctgcgggcccgaagccgccttcccgaggcggcggagttgggcagctccgggccccgcgccgccccgcgccgccccgcggagccggagtttctctccggagtctggacacagctctccgcttcgtcgccgcgcactggaccccggtagcgtggagcctgcccgggaagctgggctgcgccggcctggggcgaaggtccaaggggcgcgggggccgggacgcggggctgtggcgacgaccggccctctgcgaacgctcaggccggcgggtccggggccacaggctgggagtggagctggcggccactggggagtagagaggacgcccaggaacaggtgcaccagggtcccggcggctgggccgagggtcgcaagcagaggggaccggcggctgccagcaagtcccaagcagatgcctccggcggggcagccgcattttacagcgcccattccgcgtacatcgagtatccaaaacgagtaaaatcggtttatacgttggaatgtagcttatgattccaaaatctcatctccaggctgcctagatcacacggccccgtttcattcatttttactgaataacggtcgttggacaatttagagaagcagcagaaaccacgagaaaaacagtggagtcaaacggcggtaaggaccgacaaggctggcggggacattgagcaaacggcgg

SEQ ID NO: 5705 - DNA, 1991 bp, Homo sapiens
  source 1..1991: mol_type = unassigned DNA
cgctcagcctccatccacggagggcgaagacaaaaagcgccccaggcgcgcagggaaaccgcgcaacgctgtgtccattgcagcgacttttccagaaaaacaaacaaggctttccgacaggttacccgcgtaagcagcagccggccgagcctccctttcccgctaacctagcagccagcgctgccgccctccaagatcctttctaatttaagtgcaactcagcaaggagggagagtcagagattctggggacgctcgaggaaatcgaaccccgaaaccctctgctcccaaggcgcggtcggagatttttgggaccccaaagcggagagaattccttaattctctgctagaagagcggggctagagatccctgggattcccttggagtcgaaccctcccctctagcctcacctcggagggcgggagcgaagatcctgaagactcctctagcgcaataaaccctcccaattctgttggaacgcgggctctgggatcgcggggaagcccagaggggcgaaccccggaattccctgccctgagagcgggatcagggatctcagggacccgggagcagagggaacccccgcaactccgccgaaacacagggtgagagatcgtggggaaccccgagccgagcgaagcccgcaactctgcccggcgggcgggatcagacgcgtctccggcgctcccagaccggcgatgtagcgtggccgggagcccaggaccccaagcgccgccgctgtcggcaagtaccgccgcatctctccacaacccaggacccgcatggcaacggccatgctggggggacttcattcaagaaactcgggccccgccgggagcggtggcccacgcctgtaatcccagcactttgggaggccgaggcgggtggatcacctgaggtcaggagctcgagaccggcctgaccaatatggtgaaacccccgtctctactaaaaatacaaaaattagccgggcatggtggtgtgcgcctgtagtcccagctacttgggaggctgaggcaggagaattgcttgaacccgggaagcggaggttgcagtgagccaagatcgcgccactacactgcagcctgggcaaccgagcgagactccatctaaaaaaaaaaaaaaaaaaaaaaactaaggctgaacccgggctcccgcacgcccgcacccacctgcgcggccatcacgcgctgcctctcggcgatcaggttgcacttcttgcactggcagtcgcgccacatgcagaagcgcttgtggcccttgagcggcgaggcgtagccgtggttcctgcagcgtgcgcacttgggcagccgcggggacttcttgctcccggcacccaggtccgacgccccggagccggagccgcctcctctgctgctgcccccggcgctcgagccgctggccgcccccactagcgccccagacgctttgccaaagcccccggctctgccctgcggcggtaccccgggggcgtgaggggcttccgacggtgtagagggcttgctgaatgcctcgtcgttgggcatggtgcccctaggagaagtgcgagcactctggccccctctctcgcctggagactgctgcgagggatgaacccgacggacagcgacgctccggaggaggaggcgcaggagacgtgtgcgctgcagccggaggcgcagctggagtggcgaggtctgggcacgccacgcccggagtggtggggggttgtgccttttcttttggcgcgcgcgcgactcagaactttcggatacttttcagaacattcccgggactgcctgggagggagcgtggccacgcccaccgccccccgactccagccaccgctctccagctgcttgcaaacttgcaccggctgcaagcatccagggctttgctgcagggtccctgcaagcgcaccgagagatacagagcggcctgggaatcgcgtggcacccctcgccccgctctcggaggcgccaagacccggttgccaaagcacggtgcaccga

SEQ ID NO: 5706 - DNA, 1667 bp, Homo sapiens
  source 1..1667: mol_type = unassigned DNA
cgaccccaccgtagtgagtgtgcgcacgtgggttttaattttgtcctgtctcaactccgttgtctccctgctcaatctgacacgttccgaacccttcaacctgggaaggcacctggcgatactgacgcacagtcccgtcgtttggctgcccggaggcgccttccctgcgggcgcgagtgccactcgcgctgggtccagactcagccggcttctcccgggagaggaagccccggcctggcggagagtaggaaggaaagccccgacaggcccacgtcccaaaactttgcctccagtcctcccaagtggagctgcagctggcactccgaagttgcccccgcgcccggccaaactcccgcacctcagacgctcttacctggcttggcgagctgcgcctgcagagccccgggctgcggctcggcagtccaacgcagcgcggcggccgcggccaactcggcagcagggcgcggcggctgcggctgcgacggctgagaggctggcggcggctgcggggcggcgacggcgtcccccggcggcgggggccctggcagagcgcgcagcgagtcggggatgaggctctccaagctctcgttggcctgctgccggcgcagcgccacctgcgcagccatgacccgctgccgctcgatgatgaggatgcacttctcgcaggtgcagtccttgaagcggcagtaacgcttgtggcccttgagccaggacaggacgccatggttgcggcagcgcgcgcacttgggcgtgcgctgcaggggcgcccgtggcggctgcgacaccgggccgcccatgtacaggtagggggagccgtagccgttcatgccccgggctcccgaatgagttggcagcctggctgcgggagagggccagggagcgctggacggcggggctgcgaggcccgctcaggggcggcctccgggcgacgcggcccttggtcccgcagccccggtggtcgtgtgtgctccggggcggccggaggtgccgcagtcgtctctccagctcccttcgcgctcacagctcggcctcccagctcacgcccagccaacgccgacgcgggcctctgccttgggcgcgcagccgggtcggcacgtcctccttcgcggaggcgctgcggcggctgcaaggagccggcgacagctctgattaaggtctgagccagctcttctgcagctccctcgtgagccggccggacccaacacctccgccgccctcccccaacccctcctccttcccaccgccacccccgcccctggggtccctgtctccttgcactccccgccccacgccttcctcctcctttgcgcccctcgggtgcctgcacttcaccttccttgccacctgcagccaggccactctcgcgggggcgctcgcggccccctcctccaagccctctccgctaccccagcccgcggctggagactgcggcgctccagaacgcggcggtgctcgcggggcggagaaggggaggaccagcgggagtgagggtgggggtgcctgtaagcgagtgaggtggccgctccgcttctctctcttctcctccctccagtccagatctggccgcgtttttccgagcccaaggccgcttttatcccgacatttggccgcagaagctcagctccgggagaactcgaacctacgggagtgttgcggttgcaccccgg

SEQ ID NO: 5707 - DNA, 433 bp, Homo sapiens
  source 1..433: mol_type = unassigned DNA
cggtcttctgcagcctcgggcgcctcaccttgctgaggccgctttcggcttcctctgacccaggctgggcgggaaaggtcgggccgcccccgcctggctcagatcgctggctcacccggcgggcgcgcgcagttgcattcagcgcagcgccactggcttcagtctgcagactgcgctccccttcctagtactgtccgctcaggccccggagctttacgtcctctgattggccggttgtcaggcggtgtgaatactgattggccgaggcacgctggcagggagccctccgcctcccgcggtctacactcttctctctgaagcgctccgccagagtccgcctaccgggccttcggtgcagccggctcgcctgtccagaatctaaacccgaggtatgacggtgcctgcaagagagaagtcaccatttatctcgcgg

SEQ ID NO: 5708 - DNA, 896 bp, Homo sapiens
  source 1..896: mol_type = unassigned DNA
cggctccacaccctggcgggcggcgtacggagcgtcccggcccccggcaccagccagcgtcggagtgggtaggactggagatggcagcctccggtccaggggaagcgggactccacggaagggctgggaagagggtaggaagagggggcgggggcgggaactgttccgccccctccccctctgtctactttcattggccaagggcttcctggccccaacccacctcccgcctccagggcgccgcttaaagtgtgcggagcaggtgccttgggtggagccacaactttgcgcgagtgtcttggttgagcgcagcgcccattcattgcccgcgagcgtccatccatctgtccggccgactgtccagcgaaaggggctccaggccgggcgcagccgccacccgggggaccgaggccaggagaggggccaagagcgcggctgacccttgcgggccggggcaggggacggtggccgcggccatgcagtcctgtgccagggcgtgggggctgcgcctgggccgcggggtcgggggcggccgccgcctggctgggggatcggggccgtgctgggcgccgcggagccgggacagcagcagtggcggcggggacagcgccgcggctggggcctcgcgcctcctggagcgccttctgcccagacacgacgacttcgctcggaggcacatcggccctggggacaaagaccagagagagatgctgcagaccttggggctggcggtaaggacctccacccggccctccgcggcctcccctccgccctgcccgggctctgcctgcgcggcctcccggctcctaccctgagctctgctgcgctccgcgtggtccccgcaccctgggtcccgggccgtggcgtggaagcaaattcgtgcctttggtcctcgt

SEQ ID NO: 5709 - DNA, 1494 bp, Homo sapiens
  source 1..1494: mol_type = unassigned DNA
cgagcggcccaggagcgagtttaaaaccccgcacaggcctgctcggccgcgtcccctgattggccaaggcgcgcccgccgccccgccggtcgcaggcgtcacggcagccccagcagcctgggccccgccaccgcctccgcggcagccccggtcggcgcaagtgcggcgcgcgctgggggagggggcgcggcggagcgctaggctggcgtcgggccaccgcgggattaagtttctcagtcacgcgtgagtgtctgtgcgttttgatccgaagctcctcgccgggtcgttacttcagaagagaagacagtgagcgtgggcgaggcgaggcatccagaggccccggcgacccctgctccccagtcctccgccccctcgcgtcgcggccctgggcgggcgccgcgagccgggtaagcggcgcttgagccccggcccagaggccgaggcgcgcccccgcgccctgcgcgcgcgccggcggggaaggtgcgcgggcgccctgggctcggcgcttgggggtgggggtgggggcggggatgggggtgggggtgggggtgggggtaggggtggcggcgggccgtggggcggtggggcggtgcgcttgccccaccccgcgcggcccggcgcttcgcggaagccgctgctgtggcttttttaaaaggatggggtctagaagtttcctttgctactcgcaagtctccactccccccagccccgcggtggataatcctagacctttcagcacccccgccacccctttcttttgctctcgctgactaagaggtttaaaagtttttccttttccttgacccagaggggcacagtcttggtgtcggggggctgggggtggggtgttagcctgggggcccggagcgcagaccaggcctccagggcgcgggagcctgttgctctcccctgcaggggccgctcccggacgccccatccgccgttacgtggtcccgggatgtgcgggttgcggtagagagtgggcagcaatgctcctggtcctgcgttctcgccttagccgcggggaccccgaggcgagccgctaattggtaccggtgccccgtccctcacccctggcaccggcgcccttttaaccgccgctcccgttggtgggagcacgttggtcttgtctctcccttagtctcctcaccccccgcgctgatgggcgtctttgtctgcgatttggcagccccaggatgccggatgttaccagggaagcgatgtttgggagacgctttgtgtcttgcggagttgcgcgtttgttgggtggtgatggtgtacatttttgtttgcgttctttgcagaggcacaaaggctgggctattcttgcctgcagtcacatggaaatcaagcggagactgcgggggaggagaagtggccaggcgccggcgggaggtagaggccgctccgtagtcactgggggcgagtgggggcccctggagacctctactgcgcggtgcggcttttgaggtgctccgcttgggaagaccccgg

SEQ ID NO: 5710 - DNA, 828 bp, Homo sapiens
  source 1..828: mol_type = unassigned DNA
cggaggccacgagtcatcagcccggacggtgaaacctacccctcccctgcgtcccacgtccggatgggagaatcccagcttcctacggcgcatcggggaacaacttcagagcagcacgcgagcagagcccccagcgctcccacgctcacgctcacgaccctcctcccaaccgcgcggcacaaggaggcacttacgcggagccaacctgacagctcccgccggggtggaaacccgcggtctcctcgcaccggcatttcggacacaggtcccgcgtaggcgcgcagctccggaccccgcttctgcttctgctcctgctcctactcctcctgggcaccaccggacagtgctctgacccgcagcccaaccgccggggtgccgacccgcggggacccacccctttgtccctcctcccgcggcggcggcggcgtcagcccgcccccgacccgagcgtggcgcctccgcgctggccgcccggcccgggaaactgtcaaattggccgctaccacccacgcgcctgccggggaagggctcgccggcgccgcgccttcgaggctcctgcggcgaaccgcgtcacgcgcgactcctggccgggggcgggaggcggcggcggcggcaggagaagcccaaggcccgagcggcccgcagcccccacgcctgcacccctccacccccgccagcccgatggttcgctccgcggcgtgcactggagcaagcaggtcccgctccgagcgcgcgcgctctgggaagtgctgcaagtttggagacctggagtgagctccgggcgctgctggcccgactgtccgcggtgtttccccggtgaggtcgcgg

SEQ ID NO: 5711 - DNA, 2705 bp, Homo sapiens
  source 1..2705: mol_type = unassigned DNA
cggggttgttcgtctatttaaataccttccgttccagcaaaggctgagactcgccagctctgcccggcctgaccagggcgccctctccccgtcgggtggtttgggcggttccgggcccggcgtctctcaccccgctggtctccccacgcccgccgggtcccctaggagtgcactagcaccgagtgcaaggagccgcccttgctttcggccgaggtaggggctgtgggctccagcagagaggcaacgggcgaggccgcggccgcggagcacacggtggatggcgccggaggctgctgcgaagccgcggggacagtgagccccggctgcagcgcggacacgggcggcagcgcaggcgtgggcttgatgggcaccggcatggcaggcaggctctggcttgccgagtggcacagggacttgaccgggaccccgaaggccccatactccgggcctacagggactccggctgcggctgcggcggccgcggcggcggccaccgaatccatgacgccaacgtgcggccacacggagctgacgacgttgccaagctggccgggcacggggtagcccaggtggtgcatgacggacgccaagggcagccctccagcctgcagcacgcccttgtagtcccggccaataatgttctcaatggcaaaggggtgcttgaagcctgacgtggacgccgcggccgcggcggcagcggcggcggccgagcccagcccgtagggtgggaactgagacaggcgtcccacgctgcccaccgcggctgccgcggccgccgccgccgccgccgccacggccgccgcctcctgcatcttgccggggtgagacggctgctgaggctgcgactgctggggcggttgctgcgggggctgtgacgggaggtgcggaggcggctgcggagcagtaggcggttgctgatggaaatagtgtaccatgtgcggcggcggcgggggcggcggcggcggcggctggggtgggtggtggtgatggtggtggtgtgcggcagcgtggtgatgatggtggtggtgggggtggtggtggtgatgggggtgaaggtgccctcccggaccggcgcccggcgcgctcttggtgcttcccgcgtgcaagtgagtatggtcggcgcgcagcaccttgaagcgcttgcgacgccgcaggaagctgccgttctcgaacatgtccccgcagtcggggtgcagcgcccagaagctacccttgccaggctggtcgggcctccgcggaatcttgatgaagcagtcgttgaaggagaggttgtggcgcaggctgttctgccagcgctgtgtgtgctcgcggtagtaggggaagcgctccatgatgaacttgtagatgtcgctcagcggcagcatcttctcggccgagtgctggattgccatggcggtcagcgagatgtaagagtagggcggtttttggtcgctgtacgagctcttccccggccgcggcatcgcccccggctcctccaccgccctccggcccgcactggaccacagaatctctccgcactccgttcctggggcctggctgcccccactaattcccactcggcccctccagtcccgccactttgccctctcgccctccaggccctctctgcttctctctcctgccttctccgaattgcctggtgtctccgaccttggcctttcgggcctactcagctctcggaagctggcaacttctggccccgacggttgccgactggcgcgcacagtcgcgggcggagtgcaccaggtttaccgccgccttctctgcgtcttcccccgggtggccaaagactgagtgctggagctggctgcagaggagagtggcaaggggccgtgtttcctcccggcctctttgctttttctaggtccgagggaaacccagaccaagatggctgggaggaaggtctgggcagtagagactctggccctttaaatctgagtttgcgcctgctgtcctggaggccagtgacagcaggacttccagtgccctggacgcaggcccctggccaggcacttagccagaccgcgctggagttctccttttcctggagtgaaaaatcagggtaaggagagagaagattggcttctagggcgcctctcttttctccgaggctcgcagcgtcgccggggttagaagagacgcgcagccctaggctgtcgctgaggagaaaaaactttggtggtttctgaagcggcagcgcccgcaggttctgctgaggagtgtggggcgcaggactctgggagcgagcggcgggctggagagggcgtctgcgaatgctgggtgagtgctggccggggaggctcagccgtccgcgccgcagctgccgcctttctcccgggcttgtcttgaggaggagaggcgacggcagtggcagcgacgcgctctcctggctgcgttttgtaatggtccccgagacgccgagacccccgcagctagcgcttcgagactatcacatgaccgaggctgagggactcagccgccgccgccgcgtctgtagctgaagaaggggcaagaaggcgccgtgcctcgcccccgcccccttttccacctcgtttcgggcgctctccacccatcgcgttcaccactcgctcggcagcccccagccacctcccggtgcggcgggtggcgcaggctgttcgccgggagggggcacagctccgggtgcatttcccgcagctgcgccccacccgggccaccaagcacgg

SEQ ID NO: 5712 - DNA, 704 bp, Homo sapiens
  source 1..704: mol_type = unassigned DNA
cggtaggggtcgtggaagggcagcgccagccaggcgccatgcagctcgcgcatgaagtccagcatctcctgggagctgccgtcggctgacacgaagaccacttcgaagggcgcgggccgccgcgcctcggccaccagcgccgtatagaagtcgcagagcagcggcgtgaagtcgcggctcggcgcgcaccgggccgccgcgaagtacagtgccaccaccttgttctgcagcgccgcctcggcctccaccgtcgcgcccttacaggtcaccaggtgccgctcgcccagaatgtcaaccatggcgcagacacgcagccacctgagacccgaggacacctgcaggaggatgatcacctgcggggaggcggcggcgagcgccgcggtgccccgcctctgtccgcaccaccgggcgctggacctctcaagacctgccccagatgcgcccacaccttggccaggcctcgcctgtggctggagcaattgtgttcgcgccgacaatgagacactcagacaccagagaccccagatacctgggcgacagcgcggcacccgcctctgggagcggggccagccaggcaacctcaagccctcaggtctctgcaccctcccccaactgcgccccgcccacactcctgcgccctcccaccactgcgccccgcccacattccccgcaagctccccaactgcgccccgcccacattccgc

SEQ ID NO: 5713 - DNA, 950 bp, Homo sapiens
  source 1..950: mol_type = unassigned DNA
cgtgcaaccccaagcagcggtctcccgggccggggctgcgcggccgccgctgtgctggcttttaacggtgggagggcaccatcctcttgctctgctctcgttctccagaaggctgtcccggggcccccactctccgtcccgctccggggacagtggctcgcctgctatgcgcggcagcccgcgccggggccggcaccagcagcgcccgggcggatgcagcgagcccacggaggggcatgcttccacgcaccaagtataaccgcttcaggaatgactcggtgacatcggtcgatgaccttctccacagcctgtcggtgagcggcggcggaggcaaggtttcggcggcgcgcgcgaccccggcggcggctccctacttggtgtccggcgaggcgctgcgcaaggcgcccgacgatgggcccggcagcctgggccacctgctccacaaggtgtcccacctgaaactctccagctcgggcctccgcggcctgtcgtcggccgcccgggagcgggcgggcgcgcggctctcgggcagctgcagcgcgcccagcctggccgccccggacggcagtgcgccctcggcgccccgcgccccggccatgagcgccgccaggaagggccggcccggcgacgagccgctgcccaggccccctcggggggcgccgcacgccagcgaccaggtgctggggcccggagtcacctacgtggtcaaggtgggtgcgggcgcgggccgccctgggggctgggggttctggggccagttcggggcagactccttcattccctgaagcccggggtgcggggcgctcccgcgactgtcacgttagaggcaagcaaatgcgcactccttagcaatcagctcgcttgacagcggtgaggagggaactacaaatgcgcttttcccgcatccattgggaaaaggtttaccactcgggtggcccgctccgtcccgg

SEQ ID NO: 5714 - DNA, 4861 bp, Homo sapiens
  source 1..4861: mol_type = unassigned DNA
cgcggcctttgcccctcctcctcccgacctttccggggctacctaaaagccgatcaagccgccggttttctagctgttcccatttctttaccgcccccttcctctgccccgcctgcctctgtgccctccgtcacgtcacagcccgctggctctcacgcctcttttggtctctctgcgcacatctcggtggcgtctctggtgccctcacatcactgtctggaatcttgtttggcccacgccgtctgcctctgccccttctctcacctgtgtcgtttgatccctccgactctcgtctctgggggtcttgcctcccgaactctccggctctctccttccagggcgtgcgctccgctcagtctccctcggtctcggtcggccggcctctttcacgtggccccctcctttttggcctcccttccgcctccctcccttctgggtccctccctccggctcagcctaggggttgggggcggcggcgcggggcggggcggggcggggcggtgacgcggggctggccgggcaagaggcgcggcggcgtggggagggggcgcagtcccgggttcgaccggccgagccccgcgcgccccgcccgcgccctgcgcctccgcccggccggccggcgggggagggggcatgagccggcgcccgcgcgccgccccgagctgcgggccggcctagagccccgcgcgggccccgcgccggagccaagccgtcgccgccgccgccgccaaaccgcgggcgcagcagtgggcgccgcgatgcagcggccgggggagccgggcgccgcgcgcttcggcccgcccgagggctgcgcggaccaccggccgcaccgctatcgcagcttcatgattgaggagatcctcacggagccacccgggcccaagggcgccgcgcccgcagccgccgctgccgcggcgggcgagctgctgaagttcggcgtgcaggcgctgctggcggcgcggcccttccacagccacctgggtacgtgtggcggccgcggggtcgcgggccgggcttggcgggagacagcgagctgaaccgcgggggcgccccgagcctcctccggcatcgaagcagccccgggaagctgctctgggagcgcaggttctgggaccgtctctcggagccctccaggcgggaggcggagggtgcaagctccaggcctcacagaaaccaggcctcgtgcccgcgggccgcccggggagggtgttcgctctttccttcactgcttcccttcggcctccagcccggggaccccgagtgagcatccccagtgcaggcgcactgccaggctacggactctcgtgggtggaagcgacctcaggccacgggcgcctgggcttcgccgcagagggatggccgggagtggccgcggctgcccaacccagggaagtcggacctctggggaggaggcctgcgctcccgagggctgggtgctgacgcgggcccaagccggcccggagtccccgggagctccagcgggcgaggaacgcggccttggccgcagtgcggacctgcttcggccttgccttggggccagaggcctgactgtgagcagctgcctggctgtcccttctggtttcaggtcggctgggcctctgcagggcttgaacggcctgcgcagaccttttcagcttctgccctttcttctaatttggcggggcctgctctgccctgatggtgctgtctccatcgcactccaccctcgtcttgtctttccctatctcgctttccaaccgtctgccggtcggcctccctcgcttctctcattggggtcggcctgcctcccatctcccaccttttccctacgggtcctctgccccacatttacctgcgccttgccctgccctttccgactccagccaggctaggactcgcacctcagtgacaggcctgtcggggaagggaggctcctacgctgtagccgggaccccagcccttcaagtcgccttccctgcacccccccacctcctagtcggtgctccctagcctggagacggcagggccagcgcgctccttctaagtccagctgggactcggccattcggctacctttcgtctccatctgctctgttgctactaattcgtttgaagcgggcacacaatcattttaggactgaagaaaatggaaacatctgcatggggaagcgtctgaaaatagaaaacgtgaacaataatttccaggttctcagggtactttggaatttccgggaagcacccaactccggcccagatgactcctggccaccgcatggctgttgtgccacgcacggaagagcaaatgtgcacgctccgtgcatgttctttttctaacgcagcaaggctgatttggttggagcaaacgccatcttcttaggaccagctgccgttttctttttggtttctactttccccgaaagacaagacacactccgagtttctcgcagctgcaaacatgttcatcaggaaccccgagatctcagaggcagctgaggcctggggaactccaggacagaacacggacagggtcgaggagatactccctcccaaatctggggaacggcaacgttgaggagggtctccatctgcgccaccggcgccgaccggcagggcgtggaggttttgcgctgggaggcactggccaagcgcgagcacccccgcggcacgtggtgcggcagtccctggggcagaggagcgcggccgtagctcacccgggtcctcattctctttcttcgcagccgtgctgaaggccgagcaggcggcggtgttcaagttcccactggcgccgctgggctgttcagggctgagctctgcgttgctggcggcagggcccgggctgcccggcgccgcgggtgcgccacacctgccgctcgagttgcagctccgcgggaagctggaggcggcaggccctggggagccaggcaccaaagccaagaaggggcgtcggagccgcactgtgttcaccgagctgcagctgatgggcctggagaaacgcttcgagaagcagaagtacctttccacgccggacaggtagggcggtacaaggctggggccagcgggctgtgggagtgtggtcacttgccttgctgagggtgcgccctgctctttccagaatagatcttgctgagtccctgggcctgagccagttgcaggtgaagacgtggtaccagaatcggaggatgaagtggaagaaaatagtgagtgtgcctggtggcttcccacccctcagcttcctgggccatgccccggtgcatgcagagctgctctcctctttctccccactgagactctgcccaaccccccgattccctcggtgcctggtacgcaccggaatcctctcagttttttctgccccttgggtaagccaacatttcgtcctttcccgcggcaccttcaggcctcctggcagtcttatgctccccaggccgggccgctccccaggcggcatttggacaaatggccgccatttcccgggacatttccccaccatttcctcatatggaccctgcactccttagtcctacctgggttcaagtctcctcgggggtccccagtccacgtgctggctcacccaggtgctggcggtcccccgtgcaggtgctgcagggcggcggcctggagtctcccaccaagcccaaggggcggcccaagaagaactcaattccaacgagcgagcagcttactgagcaggagcgcgccaaggatgcagagaaaccggcggaggtgccgggcgagcccagcgacaggagccgcgaggactgagggcggtatacggtgcggggcctgggatgcccgcgccacccgcagccccctcactcggcggaaacccgcgagccggcccttccgcgtccaagaagtttacttcctaagcctttttattatgatcttgaatgcggacaattggggccaaacgaggaaggacacagacccaaaagccagacccaggtcccagcgcgcttctgggctctaacctgggagactcgcatccagcccggcggaagctacagtctctaccctgagctccgtggcgcagagcgctccacgcgtattcacgccccgctcctcgcctgcacccccaccccgtctggggcctgccctcccggccggggagcctccaggcacacacccgcttctggacgtcggggacccagcggttgggctcaggccacaacggcctgagattgccccggggcaacccgtcggctcggcctggaggccgggtccccgatgtcgctggggcccctaccccctcttgcgaagacggtgactttttttccaataaaatattttatgacacaatcgggctcggtggagcagcttctgaatccgcagggggtgagggtgggggtgggggtgggctcggcaagataagcggaacgcgggcagttgcttcttaaacttcctttcctccggctctgtcgaaggcagctgtgctcttcaccatcaagcccgggctaggcacggcgggcggctcggtggctgcaggatcctaggaatcgcttccactctgggcgtgaggggccagtctgaactccacctcctctcccttgccagccagagagtcgctggcaggagcggtctggccgcaccgcgggtgcccaaaggagcgggagccagaggtccgccgcagagctcgctccggaagtggcccggacagagagccgcctcggttgttgtttcggtttcctgggacttgaaggaccagttcgtgcggtccttgagatggtcttcaccaaccctttatgaggcggatgggaagtcgaggacgcaaggtttggacagagcccccccaccagcgcggtagcccgcccgcgggtccttgcagcagcaatggctccccagagttctcacattttccgcaggatactcagggcggcggcgc

SEQ ID NO: 5715 - DNA, 999 bp, Homo sapiens
  source 1..999: mol_type = unassigned DNA
cgctgggagccggggcgcgcccctgcctttcgcgtcaggagaaccacctccgcctccggagggagtccgtccccgtgagggccgctcccagccccggctcgccgtctgaagacagcagttccgggaaccgcgacgacagcatcgaactggagatcaggaagttttggtggaaaaggccaaggagtggtgtgcacgcggagcccgggacccgggcggggacagagcgggagcgcgggcgcagcccgttagcgccggcggcagagtctcagccagaggctgcgaggggcccaacaggccgccaaaggtgcttctggccagagatgccacagcgcgcacctaggcaggaggcacaggggacctttcacaggggctgcgggagctggcgcttccccgccctaggccgggagctgagaggggctctagcgcccaggccgactgcgccctgaccgggagccactgcgcccagcgcagcccgagggcgctgagctcggaggatgcggcgcggggcgggggtctcgggagcaacagagactgggatccgagggcccggcccgcgctgctgcccacgcagcgcttccactttggaaagagtgtctcccgcgcggcgggccggcctctccagcgcgcacctggggctgcctctgcagggccacccccgcctccagggaggcccacgctcgccggcgaggaaggatggtgagccctggcccagcgggaaggctggaggaacgcaggctcggaggaaaaagccttttagacctgggccatcaacgaaggtctctatagggactaccaggaccgggacgccgtgggcagaggcgccatgccttctgcgccacctccctggggaccgcgcgttagctcgtggtgcagggccgagccctggggctgtgagcgcgcgtcccgtcttcgtgcgctggtggaaagcggggtgtccgtgcgtgcgtctgcgagcgtgtgtcggctgtaaccgcagggagcgcaaacaggccgttacgc

SEQ ID NO: 5716 - DNA, 1750 bp, Homo sapiens
  source 1..1750: mol_type = unassigned DNA
cgcgcacgcattccagaggccacccagaccatgctccgccgcctgggcgcccaagctgcagtcgccctctgtgtgcaggcagcagctgcctggcaacctccgagcccgctcgcgctcccagcatcgcagaaccagggccaggtgtcccagtggctgcagccaagccaggcattctgcccagcggcggctgcacaggagcagaaccgagaacccgccgctcaaccccacacggggtgactgccgagtgcccatgccagcggccccaatccccctcaggtggaggagtgggcgggaggcacgacctgggggccctcaggctgggcgcgctggcgatcccgaggccgaccaggccatgcacctccagcccgcctgggcacccaagctgcagccgccttctgtgtgcaggcagcagcctccaggcaactctcgagcccgcccgcactccccacatctcagaaccagggccagatgtccctgtggctgcggccaagccaggcggtctgtcctgcagcagctgcacaggggcgggaaccggccctcagccccatccccggtggttgcagagggcccctggctagaggtctcgagctctggcagaggaggagccgggtgggggcagggtctggcgggctctcaggccaggggcactcgcgatccagaggccgcccaggccatgctccaccacctgggcgcccagctacaggcgccaggcaactcccaagctggctggcgcgcccagcctcgcagaaccggggctagatgtcgctgtggctgcggccaagccaggcggtctgcccgcggcggctgcaccggggcaggaaccgaccctcagccccatccccggtggctgcggagagcccctgccagcggccccatctctcttcggaggaggagaggagcgggagtcacggccaggcgggccctcaggcgggaagggatgcgcgcctgcgattccgggatgtcctgcgcgagcccaggagaacccgcaagccagcggcgcctgcgcccgagctgcagccgccctctgccgtccacgcgagctcgagagcggctcccggagtccgggctagcgccgagctgcaggcgcgcgcctaaccgctttgctgggctcacgcggtctgagaggtcggagcgcccaactgctggcacgcgagtaacggcttagttaagctcactcggtctgagaggtcggaggctgcgagtgtcgctgctgaaggctgtggtggaccgggctggatcgcggattctgagctacatcgcggggttgggggtggatcttgggtttgggggtggattgctggtttggtggtggatcttggatttaggggtggatagcggggtggggagggggatcgcggatttggaacttggtcggggtggaaaggccacgaggagccgcggcggctcagtagcgggtggttggcgtctgagaagtcgccaccatgaggaaactcttcagtttcgggagacgcctgggccaggcgctcctgagctccatggaccaagagtacgcgggtcgggggtaccacatcggggactgggaactgcggaagatccacagggtggccatcaagggcgacgccgcggaggtggagcgctgcctgactcgcaggttccgggacttggatgcccgcgacagaaaggacaggtagcgggggctcagcccgcggtgggagggggcccccaggccctgtttgcccgcagcgcctgaggcgggggccttggaggtcgccgggccctggagccgcga

SEQ ID NO: 5717 - DNA, 391 bp, Homo sapiens
  source 1..391: mol_type = unassigned DNA
cggtgctggagcgaggatgcgcagaccgaggcagggaggcgggggtgcgggaggctccgcggctgcgcgggcgcgtgctggtggcctcggcggaggctcagtcccggcccgcgcccgcggcgcccccgctgcggcccgagcggcctggctgcgggatctgtgcgcacggatggcgcggccgccccggcagcacccgggggtctgggcgtcgctgctcctgctgctactgacggggcccgccgcctgcgcagccagccccgcggacgacggtgcgggcccggggggccggggaccccggggacgcgcgcggggggacacgggcgccgacgaggcggtgccgcgccacgactcctcctacggcaccttcgcgggggagttctacgacctgcgc

SEQ ID NO: 5718 - DNA, 817 bp, Homo sapiens
  source 1..817: mol_type = unassigned DNA
cgcgcgccgttccctccggagttcccgagctgctgaggagtctggattgtgtctgtccccagtgtcagatgaaagggcgctgaggctcttggccgctgccccgcgcccagctccgcgcacgcccctctgcgagtccggccgcccagcgcctcttcccgcccgagccgccgcctgcgctccggggcagccgctctgtctccagcgcgatgtggcctcgcctggccttttgttgctggggtctggcgctcgtttcgggctgggcgacctttcagcagatgtccccgtcgcgcaatttcagcttccgcctcttccccgagaccgcgcccggggcccccgggagtatccccgcgccgcccgctcctggcgacgaagcggcggggagcagagtggagcggctgggccaggcgttccggcgacgcgtgcggctgctgcgggagctcagcgagcgcctggagcttgtcttcctggtggatgattcgtccagcgtgggcgaagtcaacttccgcagcgagctcatgttcgtccgcaagctgctgtccgacttccccgtggtgcccacggccacgcgcgtggccatcgtgaccttctcgtccaagaactacgtggtgccgcgcgtcgattacatctccacccgccgcgcgcgccagcacaagtgcgcgctgctcctccaagagatccctgccatctcctaccgaggtggcggcacctacaccaagggcgccttccagcaagccgcggtaaggcgcccgcccctcccgacccgggccctagtccccgggcccttcgacccaccgctgcctgcccgtctctatcccgg

SEQ ID NO: 5719 - DNA, 814 bp, Homo sapiens
  source 1..814: mol_type = unassigned DNA
cggagcacgggttacgtgccctaggctccgggaaccagccctcactggccgagggtccgcggggccgccaggagggctccccaggttcctcccagggatggagcagctacgccttccgagtgtgcccattccaccgatggagcaaagtgaggctctcagctcgcccggatgtctctgcgccgctcgcggggcagctctcgcacagacacgcccgcaagcccccgacccgcccgccacccgcgcccagacacccgcgagcctctggggccgcagggacggtgcagcgcccgccgaggcgccctcacctacctgtgatcactgccggagacctctggcccccctccgctcgcagccacacttgcagcgtgaacgcgtcccggggcagctcgaggtcggcccggaggcgcagctgctcgcctcgcccgctgaaatagagcgcccggctcggcgggctcggctcctcggtggcgcccctcgcctcccgctgctgccgccgccgggggacgcgcacggcttcccaggcaccgcccggcggcggcggcggcggcggcgaggcgcggcggccgcgggccgcccgggtggcgcaggtggccgggccggcggcggggcgcgggggtcggccggcccgcgggtctctccgggcccggcggggacgctcggccagcccgcagcccagcgcggcgctcagcagccccaggtgcagcacccaactccagagccgcatgtccgacggttccccccgcccccccttcgcccctgcaccgccacccggagctgccagctttgggagcctcggcgcctcgactttcttcgc

SEQ ID NO: 5720 - DNA, 1429 bp, Homo sapiens
  source 1..1429: mol_type = unassigned DNA
cgcgagggaaggaccactaaacccaaagacgcgcgtgcccgtgtgttcacacagacgtgtgcttcggcgcctgcacacggccggcgcgcaggcatgcggacgcctacacgaatacataggcatgttttattgacgcatctggggcactttctttcaaagaaagtaaggaatgaaaatccaatctgagagtcaccagggttcatctggaggtcgcccaaggggcagaaaaaatttgtaatgacgctagagtgtttgtccttggtgcaactccactctcgggagggctggatacaatacgtttggaaagctcgaggggctgccttaggatctgggggcggggggtggggtactcagcaactcttgccgcgggctgctcaagaaacgtggaaacacaccctgcgactttccactcccccatacatataggcacgcgattccgtcgccacctctcggaccagcagcccacgtccaacgctgggccgaccccagatacacaggcagtcgggattcccgcccggtgcgcttgtctattcatccctctgcgtcaggctgggacgcgctccgtctgtaaaaggctcaaacgcatctcccgccgcggggcgggatctaggggcccaggccccggggtccagaggcgggtaactttgctaatctcccccagcggcggggaacgtcgcgcaaccgctgagccctgtccgccgagactaaacaagcagaggaacaggctgtaaacacacatcctgacacgtgagtgacatttacgcggtgcgagaagctgcagccaagggaaaggcaaggggtggggggagcgggcaccgacaggtacggaaccttcgcaggcgccggaaacggcggcccctcgacctccccctcccccagaaagtggcaacgaatgcctaagtcccccgaacctgccttttgtgggaggtgacaggtgaacggaattcaggtctggccactctcgccgctgcctacctccccaccatctgcttcctcgcagacaagcagacccggcgcataatgaggtagcagcctccagccggccaccgtgactaactcagaacaaaagcgctccctccacgcctcctccaacaaaggggccaccagccccggcgctccccgaaggctgcggggctcccggctgccggctgcggagctgccgcgcgcaaacttcccggggctcccggggctgccggcgccacggagccggggccgcggagggaggaagcgcaagccgcccggagaaagtgaggccagacccggcgggggagaggggagggagccgggcggccgcggaaggagggtgattgatcagtgcgcggtgcccggcgctctgtcccgttattagaggcggccaaagcagggccacgcaataacctcagaatcgccaactaattgacgctgcaggcaactacttcattgtgcgcgc

SEQ ID NO: 5721 - DNA, 7708 bp, Homo sapiens
  source 1..7708: mol_type = unassigned DNA
cggaggggaaagcgagtcccggaaacaggcgcagcttgtggcgagggtccggtggccgagctgaatcccggggctccgggagacccggtccctgcgggggaggccttttccgaagccgttattggcgggggagtagagaaaaggggaaagaaggggagtggagaaaaagggaaaggagccggccctaagtagcgaggccgaggccggccagaggcaagggcagggggcggcggcgggggaggcagccgtggggcccaggtttggccggcgccccgaaccccctcactcccgcccccagtgcccgggggcgggtcgagattccccaggatcggatccggggaggagcgaggggccgaggggagggggaggacccgggctttctctctccttttttttttttttcctctcaattaggccgattcaatggagctaaagagctcgtaaaatcatgaataatttactcgtgatctgttattaacccatcgggtttcgagctcttgtcgctgggactgaacctgtaatcaaatctgacttcgcctcattttactaaagacgagattgtaggttcaattgtctaaataatggattggaatcaaatcagtaattacgccgccaggcacacacacacaaaaagctggggctgggggaggccgggcgtccggccggtccgcgcgggactcccgcggccgcggcgcgcaaacccaggcgcaaagtgcgcggcccgggcccctcgcccgctcctgccgccgttttcgcacccccagcccgctggcagcccctcccggggtagggggaggtttccgttccaccggggcccgggcccgaggggctgcgggaagaggccgctgcggccccgccccggaaggactttccgaccccgcggcccgcggctctgctgtaagcccagcgcccggcgccccgacggcgccccctccccactcggcccccagctcgccgcccttcagtaaggtgccgccgcgcctcggagggactgtccccagagcaagaggctttgcaaggggtcgtcgtggctgggccacaggatgtgggacactgccacaaacaagctcgtgtccccgtggtcggaaccctgcacgcacacgcacacgacccgcgcccgcacaccccgtccgcgatcgcaccctccagggtccccgctttccagtcctagctgccccgcggcccacactgcggccatttctctcctgccagtgcgggaggggagggaagggcggacgccagatctaggaagactgggctgggccccgagaggccggggagatgccctctttccccaacctagtcccgggagccccgaaagagccagccgcatagccaccgccggcgcaccgaacgccgtttctctcaggactaggagccccggccaaggtcggagaggagggcacgggaacaaacacgacacacacagagacagagatagagagaaaggacggagagaacggaaaggaaaaaaagagagagggaggccagagagaaagtgagatggctgaatggagggtgtctcttgtagaggttaaacaaggcttgaaattcagcctccagcccacctcgctggggcaaacggcggctgaacagcaaaaagcagaaataaatctctgtaccttctactctctttttgcacaatcctaaaaccggcgccgaacctccgtgcccaggaaaacaatacagctccccagccaccaggtgccctggagccgagccccgcgaggtgcttccgagtggaagttgacccacttgataaatagaagcggcttggtgttgggggagccggtctgaactcggttttgtctttttttggggggtggtaggagaggagggatggaagttccagagagctacatctgtggtagtgccttcagcaaatcttaaatccgcgccaccgaccggcctaccgctgcttcaccatttaccaaactgggggctgcgttttcctcccagttccgcacacagggacacacgccccatgatcctccaagcgatttcgttggagcgaacacccgcccctcatttccctctctattcaactcagattctttaagatgaaaataactgacttcttcccgccgtagcaccctctgcacagtcttgggtttgtttttgtttttgcttttttctgcttgtgcattagactaaagggaaaaggaagaagaacacaaaatctccaaatctaattctgttgcaaacgaaagaaagaaaataattgcacataaactctagttcggaagcccggagagtcataaacctttccgggccttgcagacttcgggcagatgttgacggctcatttgccggaactcagaacctctgcagctgtcctgagcagggaggggcgcgggagggggcagagcttctccgggaatggcctggggttcaaagatgccggaaatccgaaccaagccccccacctcaccccaccccaccccaccccggcgcgaggccaggcctgctccggtctcgtccccgcccggggggctcgcttccgagggtcacggccctcaccccagcaggcgccaggaaactcggaggaaaaagtccgggaaaactgagacctgtctttaaaggaggatcgggccgagcaaaaggaaccgcagcctttgctttcctgagttccccaagcccgagttccccaagcctgccgcccttgggacatttcacgaggtcaggccgcactccaggccgagctcggcgccccgggccacagccagccctttctcttgggaccctcgccgccctgcctcgttccttcgctgccccagttcccggccctcagccgcgccaacccaaaacctgtttggcgtcagcgccgccttgctttctccatccctgccacttcctgcctagcaaagtggggcaaaggcccaaaccaaaaagccatctccaaaaaaacaatttatcagagacaaggccctgcacccggagcagcaagggaccactgcaccctctcctcccgctccagccgaggacgcacagtctggaagcccagggggctaatgtcccttctgcgaggccgtccggtgcttaaggctcgctatttgcccagcacacagagattcaatccagctcccggccgtcgaggccgcacactttcccccaaccctatgggggcgcttcgtgcgccgcgcactcaccagcgttgtaggccgccagatccgcaccggggcccgggctcttacgtttcctcggccgccccttctgcacagtgcccacgccattgtagtagggaagacccagagggttggcccctgctgcgcccagccccgcgctcttggccgccgcggctgcagcggccgccgctgccacgtcggcatggttgaagtgtgcggggtactcgccctgcagcagcgcctcgaagtgcaagcggcagtagaccaggctgtccttcatgccgaagtggtcgcccgtggtcagcatcttgttacacgtggtgcacgtgaagcagttgaggtgataaaccaagtcccgagcgcgcatcaccatctccgaggccgagatgcccaggtggcagcgggcgcagcgctgcacagagaagcgcctgtagggaccatggagggaggggctgtgggaacacacggttgggtaccccccttttcctcctccaggtgccgctgctgctgcggggggcaatcccctcctcaagacgaacaacccggcctttatttggaggatgggggggagagagaactagattttgacccaggcctggtcctgtcctaaaatagtttcccttaacacacttatgcctacagagacttctacttcacccagagtctccgcaagccctaggaaagcctttacctgggagtggagggagacacttaccacttaccccctcctcaacctttactcctccctccaaaccagcgcctgggaatcctactgacttttataatttggaagaaacacagagacagggaaagagagagagacacagacgtagagacagagacagagagaatatacatagaccctaatcctaaaactggggagaaggagaaacagagaacttggagtctactagtgattctggttctttgatcttggccacctttcattcccattttctcaaaagacctggaaatgcacccactcccacagctctctttccagctgtgtttcactccagcttgggctgcctaggtttgggggtgcctgtttctataacctcggattaactcaagaaacttcaaagagagaggggagcaaggatcccaactcaagcttttttgtggtctaagctccgagcaggagggcagcttctgctttttttctggttctcctacttcgtagacctttccaagagctccccaaattgctgctttaaaaggttatcacccaacttgtggtggcttggagaacttggggggggagcgggggagtcctgagtagtgaaccctctcctgggactaaacggaaaggagagggccaaactgtaagactgtgcctgagattggggggaggggtcctgaggggcagttgggtgggggggctacctgtagtagtcttccttgcagtagatgctaccgtccttgctgaaacaggtgagctccgactccaggttgagcttgcactcgcagcacttgaggcagcgcatgtgccactgcttgtccaccgccagcaggtagtagcggtccgagatcttgcccccgcagccggcgcacagcgcggcgcggtcactgctgatggacggcatggtctgcgaagggagggaggcggaagacagcagcgcctgcgtcagccagcggcccctccgccgccgggaaaccggcacccacaactccctctgtggccttggctaccctgaacgcggagggggctgccaggacatgcggcgcgcttccccccaccccaaaaggcccatttccatttctgggcggttcagaacccaggcctgcctgcgcagccctcgccagccacgggcccaggccgggctcctggcctaaatggctctggtgcttacctctcttccttccagtcctccctgtcctttcccccaaaatgctcgggctgtgtttagggaccaggacagctactccagtcaagccctccaagagctttccctaaactgcttcttaaatgagccacccgggggataaggtgaccattaagtcaccctccacacagaatcctctttggagagacagcggagttcctgggccccagctccagtgatccctggatccttagaccagaggttaaggccaggacaagtcagccaacttctggctcctctgccacacgggctggggccctcttgggtccggggatgaggtaagtggggtgcagggacaccctcaaagtccgtgggtgaaggacaggttcaacccaaatacttccctatccaaactgaccagcagagaaggtctaaccgaagaagcgctcagaggccgggaggacactggcgccgctgctcctgctcccggagcagagaagcttctcccgtgctccccacctccgcggcctcctaaaggtcacttctgggcccgctggtcgggcagtgtctgctcgtctggcccccagggaggcctgaggcgaggaactggctatttggggctgggcccgcggagccaggtgtagagatccaaatggagtctccttcggcgagggccaggccggagcctgaactcccagccctggcctggctaagtctgaccagtcaagggtctggggacgcgatcaacgacaaatgttggccccgaagacttcggcctctgaaactgcgctgggggttgaggaggatccccgattgccggaaagctgggagcggcccaagccggctggagccccaatgctcccagctggttcgcccttccctggcgccgctcgcggcgccgccagcaaccggagccgagaggtggaggagagcgcggggctgtcgaccccggcaccgggcaaggtgagaagggagccgccccgggccgcggatgggacttcgcttccagttcggaagaaacgctctcctctacccccagggccgagatttcggtttcaaccttgtttcccttctgcgtcccagcagccgggtttcccccgaaccgggagccaccggccttgcattctgaccgaggatccccagcacccagtcccgtgcggcacgaaggacgctccccaaacttcggggagcagaggcgctgactggcccggccccatcccagctctcagccccgaccccacagccgcgcgcctaccgtctcggtgtcgccgcggtcgatggcggagctgatggcgggagcctcgctcttggccctgcggtccatctcgtcgatgaccccgtgcacctcggggcccgacagactgtggaacagcatcgcggcgggaccggcggggccgggggcgcggctcctccgagggagggcttgccccccgcctcagctgcctggcgctcctggcgctaacgggcccggtgcatcgccaccgcggccccggccccgcccgagctcggctgagcccccaggccgggctccgggccccgggcgctcgcggggcaggacgcctcccgccgaggcgcaggggcagctacattgcggggcgcctgggcgacggcgccaaagccagggtcacaagggcacgggacaagcggggcggggggagcaggagactaggacagaggtcggcgcccgccgcgggcgctttcacgccgcgggcatcgcccgcccggcttcagcgcccggggcgcaaagcaagggcgcaaactctgcccgaggcggcgacggctgcggtcggggttcaccctgaagccgctaggtgtccgcggcggcccagctgcctggacccctcccctccctggggtgcgcccccagcccaaggcgaccctcttgggcgctgagtcggcgactggagtaggggtttctccgaagcctgcgagccgagtcgagccaccgggagaattgaagaggaggaggaagaggaggaggaggaggcggaggaggaggtggaggaggagaaaaaagaggaggagcagagtgggaggaggagccgccggccgcgggcccagccgcgcgcaatgctctccaagcgcgcgcctagcccagccccggctctgcagtccgcgccagcgcaagcctccgcgccttttctacagccgcgcctgacatcacgtcctgccgccgtgccattggccgctcggcgccccaggccctggcagcgcgtgctccgggaaggcgggagacccaagagggaggggagaggcaagaggagcagaggagagtcgagatggtgggagctggtgggcgaggctggagggcgggggtgggggggaggcagggaggagggagagcgcggggtttggagtttttaagatacgaacagcttcctgcgatatcttcagaaaggaaaattaaaccctctatcctaagaaggcgcagcaaggggatgctcgtctcactgcggtctcccctcggcctggagccgcggcctcaggcacccgcctgggaggcccgggaaggcaggcctgtggcagagttgcaagagccttcggccggccgtttcccatcgagctccgccttcggcccgggctctgcacagcgggctgcaggcggccgtgcaagcctcctgggtacccggcagagcctgagtggcgagaccggcgagagctgtgactcccggggaggggggccagccagcatatccacgctccaagcccgctagggcccaatctgcagcccagcgtgtagcttctcgctcttcccgg

SEQ ID NO: 5722 - DNA, 3969 bp, Homo sapiens
  source 1..3969: mol_type = unassigned DNA
cgtcccttctgcgagccgcgcgcgtctgcgatgcgcaggctgccctggacccttcggggactggggggactcccttgggaagttaagggggacaccctaagtgtgctttgcaaatcgtattttctgatgtgaaaaccggcatgcgcggtgcggccgcacggggagagcgcgtgcctgggggtggggggcatcgcccaggaaagcggagtcaccccgggcggaaagcgacccccgcagaaagcgccgcgcgggcgccgctgcgtgttcgccgcccacagccgcagccaaagagacgcaggcggccccacgcggcctggttcaccgccgcctgcagtgtccgcggcgcggggcgccccgaggctgggctcaccgtcctctccgcgtccttgaagatctcccgggcctcctcgaaggagcactgctcctccttgcactccctctccagggagcccggccgcagctcctccaggaacgcgttggcgcgccggcgccggtgcaggacgccgtgggcttcctcctgggttacgaagactgggaaatgcgagttccgtgaagcgcccaccgcgtgccccgcccagtgcctcggagaccgccccacggcccacgcggcgggggcatcgcaggttcccgcccgtcctggaggaggggagcggcgctgctcgcgggcctggctgggtgtcctccctgccgtgctcccgggtcagccacccccgtcgcccatccttcccggcctggcctctctgcttccgggggctgatcccgagggcgcgctcgggggcacgcgcggaagccgggccgaagggggctgcgggcgccgccgcgtaaacgtgaggctgcgggtcgatgccggcgaggagaaggcggcgcggccccgggtgccgggcaaccccctggggcccacgtgaaccgcgcgtggaaatccgtacagccgcccgcggaaatccaaatccctcgtctccacccgcaccgcgtctccggcggccagatccgccttccccaggcctccgtcctggtccgaggcgcggcccctgcccggctcccccgacagcgagccccgggcttcctcgccagctcttggcggtcctgggcttctgccgccttccccgcctccgcttggggcccctctgtcccccgcgacccctgagagctccagacctcgcgcggatcctcctggggccggtcctgagagcacagccccccgccgcagctcctggcccctccgtaaccccgacggttacttgtggacaaacaggaccgccgttttgcccatgggaagacggggctggtgagggccagagacgcccagggcgaggcaaccccgtgcgctcagctccgagcaggccgctcttcaggacgccctacagccgaggggaccgtcacccgggagcgccgtgagctgtgggcaccacgcggtggtggagagtgacccccgccccggggcggccgtgctgcccgaacctgcctcagcccgcgaggggagacgggcctgggggcaggcgggagagggaggccccgggaggaggcgagcggggctgagaggacgcgcgggaggggctctggagaggccgcaggaggcgcgttccggagggacgacctttgctgggaggacgaggcctcaggtggacgctgtgggccggtgggcaggagcccgagttctgcaggagcggcctaaattggttactgagcgcggaagaagggacggaaggtgagcgctactgggccacgtggggccgagagaaaggccactgcctgttttctttaaaatcagtttcacacgtcgacgcccctagagaactggtctggtttggaaggaggctgaggatgcaggcggggacaccaaagaatcgggctcaaggaggtgggaactcacggactccgagtcctcacaggaggtgccctgggcggcaggagtgggaggggaggcccatgtccctgcagtccccgacacccacgctcccgggacacccacgacccccgggacacccacacccccgggacacccacgccccccggacacccacgcccctgggacactcacacttctgggatacccacgcccccgggacacccacactcccgggacacccacgcccccgggacacccacactcccgggacaccctcgcctccggaacacccacactcccgggacaccctcgcctccggaacacccacactcccgggacatccactcccccgggacacccacactcccgggacacccacgcccccgggacacccacacccctgggacacccacgctcccgggacacccacgcccccgggacacccacgctcccgggacaccctcgcctccggaacacccacactcccgggacaccctcgcctccggaacacccacactcccgggacacccactcccccgggacacccacactcccgggacacccacgcccccgggacacccacacccctgggacacccacactcccgggacaccctcgcctctggaacacccacactcccgggacacccacgacccccgggacacccacacccccgggacactcacacttctgggataccctcgcctctggaacacccacactcccgggacacccacgcccccgggacacccacactcctgggacaccctcgcctccgggacacccacactcccgggacacccactcccccgggacacccacactcccgggacacccacgcccccgggacacccacgctcccgggacaccctcgcctccgggacacccacgctcctgggacaccctcgcctccggaacacccacactcccgggacacccactcccccgggacacccacactcccgggacacccacacccccgggacacccacacccccgggacacccacactcccgggacaccctcgcctccggaacacccacactcccgggacaccctcgcctccggaacacccacactcccgggacacccacaacccccgggacacccacgcccccgggacacccacactcccgggacaccctcgcctccggaacacccacactcccgggacaccctcgcctccggaacacccacactcccgggacacccacgcccctgggacacccacactcccgggacaccctcgcctccggaacacccacactcccgggacaccctcacctccggaacacccacactcccgggacacccacgcccccgggacacccacactcccgggacaccctcgcctccggaacacccacactcccgggacaccctcacctccggaacacccacactcccgggacacccacgcccccgggacacccacacccccgggacacccacgcccctgggacactcacacttctgggataccctcgcctccggaacacccacgcccccgggacacccacgcccccgggacacccacgcccccgggacacgcacactcccgggacaccctcgcctccggaacacccacactcccgggacacccacactcccgggacacccacgcccccgggacacccacactcccgggacacccacgcccccgggacacccacactcccgggacacccacgcccccgggacacccacgctcccgggacacccacgcccccgggacacccacactcccgggacaccctcgcctccgggacacccacactcccgggacacccactcccccgggacacccacactcccgggacaccctcgcctccgggacacccacactcccgggacacccactcccccgggacacccacactcccgggacacccacgcccccgggacacccacactcccgggacaccctcgcctccgggacacccacactcccgggacacccactcccccgggacacccacactcccgggacaccctcgcctccgggacacccacactcccgggacacccacgcccccgggacacccacactcccgggacacccacgcccccgggacacccacactcctgggacacccacgcccccgggacacccacactcccgg

SEQ ID NO: 5723 - DNA, 2490 bp, Homo sapiens
  source 1..2490: mol_type = unassigned DNA
cgtgaatccgagcctcggccacggtcgccactcgcccttacccacttccacgctgtagtgcgaccagccacccgcgtggcattcgccacgacccagctgggttcacagacaggagctgcctcctcccactgcaggcgggtgacccaaggcccccactgccctatacctgcccagatcgcggggcactcgggctccgcagctctctggccgcgctcggggtccggggagccgggctgcggctggggggcctggaggatgagggcgaagactcgagctggactgcggagagggtgccggcgcgggccgggcttggggggaggacacgaccgggcctccgcccccggataccgcacgcgccgatatagaggggccggcccccggccccggcgcggcgggttggcgcagggcggggtggcggctgaggggcccgggtcccaggtgcgcctcggagcggccccggcggcggtgcgggggggaacagggaggcaggatggggggcggggaggcgggaggggggagccgaggcccccgcgccgccagccccgcgcccccgcctccccgtccccggcccgagcggccgtcatcgcgggcgggcggcgctgcgcccgggtgcggctcctcgccggcggcggcggcgcggccgagaggtgcgggctccgcgcgggcgggacgcggggcgctgctcgcaggagcgaccaggtgggcgccgggccgaccgcagccgccgtcgcgccccctctcgcgtcccgggccctggctcttcgcgcttccctcctccggacttcgcctctccgcccgaggtcgctccctcgcctcgggctcggcttcccggagcccgccgacccccgcccgaggtctccccgcccgacgtcccggtggcagcggcggctcgggctgcgcctcccgttgccgtcgctgctgcggctttgtctcccccggggagggggtcccggcggctctgcgttttcgggctctcggtcccggcgccgtcgttttccgcctcctgcggcccgggcccccgtctgggtccgaccctgcggggcctcgccttggcgcttgggctcctgcccggcaggtttccgcgcgtcccctgtccccgaccctcgggctgggcgcttccgcctccaggttttctctccgtgtttctgtagctccccggcctcgtctctccggggctcctctcgtctcggcgtctctgtctgtcgtctatcgttgtgtctctggctctgcgtcagtctctcttgggttttctcttcgggcctccgctgtctctccgagtctctgatccaatcccccacccctcgtttctctctctctctctctctctcgtctctctctctctctctctctctctctgtctccctgtctctctccatccctccctgtgtctcgtccccgccgggttctctctagctgggcgtctcagtgtctgtgtctctggcactctcggactggcctcgtgtctgcgcccggtggcgtcggtcgttgtctctcgccagagtttcttcccatctctggctcccccggactctgtctctgcctccttcgtctctgtcgggttcccagaacacccgggccgggcgccccagcgctcctgggtcccctggcgtcttccccgcggctgagcccatctctttttctcagaatcggggttttgttctcagacaaacgaatcccaatcgaagcgcatcgaacccgagggccccagatcgggcgcgacggggtccgcgcgggaggagccccccggacggggcgggagcgtggggcctggcaggggaaggccgggcgcggggactgcaccggacccaccccgggacgctgcgcggggcgctcggtgggtgccggcggcagcgcctgggcacagagaggggattacgcgacgggccggcgacagcggctggggcggcggccgcggggaccccaggctgccggtctccgccggccctccctgacccgctgtccctccgcaggcggacgccgcgggcatggactattcgtacgacgaggacctggacgagctgtgccccgtgtgcggggacaaggtgtccggctaccactacggactgctcacgtgtgagagctgcaaggtgagcggcgagcgcgcggcaggggtgcggcagacgggcgctgcggggcctcgctgactctcagctcccgcagggcttcttcaagcgcacggtgcagaacaacaagcactacacgtgcaccgagagccagagctgcaagatcgacaagacgcagcgcaagcgctgtcccttctgccgcttccagaaatgcctgacggtggggatgcgcctggaaggtgcgcgccgcgcgggcctcgacccctgaccccccacagcctgagggggtagggggtgggggtgggagaggggctgaggggatagtaccattggccttcgcgaaggcccctcgtgcgacattagggcccagtcgctgcaagagaaccgggcgctggcgctgggtgggcctcgggcggggaagggacgc

SEQ ID NO: 5724 - DNA, 5370 bp, Homo sapiens
  source 1..5370: mol_type = unassigned DNA
cggccggcccagcgcaggattccgggacaacggatggcaactgggggccgtccggaggctcccaggaccccatcagtgcccgctgggctgggctggtccgccccagccccaagacgcgcagctctcggaacccttggagctgcccggcccagccgcgcacagagccggcggcagagcgggcgcgggccgggcccggcagggggctgaccgggctcgagtgccgggcggtggcggggaaggaggacgagaagcgcttactgttggtagtcttgtttgcagtacagtttccgatcccggaagtagcagctggtggtgagggcttgctgacacgccgcgcactgcaaacactcctcgtgccaggacgactcgttgactcgcatcaggaagcggtcggagatgggccgctggcagccctcgcagacggcgggatgcgggcagtcggagcctgtagcgcacagggcgaaagcccggccgtcagcgccgcccggcccagccccggcgtcccggtcgcaccgggcccacagccctcggccccgagggctcgggccgcccgggatcaccgcctgccgcctgcgctccccggaccgccgcgccaggggccgggcggccccggctagtccgtcccagtcctcgggctccggcgtggagaggccgcgggcctcgagccttggctcggcgctgtgctctccccttctccggagaatccgcgctccgtgttaagacaaatgacaacgagcacggcgcagggtggccggctgggaccaagacaggcgaggtgaggctggggcgctcgctggctgacacgccccacggtggcgttcgtggtcttctatccccgatctccccaaaatctgtggtttgagtgaccagggagacgtttttctcttagaatctcccccaccccaggtgaccttgcgcctctcccaagctcgccaaggtgattgctaggtcctccatcacccctgccacccgccacctaccacatcggagtggcagctctagaacctaagcctggaaaggatggtgggtggcgactggagctgtcctgtcccctcaggacgcctgccggaggcgtacttgcggccctctggcgatcactccaggagtcctgtctctgcctcctccccatgtcctgcaaacccatttcctttatccgttggccccaacgcccgtgtccacagccggacgacgccccatcccacgcccgagaccactcgggcgttccgaccccgcactcacccagcagcacccccagagtggcgggcccggggcgcagggcgtgctcctccatcttgatgccgtccaacatcttggcgcagtccgtctgcccgcgagggaagcacctctccagcgactcgggacctgttgctatatccatgggacgcggggcgcgctgcggaccccgccggccgggctgctcgcccgccggcccgtccacccgctctccgccgccgcggccctggaaccggggaggcgcggcccccgcagggcaggggttgcgccggcccccggcgatcgtggagcggcgacgcgctggccccgggccccggcgtcgtgcgggcgggccggggcggctgcagcccgcgccgcgctctcccggacacttgcagccacgcgcgccggctcctctgtcacctgcttgtcagtcccggaacccggcggcggcggctgctgcagacggagccgcggggaggaggcggcggcggcggtggcggtggcggcggcggcaggcgggggagggggtgggggtgcaggggcggccccgcgggccgcggggggggcgcgcggcgcagcggggtcccgggcggggcgcagcgggccgcggggctccgggcgcgctccccgcgctactccagtgccatggtgcgcccgctgagccgccgggtttagagctggggctggcggcggagggatacgggccgcctcacctcccgaaacttcctgacatttgaaccccgcggccggtatccctgcgccgggatgcgccgccggctccacgtcaaatagtgccgtcccgcccccccgcgcgccccggggctccgcgcccctggcccgcgccccgcgccgcgcctggccccgagctcaggccccggctccccggcccggccgccccgcgggcccctcgcagaagttttgatcgtcttcgaaacaaatccctctgctccacccccttgaaaaattgatttgggagttggggagcgaaggctttcttttttctcctctgccttctttattattaatattttgtaaagctccagcgctacgaggagtggccccgagcgaggccagactgcgcggacggcagggagcgcggcggctccgccaggggacggcgccggccgggagtggccgcttgggaacccccgactgtcggccgaggtaggtcgcgggggctgagtcggagtcccccgggcggcggcgcctgctcggggccgcttggtccgcggagagggccggctcccaggaacgaaggacgggggcgggcagaaggcgaggacggctggccctggactcgtgcaaggggggcccaggcccaggaacggggagtgagcctggagtgtgggtgaggggtctgggaaagctccgggcctggcagagattgggcgggggactgagccgatgggaggttggggccccgggatcgagaatgggggacactgggacgacaaggaaggtcaggcctgggttcaggcgaccgagagtttagaggacaactaaggctggaaaaggggtccccgggcaggggcaggagcagtgggcaagacccgggcctcctagggtttgcagtgaggggcgctaggagggagtggtggccccagggtagcggctctgaagaaattaggttggctgccaagatcggggtcctttggcgggtcgggtgcccggccaggggtcgctgggacgcgcggatcaaggacagtgctctagccagcctgggcaaagtggacctcggcaacgggacgcgaaagctggcgagatggagctgccgacttccgcgccagccgggcctggcacccgcgtccggtgcgagaggccacagcgtcggaccggctgtctgcggcccgtggtccccaccgacgcgcggctcaccggggagcaggggggcggttgcggcccggggtagcggcgggctgaccccccgcgatccgctgcggggcggccccggcccctcccggagcgaggcagcggcgcggagccgggcgggggcggagggcatggggggcgggtcccctgacctcgctggaggcgaaagggcggatcggatttggaacctgcgggaggcttggtcagaagtggccccctgcgccgcggggccccgcggaggggcccggctttgtggaggattagaggctcccgccctaccctacctgcgtgtgtgtcggtgggtatctgtgtgtgtctgtgcgtgtcgggcccccgcctctgcggctcttgcctccgtgtgctccttggctctgcacacacggtatgtgtgtccctgcaaccttccagactcccaggggtgaatctgtggatctgtgtctgagtcccctgcacccgtgtgtatgtgaatgtgtgggtccttcgtgcctgtgtctggggtgtgtgtccgcatcatttcatgcgggggcctaagtctttgtgcgtgtctcagcctctgtgttgtgtctgcgatccttttctgtatgggtgtctctgtcagctttgcgtatctgtgcttatctccggggttctgaatgcttctgtgtgctcgcgtgtctcctagcgtgtgtgtgtgtgtgtgtgtttgtgtgtggtggggggctttgtgccttcgtgtatttctaggcgcctttgtgtggctaggtcggggagagtggacagtcaatgtggagtttctctcccacatctcggtcccctctttgcttgacctggaaaccccaggcctggacccgcgaagttgggctgggcctgagccgccttctccgggcatctggggcgggggcgcggctgctgcagggagaagccgggcgggcaaggcttcggcgcacagagccagagtcccgaggcgcggagcgcggctcggggccggcgggcggaccaggcactttctgccctctgctggtcgcggtccatccctgcaaccggggctgggcgactgcctgcaggcgagagtcctcgttccaggcccagaccctctccctctccttcagggtgcacatggtaatactctctcgtcacaggccctgcacccccaactcctggcgcaaggctccatcccctccccaccttccctgtgcctggcctctcctaccctacagctctcctttccccctccttggctgaatgagggcccctgcgatccagtctcccaggcttctctaactcgggttggcgtccagtgccgatctggggccgctggctgtgcccagaggcgcattccccggaccactcgaaggcctggtctcaaggcaggaggacttgtgggaagtaccccctccgtgccgcgtctggtctgtccgggtgcgcatgcattctcagcgcctcttccgcgctcctgccagtcatatcccacgccaccaaggcggatatagggtggtctgccgccatgcggcccgcgcccagataggggcgctggctcggtggacgccagagcctggctgccttctctggtctggggtggggctgctgagtccacaccccttgggcccctctgcatgccttccccgctgtccattcattccccctacacacacacacacacacacacacacacacacacacacacacacacacacacacacacacaccctccctataggccccgttccttgccctttgtcctcactcctcgtgtcccgtgctcccagctgagttggccggtctcgggtccttcgcacgcagacgcgcaggggtcccagatctctccagcacaatcggggctcccgcgcctctccaccgcttcccttgccgaagaagcgaagaagcggccgactggacggcacagcaggggccgaggcccagagccggctcctgcccgcaggcggcgaacggcaccttgctccgccaggcccctgcgggtgtgatccgtgacccgcagattctcccgggcgcctctggcccatgacgcgggggctgctcgctccacgcaggcggcttcgggatgctctcccgctcagatttcagcggcagaaacagcctcggattctctctacctgggggaaagactgagtcgggggctcggaatcactggaagaagcgagaatggaaagggaggctctggagcgggggtcccggctccttccagtctgcggacgccccagctccattgagccccgccctagtccccccgctcctcttcttagggccttgcaccctctcctctgcgctacccgcctccctcgagcacgg

SEQ ID NO: 5725 - DNA, 3120 bp, Homo sapiens
  source 1..3120: mol_type = unassigned DNA
cggacggaccggcggacgctgcgggcccggccgggctgataggaaccatctgcgttgtcttaggccgcccttcggcccactgtccctctgaactcggccggttcccgcgggccgtttgatgcttgcagggtcacagacccccgcacacaaatcaccgccgcggggctgggggtggggcggaggcgctgaaacctaatccgcagagtttgctccgccgccgcctccttgctccttccctcgctcgctcgacgccccccacccacccctttccaaacaaggcttatttttcttgccaaaaaaacaaagttggtatcaagtgtttcgagggagaaagtctctcccccacccctgacctggaaggaagggccggttgccgactgagccgggattgcagagggggctccaggagaggacgggcgggaggtgagctcagggcttctggctccatcggtccccttccccgctctcgcctgcccgtcccatacttaatggcagcgaatcccatggtccccggccatgtcctgtccctctactcgtcctgcccggaaagggtttcctccatcggagctcccggtccctatgctgtcagagatggaagcatcacttcctgctccttctccctccccataaaacagtccttgcctgtcgcttttacgaggtgacaccctgctctcagcccgatcctccctgcgcccggagcctgggctcggcgcgcaggagactgcgtgcactctggcgtccccgacctctgccagggcgcacggggactccagagcggatcctctacgagttctaataggaggccagggagccgggacatcagagacaaattcctccgaagtccccctccggttccactgactggagcctttgggctgaaaccccacgagctccccacccccatgtccatgaggggagcaaaacggagcccccgggggcacgcaggcttcgtttctgggtgttggttttgcttttggttttttcagccggtgcagtgacccggaacagcgcggccgcttctccgacgcccgcggctccccactgcgccgaggcgagcgccacggctaaagcccaagcctcggcgcccgctgcgcctgccggagttctgcttgtccgagcaggcagcggggctcaggcacggcggcgacgtcgaagggccagtcggcagacagggctgggtctctgcggccagagcgccgcaggaaagccctgcaaacggtgggacgagggtggcggcggcggcggcggaggtggcgagaaaggcgccacgggcctggcggagaagagggtttccgtgggggtggaacaaaggaattcaccctcggaagaaaggggccgagcatgcagccgggaatggccaaccctggagacctgcaggagtgcgagcgctgcgacattagtcccagggatccaacgaaatctgccccgccgagggccccagcctggcatctccattcggcctctctcttctggtcaatcccgctttaatgggggtggtgggtgtgcacccggagtgccacctttcctgggaagaggggacagagcaggacccgtgctctcggtcagaggaggcaaacacatcccactaaccctccccccattcatcctctagtcgtggggtcactgtccccattttccagacgctgccaattaaggcacccgcaaaaccaccccttcccccgcccccacggcaacgctccggctcctgaggcccaagcgcgctcggaaacgaaaagcgtcagggggctacagggccggagccccctcttcccgccgtcctcggaaggggtggaggggacacggttgtaaggtgctcggcttcttttctgtgcttgacatgaataaggggattaggatggcaagtttccgtcgttcactccgtgggacaaagggccccgcggtttgagcggcacagcctctgattaaacgacagagccctgtcactcagcaccatcctaggtacttgtgttcgtgacataatcttattagaagataaaaccggcgaaatccttttcataatgaaaagttacatttaatggccggactctccccccacctccctccccggagcctgctcgcctttccccgttgctgttggatatggctcgcctataattggcatttaaagcaccaagtccgggagaaaaacggggtttagggtttttgtaatccccctaaactgtctttgttcgaaatctccacagatacaagtctgttaagagtaaatatttgtggattgatacaaccacatttcccccctgcaaaccaaatccaaaaaaaaaaaaacaagataaaaaaaaacctgccactcgccgccctcgggctggggcgcaggagggagggggctggggtcggccctagcatccgcgccgggaactcggctttcgggccgcctggttgcctccaggagctgagggacttcgcacgtttctcaggcgggaaaagggtcttagattctcccccgcaacccctaattttctgttctctcaataaacaaacctcccgaacttgctgcttttggccagcccgagggggtcggcaggagggcttggggaggggcgagggctgtgctcaacaaggaatgaaaatgccagctctccccgccagtcttactccctccagcgggagcctgcagtggctccaaggagaatcactggctctttctggaccgcgtaaggccccacctggcggggcaccccgaccccagcccaagagagcccccgagccaccaagggtccccgaaacgctgagaagcccgaaagctgctgcagggccctggactccgggcttcagcctagcgcgtcccaggatcgaattcctccataaatcagctgctgggtgaaagggctgcgctttagaaagggcaggaccgtgtgcgcgtattagagcgcgcggttcccaaatccgggctaaacccctggtgacaccgaaattcatcaaccgccgctggtgcccgcggctcggctgcggagcccaggagcctatgcatggtgtcatcccactcccagtaaagaacatgctgcacgaaccgccgagaggtgggcctggaggggtgcgcgggtggaggccgctgaaagccgccccatccgcgtgtccggacgtcgaaggaagctctcccgc

SEQ ID NO: 5726 - DNA, 3120 bp, Homo sapiens; identical to SEQ ID NO: 5725
  source 1..3120: mol_type = unassigned DNA

SEQ ID NO: 5727 - DNA, 7861 bp, Homo sapiens
  source 1..7861: mol_type = unassigned DNA
cggattttcggcacgggttgggaggagcctagaggcggggtgagctccaggctcgggcggcttagagtcccggctcagggggcgtccaggccaggagtgtccgccgctctcagcccgggtggaagcggcgacggccggacgcccgagtcctacccgcgaccagcgcccctcgccggcccttgcgcccctctgccccagcccgcgcgtacctcccacatgaggttgttgttcttgcagatgtccacgtgctccggggcgatcacgcggccggtgaaggggcccatctcggttcccgccttgatccacgtcttggagaagatgccgaggccctcgccagggatggagctctgagcgatgatcacctccgcaggcagcaccaggctggacagcttctgcacttctgcggcggcggggccaggaaaaccggtcagagcccgaggcagccgaggcccggcccttccttccccgccgggaccccggcttcggtcctgcccagaccagccaaacccaagtcggccccaaatccagagaagccacccgggtgtggaggaagtcggatgtgcggaggctcaacgacctctcctctgtttgcaacctggagaccctccgtgccctggaaagcgagtggtgcgttggggatcatttttagaagtgggtttttagtctctccgcgaattctcaaagcattcgcaacttcttccatcctctgccccggataagtttaagaattaatgagccaacggcagcgagcggttttatgcacagggaaactgaggccaggtcctgcaaggaggtgaaggccaaccggagactctttcgcctagtcggcttccgggagcccactgtgtgtccaggctctgggcactggcagaggagccgggccgtgatcagcgctggggacagacctcgggctggcaggtgttggaggtgccaaagaagcaccggcagcagctggccaggctctgcgctcgctgtgtgaccccgggcgcgcccgagtccctctctgctcccaggccctggggtgccagggagggcggcgcccgggctcagacaaaccccgatgtcatctctctgggcggggaggagccgcggcggcccccagctccccgagggttcccctgtcgggcatctgcggcagggctggaagcggcgaggcgcacaagggcggcctccatgtcttacaaggttcccctctaagctacctgggaaaatacccggcgagcgggccggctgaaaggggggggttaaacggtgtccattgcggcgcggcgggcaatttgtcacgctgttaaagtgatcgcattcattcggctccattcgaaagaaattgctaattctaaattcattagccctggaagaatgctgtagcagtaaattgtagctcaatgcggaggggacttgtttaaaaggggccgaggaattccccttacaaaaaagggggattagatggttgacatagcgtgaatggaagtggaattagtcttcacggtaaattaagagaggaacagaaatcgtaaagggggaaaagagggcgacgcgcagagatgccagagccagggaaagatattgtttgcgggttgatgaatgaggaataagaacttgagacatcttaaagaaaagaaacttttctcgctctctctttctctccctcgctctccccgcggctttttctccccgcccgccctccctccaccccctccccagccccggctgccttttaaagttcttggtttaagtgggaactttcgtgggtcaagcccaagttaactaaatgaatttaaaaccccttctttttgagtcaactgctattacacgcctagtaaggctgtaaatgccgggaacccgccagctcaagcgcaggaggggaagggaggggccggcgggggcgtcggggccgagcgacggggtcgccggggtcggtccttgagccgggtgggctgcggagctgcttggtggctcgcgtcctggtttggcccatggggaaactgaggtgcaccgagcgccgggagagcccaggttggcgcgagtagcagcgaggccgggtatcccagccgcgtctcgcgcatcgccaggacgggaatgggggtcgccgggaggagggattgcgccgggctccgacggctggactcaccgccggagaaggactgcgccagcacctcggcggtgaaggctgtcttggggctggcgtggtggctcttgtcctcgaagagctgctccccgagcacgttgcgccagcggccgtacaggaagctgtgcaggatgtcggaggtgataacctcggccagcgccagtcccggcgccttcagcccggtcttgagcaccagggcctcagccgggagcacggagcccatcatgggcggcccggagctccccggcgccgggggacggccgggccgacgggggaggtgggcgggcgagaggggagcccaaggggcgagaggagagcgctgcgatggagaaggaaccagagcagggggaggacggagaggaggaggacgcaggagggagcgggaggtgagggggcgactgggaggaaagcgaacgagggggagaggggaagagagatggtgaaatctgtagagatggcaaaggcggcgcggagggtggagagacgcgggtggaggcggaggcgggtgcggggggtgcagggtgggtgagaggcgggtggttgcagggaagcggcagcaaggggctcaggcgcgcgctagcctctcgcacactcggccggggccgtcttccccttggcaaaatctcagcgcctttataggagccgcagtgaccctcctaattggttattaatgaccccctgacgtcggaggacagacttgttgtacccggctgggctcgaggagccttcgtcgcgagagcgcgaggggcgggggcgcgcggaccgctccaaacagtacccctccactcctctctccccttcctggtccttcctcccccctcctgtttttccttctctccccgtgggaagcgcagggcagggagggaggctcagccggctctgaggagaggaggggacggagaaggggagggggtgcggcgaggctctctaggactccagggaccaggctagacaagaggggacgcctggcttcgggccccgcgctcccctcaggcctgatctatgttcaccggcctggcccagcccggcgttcacctttactttgctgccccggctggccggcccagccctgcaccgctctccctccccggccagagcccgcgtcctcttccctctccggccctgcactccccgggccgccacagtcgccccgagctcgcgcgcagccctagttgccacgcggatcccctgctcagactgcgctgctgaagccggcgcttcgcttcatacgggccgcgccaactcggtcgctgtgcacggtcgggtgcgaaactcctccgcgggctcacggggctgccgaggcggggccgcagcggccgtcggggctggggctggtcccggcctgagacagcttcatggaaggccaggctcccggcccttgcggggccaggtcgggggtcgagatgggcggacaggaatcgccctggcagcctgtctctgggaaaagaatttcctacgggatatagggggattgaaaggggtcccgagacccttcctaggtgggagcaggcgtgcctgagagcgaagtccctcagaaactgcaggcagctccgcgagaggcctcagtgcgggttcggcttgcggcccggctttccggctccttgctgagctgcaacctcgggaagccggtggcgttgcggcgccccttccttcttgcctcctagttctttctttctcctctgcctctctcttctttcccttcctctcctctattcctcctgcccatcatcccaggagcagacttgctttgcggcggtttcgaggcacctcggagcccagcgatcccctctcccgaagcaggtagctgctgagcccagcggaaggccccgcttcctgcaggcttcgcggctccccagtgtcagcctcaagcctcggaccccaggccctgacatgctgggtgagggagctcaccccacctgccgcacttctggctcccatcaccagcctacaatttcagatgccgctaacagaggtgcctggaccctctcggcgtgggtcaggctcacggattagtctccgctggactgtgtggactccctagaccttctcctcagcgcggaggacttgggtggaagaacagcgagctgacctcccatgagcgagaccctgtccaaacgcctgttggcatagacgcccctccaccacccggacgcgccttggctaagagggtctcacacctggcgtccagactccagacccctggtccccagttcctgccagtagtctccggcatcccccgtccccgttgggacgcaaagggaggaaggcggcggtagctggccttcagaccctgcgtccgggtccgcccgaggctggagcccaaggaagggcacacctggcagaaggcaggaccgttgggcagggcgccagcagagggcagcgctgctgaggagggaggtgggttagggtcgccgaaccctccactcatttttcgacgcagcttgtgggtcgcatcggctccctggccagagctcgagtctgagggggcgtatggagtccgatggctcctgcaggggagcctcaccggggcctacttcttggcttctgggaagacctaggtggagaggacaaagtgctaggagcgagggagacgacgtcggggagcgctgccaggagccaagcgctgcggcagctcccaagccccgaaagcgacctcagttcctccaggacaccaaagggggataaggactgctgtgtgtcctgtggactgcccctttcctctctgggcctcggtgtccctgtctgtgcaatggtttgagttggactttgtgaactgaggtttctttgcttggtctctctttgggtaagatcactttaccccacgacaaccccgaggattttgccctctccagggccacgtcccactgcgggaagccctcaggtctgtgcatcctccgtgctggggtgcagcgtttgggtcctgaaccccggcttagagttagaggcttggattccgctggcgcagtgaccacgggctcggactgcggccagggagtcccattcctctcctccggacccgcaagcccggagagcagtactgggagccgggcagaagcggagcgcagaacgtcctcccagctggtgcgcccaaatctccaccgcgctcacattttgtgcttctagtctagcggcaaaacccacctggacccccgcccggggaaaaaggagcccgtaggtagcgcccagtctcaaggtgcattgaaatagggagcaagaccctgtgctcacatctccccgggaggagatttcgaggggaaacattccgggctttcccagcggatgacccgtgttattttgtcattttccgcggggcccaggcgcggaatgtgctcgcgcaaaagccccctcccctcggccgggccggagctctcaggctccgtcgcccccctcgcccgctggccgccacttggcgatctctttaatattcatgggcgttaatagagaggccctcagtatatcggtccattgtgggcggctcgtaggacttgaataggcctcggccccctttcttcggcgcggcttcccgaggggccgggccaggagtgaatggccccgcttcccgctccgcgccccctccccctttcagggagaacatctttatcctcttctccgctgccgccgccgcccgggcccccattcacgcggccccggctccgggcggaacgaatcaatttgccgcggctcttcggaggtcatcctcgccgcccgggtgccctcttcccctgagcccacgggagtggagagagggccgccgcggcaggccgacggccccacggagggacattgaaggggaagtggaggagaagagcaggggcgacccggaggggtggctgggccggggcgggcaagacagtctcagggcccggcagccgcccggggttggctaatttctagttgttgccccgctcagggcggagcgccgaggggaaggaggccgcggcccaagcccggaggtccgttcgtcctccccttgaggcaccagcgcgcgtcccttcggcccggctgaggcacctatgagaacgggggcgtgtgggacagcccagggccccgcacgacgctttcgttctcgccggtgcgccggggcttagctccgggagagccaggtcccgacagtgcgcttcagggggacgctcggaagggcggccggcttcgcggctcctgcgccctcgctctggggcccgggcctgggtgcgggggaggggggtgcgagtcggtcaggcggggccaaagcgcacgggtccccgccctgcccgccccgccggccctcagaggcgcagaaagaagcccattgtccgccgagaaatacatttttgggggccgagtgaaagcccgtctttcttttgaactttagaagaaagtctcctgttctcgcccctcggagggagagatttgtcccccctcccgggagctccgcgcgcctcctcctcccgaaacatctgccgggggaaaatccaccctggagggcagatcgcgctcgctttaagcctggcgaactcattaaaaagatattagcggcgggggcaggtcccgcgcaggtatcgatcggccggaatgagcccgaggaagaaaaggcgaagaatgcgcccgcgccgcgctcagacgcccacccgccccgcccagcccctgcgccccagccccgcatagggagaggggcccccgcgccgcctcgcactgtctgtgagtcccgcggcccgcggtccagccgcccccacccgggctcctcggcacagcccctcggcaaccctcccctgccggtgctgcgctccgtcctggcttcccctgcgcgcaggttcccggccgctcccctcctccgcccgctgccgtcgcgcgcccagcatccgcgtctctcttctccccctctccttctcttcctccttccccagcgctcccctctttcgctggcgctccgactccctctccagcttcgcacaccctctccgcttcctcctcgcacgtctctctctggctttctgagcctcaatctttcgcagtggcccaggaaattccttcctcgcgtggggcccgcgccgctcccctccccccacccccgttccccgtaagacggttcagggttccagggcgcccccgccggcgcgtacaaaggcgcggctggctgccaaggcgggtgggggcgaggccgaaaaaaacggtttcaacagacgtgactcggggccaggcctgcgcggggctgccggcggagtggcggcctcggctcagtgaatggggacagcggccccctctcccaccccacccctgtcccctcccaatgtaattagctttcaaggctcgggagagacaaaggcgcgccccggggcgcccacgtggagtgcgtaggcgcgaagtcggcgccccgaccggcaggtgactggcacgcgagtctccccaggcgcccaggggcggaggaggggaagcccctcccctgcgcctctcgaacccccttccatcgcccacaccccggtccccaggccagcgatgccagcgccacagcccaggctgatcaaggcggcgggaacgacgggagagacgccggggacaccaggagaccgggcggtgggagagacagaggcgcaggcttctggaagcagagggggcgagacaggggtcgggggagactgaggcaaggcgatgccgaggtggagggagcagatgaaaggccgagtcggagacgcaggggtacaaagactcggagatgaaggaagcagagggggagaggcacggcttccgaaagagcgg

SEQ ID NO: 5728 - DNA, 1434 bp, Homo sapiens
  source 1..1434: mol_type = unassigned DNA
cggccccgcggcgaggggcccagacgaaggaaacgccgccccaggggcgcgcgggcggagatggagtggcccaggctgggggagcggggagcagggtcgccaccgctgcgccggcccgcgacgcctgcccttgcccgccctgctccccgccgcctccctgggcgactcgggtcccgcgcggcgcccgcccagcccggggctccggaccgaggagggggaggaggaggaggaggaggagccgcgccaaggcggccggcgggcgcacttacgccggtgctgcggtccagcgtcccgccgccggccgccgagagcttggtggtgttgaggcccaccagcgagggcagcgtctgggacatccagttagtgatcatggccatggtgctcagcacgaccccgatcttgagcagcggcaccgacatcgcgcctcgagctgcctccagcgcccgctccgagctggcaccggctcccgcgcccaggcggccttcaggcggcgggcaccgcggcgggcaggggcgcctggctgtgtccccgcgccccctcggcccgccgccgcccgcccgccgccgccgccgccccgcgcgccccggccatcgccgcgccttccccgggcgccagggaaggtggccaggtggcctctgcccgccgcgccctgcgcctcgcgccgcccgccctgcgccctgccttgcccggctgcgtccctccgggctcctccgccgccaccgggaagcgccgtccggctctgagcgctgcgcgggctgcgcgcgggggccgcggccgggaggcggggctcggccgggcgggaccgacgcaatccgcccaggaaatgggtggatttttcctctcgctcggctccccgccgccccctggctgctggcagcgaggtctgcaaactccagtccgcccaggagttgggatcagggtgacatgaggagacggacacaccaccacccccagatcataaaatacccggcggcggcgcggggactccagctgggggcacggcccgcggccctcccgtcccggggcttctcccatcctcacgccggggcatccctctccgatccccgcagagggtccgctttggggcaaaggttgccggcagagagacggcgccgtcctgcctactggagcccttttccgcggtgattcgagggtcccagccagcctgggccgtcgcctgaaacccagcaggcagggcaggctccgaaaagcagccagactcgcgagggcctccagcgccaggggggcgtcggggcatcggtggagagctaaaggcgcccctgcgatcccagggcagccgcggtgccctaaggccttgcttgggaggaagggagccaaccggcactcctgacacctgcacagcaaggcgggggctggggtggtctgccgtggcccgcggtgcgcagtgagggccctgggagggcgcacacccgg

SEQ ID NO: 5729 - DNA, 5053 bp, Homo sapiens
  source 1..5053: mol_type = unassigned DNA
cggtccggcaccttgcggttccggtacgcagccctcggcgccacactcaccccttctgcgtttcgggttgagctcccgccgaccatctgctgctcccgaggccaaacctcagcggcgggaggaccctgctgccttctcgacccctctcccgggaaccttagccctcctggcgtgtgctccagctcaggcctctgcctctgggccgctccggcgcaggaagctgcggggccgggacgaacgctggcgggaagccctgacctgggccctcccttaccggtgcccgccctcgggccgggcacgcggggcggcctctgggcaccgcaggtcccggcgcaaaggcgctcagagtccgcagtggcccgggctggtctccgcgacccccggccccgccccgccccgcggccccgccccccggccgctccgccctccgctcggccagaggctccgggccccagggcggcccgcgggcgcagcgcccagcagcacccggagtcgcttggacgccggttcggggctattgcggggtggcgtcgctgggcccgggaaagttcgggactggagagtggcgacgccgggcggcgggacccatggaggcgcgcggggagctgggcccggcccgggagtcggcgggaggcgacctgctgctagcactgctggcgcggagggcggacctgcgccgaggtgggtgcccgggccgagtggctgcaccggggagaccaggagatcctcaggcctttccgggcctggccgcggaggctggcaggagctagaggatctgggcgggagtgggcgcgaggaccccggaacgtccgcgcctgggcgcctcagcctgtatttgttgcagggcccctggcctgggttgtcagggagtgagtgaggttgtggcactgcgctgctccggccagggagctctcgggggtccagggtgggcttaggagacctctgcagcccggagccagctccctgggctggaggaggcgcagggagcagtggcggggcagtgaccacgggacaggagggtccccaagaaggccgccccagccggactctttccacgttccagcggaacagagtcagatgcaggggccaaggtcgagctgaactccgaccgtcggtctccccgaagtcaggtttcagcgtctgcgcccacagacacccgctcggtttatccccgctcagggcccgtctgtaggaaaaagcctctcttctccaggccccccagcttcctggtggcaccactctagctcccagcactttggttcttagggaacctgggcagttctcctcgactcccgggccagctggagccgcaggatggggaaggaggccccggagccagtggggagtgagagggaccggccggcgggaagggggttacatccaggctgtgggggctcgcggttccctacttatttatttatttttcgacggttcctgggaggggttggccgcgggggctggggggcggagagagggagggaggaaggaggactgcgcgcccgcgctcgggagagctggccggagcgggcgggctggcgtccaggctccgccgaccccgccatccctgacacaggagcccccgccagggctggagtcgccatgcagcgtaaggctggggtcgcgggcgcggcgcggggtgggctggggcggcttttgcccgacgcgggcgccggcggcgagctgcggccgaggcgctgtccggtccgcggtgctgaatccgcgctgtgtcggcctgtcgggccgccccgctccgagccgggtcctcgcctgcgatcgctgcccacgatggggaccccgggcgcgcagcgggtcctcgacgctccgcacccggagctgcggttttgccggatgcggggcgcattcatcgccggtttcccgccactgcgtggggaggcgcagcccagttttttccgccggaggtcgagggagccccttcctggtgtctctcacccactgggagatgggctggagccggcggggtccacagccagggaggcgggtgcaatatgtcagtaaatcccggtcccttcagcgggcactcctctcttccagagactttttctaagtgaagagggagtcctcagcccttgacacctggaaaacccgctcacagactcgaggctcccacagggcacccttggacctccccagtgtggttcctccagggggcctgcagtaccgaagtggggtgtggggggcagaagcagcgggaagccagacgtttgagtaactctgacggtgttgggggcacccacgcctgacacaaaggcagtggatcggcttgtccagtccactcataagtaattttgcggctgcccaatgatggggaaggcattgatatttaccccggaggcctgcagacagggccaccaggcagggcagccacatttgcgaggagtccctagaaagagtggccatgacgcttaacatgaaggagacccgatggggtgccccagctccaggtgatggtgaagacccgtttccctatgtttcctgccgggcttcagagagcagatccccctggggtggggttttcatttgagctccacatgcacccttcttggcactggcaacattttgtaattgagtattcagcctcgtgaaatggcctgggctgctttcttgctcacacacatttttagaccgatgtcagtttccccttagctcctgacataggatgcggtgcctgcacactcccggaacttgcggggccacttaagctggctggggaagagggtgtgtagggaaaggaggacccctcggcagccctgagtcctgtgggccggaggggagactggctcgcgttggggtgggaaggtggcttcactgcctcctggtctacgaggtgacccagaacttcctcgtgcccacagagatcccgctgtgcgctggctgtgaccagcacatcctggaccgcttcatcctcaaggctctggaccgccactggcacagcaagtgtctcaagtgcagcgactgccacacgccactggccgagcgctgcttcagccgaggggagagcgtttactgcaaggacgactttttcaagtgagccccgaaacctcacctcagtgtgggagcggagggcacgcctgccccagggactcctcccctcacaatcaccaaggccaggccctcgaagcctgcgtctctcgcaatcccagcccactcctgtcacccaggcagggcaccctgtggcctggccaaattaagggtggggcctctccatgggtgctccctgggtggctgggcctggctgggacatcagcaagtattatttggaaaaaaaagcaatttattacctaaatcacagaagcagtcattagagaagatacacccctatttgtaggattctactggacttagttcctccgaaattggtgatgttttagttcctaatgctggcacccagcggctctggcccagtggccttcatggctccagctgtggggtgtgagggactggccccagatgggtcctctccctccggattcaccttcccagatccagcatgggtcctgcaggcaatggcggctgggctccccgaggtctttctgagattgaggttcccttctcagtgggagtgggcagctctgccccggcggccaggctggcgaccaccctgcagggccggacagagccttcctccggggccgccttcccaggcagccgcttgcctctctccaacccgctcggggcgaaatgagcctcgcgcttccgcgctgagcccggccctgtgcgtcccgcaggcgcttcgggaccaagtgcgccgcgtgccagctgggcatcccgcccacgcaggtggtgcgccgcgcccaggacttcgtgtaccacctgcactgctttgcctgcgtcgtgtgcaagcggcagctggccacgggcgacgagttctacctcatggaggacagccggctcgtgtgcaaggcggactacgaaaccgccaagcagcgaggtcagccgaggggacgacgctcccacctttcctggtctgaaaaaaatggggctgaggccacgcccaggggggcgtccggggaaattctctccccaagcgctcactaagggggcctgggctagggcggtgtaggcagcaggaagccgaggccgggaacggcggagtcacggacagacccgcgtcccgaaccgcttcgttcggtccgaagtgtgcggcttttcgcccctggtcggaattatcgccctaaattcttggccgcgaaggctgggccatacccacacccttagaataaaggggagcccgcggggaaatcagggtgcttggagaagggagccaaggctgaaggcgggggcgccgtggaggtgcgattttagggaaggcgccgcccccgcccccgcggcagaacccgccctccgccggcgccccctccaccccagcccgggtgctgcccgtttttgccaatcgctcccagcgcccgcgccttccgagaagcctgtggggcgggatgggggtgggcacctgaggccccgacgtccccgcgccggccggggtgggagggctgggggtccggccggggccggaggggctgccgcgcctcaccgctcgcccgccgcgcagaggccgaggccacggccaagcggccgcgcacgaccatcaccgccaagcagctggagacgctgaagagcgcttacaacacctcgcccaagccggcgcgccacgtgcgcgagcagctctcgtccgagacgggcctggacatgcgcgtggtgcaggtcagcgctcgcccctgcttccctcccgcccgcggccttgggggcccccgcagagccgggcggccgctcaccccgccccgcccccaggtttggttccagaaccgccgggccaaggagaagaggctgaagaaggacgccggccggcagcgctgggggcagtatttccgcaacatgaagcgctcccgcggcggctccaagtcggacaaggacagcgttcaggaggggcaggacagcgacgctgaggtctccttccccggtaggcggagggatcgcggagctcggggggggacgagcgcgcgtcggcggggtcgcaggggtcccagggagcccgcgg

SEQ ID NO: 5730 - DNA, 6343 bp, Homo sapiens
  source 1..6343: mol_type = unassigned DNA
cggcagggcgggacggggctgcggctcaccatggaatagccgtacacgtgaatcttcttgtcctgactctggtgggagatgcgcccgccgcccagacactcacagtcgcagccttgcttctgcatgtcgcccgacactttgtcgtagatgtccgctgggatgggagggcggcctcaggacgtgccctggccgcccttggaggccgcgggaggaactcccagccgaaggggtctgaaatcccagctctgaacagccccttccccaggagagacgaagccccttgaggctgggacagggatgaatgagcgaaggagggtggaaccggggagggcgcgggaactgggagactgctggggagggtgtcaggccgtgtcacgcccttcccgcccaggacctcagcctgggtcaaacctagcaggggcaggactcggagcagagcgcagtccgctacggcccgcagccccgcccccgccccgccagccccgcccctgcctcgtcagccccgtctccgtcccgccagccccgcccccgcctcgccaggcgtgcccctggcatgcccgcaggtcccgccctcaccatggtactcagcccacttgtagccgcgcacgatctccttgctctctgcagccggagccccggagcggggagccgagtggactcggatcagcacatacttgaagacgccgtcggagtcgatgtccacatcaggaatgagagcgaggtccgccaccgccatgttcctcctcccggagtcccctcctcccacccgacccgggggccgcttgtactgcgggaggcgggctctgcgagagcgacgaccaatcccgtcggggaatgcttcccaaggcccagcgcctcagccaattgtaccgccgaccgaggcacgtgctgaccaatcgcaatccagttccttgccgccttgcggctccgccagccccgcttaaaggaaacgtggaatcgggaatgggtggtgatgaaatccagccaacggagaagttcctctccagcggggtccggtggcacccttggaacggggcagttaggcggcccgcgaggctggggcaacgagggaggcctgagggacttgccagccctgacctcctgtcccgcacgtagtccgaagaccaccctccccgtggcccccaccgcccaaaggcctccctctctccccctcccaccgcccgaaggcctcccccctccccgctctccaccgcccgaaggcctcgctctccaccccctccaccgcccgaaggactccctctcttccccgtccaccgcccgaaggcctctccctttctcctctccaccgaccgaaggcttccgtccccaaccccgctaccggtacaaggaggcaacggcagccgctacattcaagttctattttacttggttcgaaagctcttgccccctggaaattattccggtccaggggcgttcccggccggccctcaggggtggggccgaatgcagaggccctggggtagggggcgcggggcgcggcggcgggtgggcaagcgggacgcctggccggtgcagacgcgcggggacgagatgggcgtgccgggtgcgaaagcaggagcggaggcgggggtgcccaatttctctcacttggtgccccctcccctggctccgaagtagggctggggactccaggagggcccttgcgtttggcctccacccctctcccgcataccccaccctccagagagctctgggcgcggaccagggtgcacttgggggacaggtggaggccgggccgccgggcttgcgcctccacgcccgcagtacggcgtgcggccagagcgggtgtgcggggacctctcgggacaggtcaagccccctcgggtgggcttccacgcttaccaactagctctctccctcacctgctcgcaccacgctttgccctccaggctcccacctgggaacgccccgtcccttggtccttcctctcctagccaggtgtcagctctggccaggcccaggtgctctgcttcccctgttcaggtcccctgccccttcggctgggagacttgcatatcggcctgaagacctccctgcggtttttcccagctcctgcagggcccagactgcagcggctggaggcgaagggacggcagggcgcgtggcgtggttagtgtgctggctccgaccagcgggaacgcactgcgcaccgtccgccctgcccaccgcctcggcgggacgcgctcgcgcacacggacgcacagaggtcgaccagggtgttctccagcgaggaggcaacacagccgcgggaggcggggcggggcgtgtttaaagtgacagactgggctttggttacgtcgggcttctggacgaggggaaaccggagtcggggaggctccagcgagagccccgcggaccgacggggaccggatctctacgggtggggtctgtgcagtagtgacccctccgagtgaaggcagagctcggcggtcctcaggcccaccccgcctcccagcggggagcaccgagggcgaggaccgacttcttctggggatcctcgagggcgagctgggagagggaggaggcccggaggagggagaggggttgctgggggtgggaaggcgaagggcctgtgaggaacactacggggacgaagggccggggggtgggggcctgggcggagctggaggccgaactgagcggagcttggaaggctggggaattagaggcggggcctagaagaagtcggggtggggccctggcggggctcgggggcggccctgggtgggccgggcggggcctgagtgggcagggcagggttcgggccagcgcctgggctaggcctggtgggcccggcgcctcacatgatgtcgtccagcaggttggcgctggccacccagtcgagcgcgcgcggctcggaggcggccatgatcatgcacatgaaggggcggccggtgcgccggtccgtggggtagatggtggtgggcgtgaagcgcctgttggcctcgacgaactcgcaaagctgctcgtagacgcgcgggaactcgtggcgcaggaagacgccgcgcagccgcagctcgcgctggatgtggatgaaggccacctcgcgcgcgcgccggcccgcctcgccgtcctgatccaggcccgccgtgcccggcggtggcgtcaggatcagcgtctccatgtcgggctcgcggctccgcgccgggggcggccgcgcggggctgccggccgccagcgctaccttggcgaacttgcgcactgttggcccgtggctgcgtggcgcgggcgcgggcagggccggtgtccccggtggcgcggtgccgggtcccacggccacggacacgctgagcaggaagcactctgccggttcgtagaggcgcccagcggccgccagctcgcgcgcgtagctgcccaggggcgccgcgtgtgtggccagctcacgcagcgataggtaggtgggggatagcagcagcccctccaggccaaagcgcaggaagttgtcggccgagcctggacttgggaagcccaggaagagcacgccgcggccgcgcgacaggaagccgacacgcgcgatgcgcgagaaagcgcggtgcaccgggccgctgtcgcggcaaaactgcagtacgtggcggcacacgctgcccacgcggccgtacacgcagcgcgccttgtgggcgtcccagtcctcgcggcggcacaggcgcgagcagtagtaggtgtagcagctgtggcaggacttgaagtagaggcaggcgttgaacatggtctcggtgcgccggcagcgcgcattggagcaggtcatcaggtcgtcctcgtcggcgctgggttcgggggacgcgtcggccgcctctcccggggccgcgggctcctcggcgctgccggccgaggcggggggcgagcgtggcggcgccagcgcgggggccccggagcccgcgggccgcgagtccagcagtcggcgcagttgggggcccaggcagtcggccgcgggctctgaggcctggccggcggtgggtcgcgagtcgatgaccaggtccgtgatgagctcgtccagctgctctaggctccgctggcggccagaggtggggccgtcgggggccgcgtggggaggtggccgcgtgcggcccccgggcaactcccaggccctggcgctcgggcgctcggtggcgcgcaggtcattgtcagtgatggtgatctcgggcgtcacgtaccagttgcggcccaggccctcgcccgcgcggcccttctccgtcagcgacgtctcggacagggacagtgcggcgtagcgtctgggagaggtggacaggttcacgacgacgggcgggcgccggccttcgggggacacgcctcgcggctcccgcacctcgcgccccagcaggttctcgtagctgcggccgcggcccaacgggtcttctcggcgcggccccggggccagaatgttgtcccaggagcgcgagtagtggcggctgtcggtggccagccggggcggactggtgccggtgccgccgtgccaggaggcgagcaacgggtcggggtcagagggcggcaccacttgcagggtgcggtacggtcgcgggccccagtccgcccaggccgggctgctgcgcgggtgcgggtacgtccgagccaggacgtcacgctcgcggtaccttccgaagtcctccgtgtaaaaggggcgggcggtggagtgggcccggggctcctcggggacatagcggggcccgtagggcaggccgtaggctcgtggagcctccccatagtaggagcgggagggcggttcctggattgggaaggtgcgcacctctcctgcgtagtagccgcccatgcgccttggactgggccccgagagctcctcggacggatagggcctggggtagtaggcgtcgaaggttgggccgggactggctgcaaagctgccccggaagccttggggctcctctgtatagaagaactgggtggggcccggcggggtggtgaagggcagactgcggcgctcggcgtagtcccggggcccaggcaggggcccgtcgcagtagaacgcccggggatccgcacagtatgagtcgctgggcgtcggggtgcgcgacagcgccatgtggcggggcccgggcaccgtgaggccgtggaactgcggggcggggcgggcccagtgcgcggcctcggtgggcccgcaggaccgcgagccccgggtggcgtgctggagcactgcgtcgtctggcttgatgtccaggcggcagcgcacgtggggggcgggacccgcgggtggctcgggcggtgcgcagcggcccgcggcggcgcacaggggcgcgacgcggccggggccgccccgctgcggctgcaacttgatgggatgcagctcgttggcaagggcgcggagcgccgggtacgcgggctcccggcgcggcgatgcctcggcccgcgccgcacgctgggcctcccgccctcggcggggcaacaccggcggcgaggcgggcgcgggcgtcaggcccgggggcgcgcggggcgcactcttggagcgggcgcggcggcgtggctcggcttcgcgggtccgggcgcgcggcacagcggactccggcggcggtggctccggcagggtctccatggccggcccgtccagcgcctccaggaagtcgaagctgcggcagtggcgcttgttgaaaggcgcgggctcagcaggccgggccacggatcgctcacatggcgagcacttggacgcgggtcccggggtcgccaccttgatgtcctggtacacggtcgacaccagcaggtccggagggtccgtacgggtcatcttaaaagaggtccccaggctggcggctccagctcacactgccttgcggggcttttgccctggggggagacgcgggtcagggcggccccctccgcagcccaggccccgctactcccccacgctggcccggcttacctggggcgcagcgggcggagcagccctggctgcgggcctgggccgagaacgcgggcgcttcctccatgccggggtcagaagcacctgcgggaggaacccagctgtccaggcgcccgtcctgcccgtccccccgtcctctccctgcgatggggcgggcgggccagaaaggcttagccgtggttgtggttcccgcggcgggagctcccgcgtgaagctccagggcctcccctcccccgactagtgacggcggggtcggctcgggtggacccctttccgggtggggtaggggagtgggggcgtggtcctggggctgcgccctctggtgtccgcagttggaaggacgggccgcatttgggccttatttataggtgttgccccaggagacgtcagtgactgcgcccccgtcacagcgcccactgcagagcgacccctccgatcgcgcacagtggaaggcga

SEQ ID NO: 5731 - DNA, 1089 bp, Homo sapiens
  source 1..1089: mol_type = unassigned DNA
cgctgaggggccgcactcacccgcgcaggtaccagcaggcagccctggcgtccgcgggaggcggccgggggcgggggtccctcggtgcccatcgccgcccctgcggctgggtccgcgctccgggccggccgagctcaacgccaggaccccgtccgagcctcccagggccccgccaggcgccgcgtccgcgcccgcgcccctctgccggctccggctcgggctccaccggggcgcagggctggggaaccggagctccgcccgccgacccggagcaccgcccacgcagacccgccccgggcgagggaggggccgggcgcgcacccgcggggagggcggcgagcggggatcagccgaagtcgggagaggggcgcttccacggggcgggaaactggcgcgcgactctgggggaagtgcaggatggggggacaggggcgctcccgcgggggtggatgggggaccatagcggggctggcggggcaggggccggcgcacgaggctggaggaggggagcgcgcgcttctacccgggctgggtcgccgaggtccgcggcgcatcgtggcggcggtgggcggaggggggcggggggcacctcttctcccttgtggcgcaggtgggcgcgctctggaccggcttgacgacccctccccgccgccccacctccctggccaaaggttctcagcttctaatcagggacatttctagtccacagcctcgaagccatgggttctccccggccctctgaagccgccacacctgtgccagccggccgcgtcctcagacctttccccgcggagtcttcccagcacttggagacgcagcgcagggccccgaggacggcctggcccggagaaaagataccgaagctccaactttccccaaccccgctcccctcctccttccaccctcccttcccgcccccaaagctcgggggtcctatccctcctccggtccgcggagtctcccgaaccctgcggggacccggcgctcggcggtgccctcctggggcgcacggggctggggcgggagcgaggagaccaggtggggaggggaccccagatctcagacgccaggggagacggcgtttcccgc

SEQ ID NO: 5732 - DNA, 1020 bp, Homo sapiens
  source 1..1020: mol_type = unassigned DNA
cgcagagatcgcagagaccaaggaggcgcccgcggctgcagagctgcagagcgggatctcttcgagctgtctgtgtccgggcagccggcgcgcaactgagccagaggacagcgcatcctttcggcgcgggccggcagggcccctgcggtcggcaagctggctccccgggtggccaccgggacccccgagcccaatggcgggggcggcggcaaaatcgacaacactgtagagatcacccccacctccaacggagtaagtgcccgagccccaggtggcgacgccatcctctcccagcacccccgcccccgcggagcgtctggcattttcctcctgcgcatccctcgcccctgactgccttcctagccctccctcccacctgccccctgcccttgctctgcggtttcctccgcttcacccttctcctgccaccccctgccccccaacagcaggtcgggaccctcggagatgcggtgcccacggagcagctgcagggtgagcgggagcgcgagcgggagggggagggagacgcgggcggcgacggactgggcagcagcctgtcgctggccgtgcccccaggccccctcagctttgaggcgctgctcgcccaggtgggggcgctgggcggcggccagcagctgcagctcggcctctgctgcctgccggtgctcttcgtggctctgggcatggcctcggaccccatcttcacgctggcgcccccgctgcattgccactacggggccttcccccctaatgcctctggctgggagcagcctcccaatgccagcggcgtcagcgtcgccagcgctgccctagcagccagcgccgccagccgtgtcgccaccagtaccgacccctcgtgcagcggcttcgccccgccggacttcaaccattgcctcaaggattgggactataatggccttcctgtgctcaccaccaacgccatcggccaggtgaggcggccaggcgggccgcgggtctgggggcgggcagagagcggcgagggcggggcctcacgcccgc

SEQ ID NO: 5733 - DNA, 6343 bp, Homo sapiens; identical to SEQ ID NO: 5730
  source 1..6343: mol_type = unassigned DNA

SEQ ID NO: 5734 - DNA, 1109 bp, Homo sapiens
  source 1..1109: mol_type = unassigned DNA
cgacatagggtggcgtgcagggagcgtgctttggcaccaggcgggcgcgagggggcagggcgcacgcccgggacacgccttagggaaaccgctcctgggcttggtagctgaacttagacgtcgagtgcagcccgcccggtgcgcgcggcgtcttactgccagatctcggaaatcagctgccagggtggggccgcgttttggcgacggccactcggccacccctgccgctcccgcctctcccaagagatttttctagcgggttaatttcctgtccgggtaaaccctttggtgagtccctcgcccctccctccccgcccctcccctctccatccctgctgtcccggctccccagtccgtccgcgccgcgctccatcgcccccgcacgcccgggcgcacgccctccccgcccgggccgccctctggctccccgcgcccggcagccagtgcctcaccgcgccgtcccgcgccagggctcgctccgagagccgcttccttctcgccgcggccggcgcgggccccccggccatgcgcccccgagccccagcctgcgccgccgcggcgctcgggctctgcagccttctgctgctgctcgcgcccgggcacgcgtgccccgcgggctgcgcctgcaccgacccgcacaccgtggactgccgcgaccgcgggctgcccagcgtgccagaccctttccccctggacgtgcgcaagctgctggtggccggcaaccgcatccagcggatccccgaggacttcttcatcttctacggcgacctggtctacctggacttcaggaacaactcgctgcgctcgctggaggagggcacgttcagcggctcggccaagctcgtgttcctcgacctcagctacaacaacttgacccagctgggcgccggcgccttccgctcggccgggaggctggtgaagcttagcctggctaacaacaacctggtgggcgtgcacgaggacgccttcgagaccctggagtcgctgcaggtgctggagctcaacgacaacaacctgcgcagcctcagcgtggccgccctggccgcgctgcccgcgctgcgctccctgcgtctggacgggaacccctggctgtgcgactgtgacttcgc

SEQ ID NO: 5735 - DNA, 1109 bp, Homo sapiens; identical to SEQ ID NO: 5734
  source 1..1109: mol_type = unassigned DNA

SEQ ID NO: 5736 - DNA, 1384 bp, Homo sapiens
  source 1..1384: mol_type = unassigned DNA
cggaagggacccgccggctgcgcctcgctcaggctggccggggccggtgtgaccgtgtgaccccgtgcacactgcgctcgggttttcgtgaatgacagcagcctgcaactcccagccggagagcagcggtggccaccgccgggcggaaagggttacaagccagaatgcaaagcgatttcgccccgggtgtgggggaccccgggtccccggccacctccgaggccgggcgtgctctgctcgccttcctccgccctgggcgccggggcgatcctaccttgcgctccaagctgggggttctccatgttcgtcgccgccgagtcccccgccgccgaggcgctggccgcggctcccgggcccgggccggggccgccgccgccgctcagttccgccagtctccggttggtggccgtgagttcggctcgcaggttggtcacctcctggctggccgactggaccgccccatcgatgcggagcgcgagctgcttattgtcttccatcatgctcaggattttggcctgggggcgagagaggtgacaaagagctgcatgatgcgcggggggcgcgcggccgggcacccccggctctacctgttgtgtcctccgcggcccggcttcgcccgcgccccgacccccaggcaccggcagcgccggttcctccggcacaggaatgacagcggcgcctccagccctagccgcggcggtggcgaggcggcggggggaggaggcggaggagaaaaaagaggaggagaaggaggaggaggagcagcgatcgccgagaccccggcgggcgggcgccgagagctgctccaagaaggacaccgcgcgccaccaggcactctttaaatggagcctaccattcgccgccggctcgggagggggtctcggtcggaggctgggggcacccttggcctcccgcgcccccgtacttcggagacacaccccccgggggggcggaggcggcggacggcagtcgggagggggccaaggtggcgcccctggcgaggggcaggggtcgcctggaccgaggccggccctctgtcccctcccttgagcggtggggcagcccccgccctggagaactggtgccccgagccgtgctaaggttggggaggtgctgggtgctcggaagagagggtgcttggaaagggggcctcagaggggagccggggtggatctccatggaagggagacgcttgcgccagctcaggagtggagttcgtgctccaccggttccttaaactgcgagtacgaaatccccagaggggagctgagctggtgccccgcgtgcctctcactctccaccccccacccgcaggccagacctgcgctgcccaccccaggagggagcgcctatcttcctcggcgtgggccgctggtgctcccgc

SEQ ID NO: 5737 - DNA, 1384 bp, Homo sapiens; identical to SEQ ID NO: 5736
  source 1..1384: mol_type = unassigned DNA

SEQ ID NO: 5738 - DNA, 835 bp, Homo sapiens
  source 1..835: mol_type = unassigned DNA
cgtgaagccggcgccactcagtccctcccgctaactgcccatcctctccggccattgcctcccgagtgcccatcgagtgcccgtgggtcagcgagcggggccgctggaggaaggggcgggtgtgcccagggctggcggcgggcccggggtccctgggaggaaagggccgctcgctcagccccctcccggagcccagagacggccccggcggcgcgggcacacaggggcacatagcgcggggcggagggagggggtggcggcaccgtccgtggagggcgcgggctcgcttagccttccgcaccggcgctccctcgcgcggtgccccttccgcacactcacacgcactcattcccacagctacacactccagcacctgcaggcacaaacgcttgcagggacacaccacgacacagacacccaagcacacacaggtatcggctcatagactcgtccctgagtcacacacaggtatcggctcaaaggcacaggcaggctcatagactggtccctgagtcacacatagcccagactcagatgcacacacacagatgggaacgctcgcctgcacgtgcacagacacacggacacacccgcacaccaccgcggggttccgagcacacacgcgccccggcagacgctcacagacacacgcagggccgggagcgcacacacacagacacaggctcatatagacagactcggtcctaaaaatacgcactcgcagaggcaaaggctagcgcacaagcacgcacagacacaccgacaggcggcccccggacaccgcgctccctgccgcactcacggcccacgcaagggctcacacacggcctcacgg

SEQ ID NO: 5739 - DNA, 2248 bp, Homo sapiens
  source 1..2248: mol_type = unassigned DNA
cggttcccgggtcagtctcccgctgccaccgccgtccagccagcgcccgccgcgtgggagccgcgaggccaggctccgcagacggcgggctcccggtctcgctgctcccggcgggcgcgtctcctccagctggtccggccgctgggctgccgccgtctcccagctcgcggtgccagctctcgcgctccacgcctggctcccgggctccgtgccctcgcagtagaagggactggggccggcggggcgggtggggacgtctgggaagcgaggagagtcctcgttctccgggcgtccccctacaatggggccagggtccccttccccgccccccgcgcaggtgtgagcgcgcgagtgtgcgcctcggcaagtgtgagtgtgaagtgtgtgtgcgcgggggagtgcgcggagggagcgcgggcggcgggcggcgcgggaggcgggaggcagggcgcaggggagggggctgggagggagagtgtgcgcgcgtgcaactccactccggggctttgtgcgagcccgggcgatagcatcggcggcggctggaggaggagcggccggagacgcgtgcagcccgcccgccagagcccggcagccggggcaggtgggagcccgcgcgggagccgagccgacgcgagtcggagccggagccgagtccgagcggagtccgggcggagcccaggagcctcgctcgcgggcagcccgtgggcggcagccaggcggggcgggcgccggcggggcggccccccagtaagatgtgcgcggcgccgcggggcgccccccacttgcagcggcgctcgggagccgggcggctgggccaggcggcgccttcggggctgctgcgcgcccgcgcctagagctgccgccccagggagcccgccacggccgcgccccgggcacgctcggcggcgcccaacgatgaccgctccctggcggcgcctccggagtctggtttgggaatactgggccgggctcctcgtgtgcgccttctggatcccggactcgcgcgggatgccccacgtcatccggatcggtaagcgctccctggagccgggggtctccgtgcgcccgggagggggcgggaatgagggggcctcccaacgcgttccggagagattttcctaacctctctccgagctgctgagccgatcggtgaccaccaggagctcctccctgtgaggacaaagttccagagtcggggtcacgggccttacttattggggaggaggccgccgggccgcagtgggcgaggggcccttggcgcgctcctgggaggtcagacctggcacagtgtggcgaaggtttccagtgcgatcccgagtcgagggcgcatttcgcggtgactgccagcatgaaccgcagccgaccgagttctgcgatcgggcttctccgcagagtggggaccctggggaaggcgccaacttctctcctctgcccacctcactccccgcgggcccttcgtccccacctctggcatagctcgagcagccgcagcgaggtcgcagggcacagattcgcatgacgagggcagccggtcttctctcctggtggtcgcccttggcctcggtggtaccggttcagccccgtgccatggggcgggggttgggggagcaggaccccgctgcccgctgcagctggtccctcggggccaaggcctctctcccgcctggggcagtgcaggtagagggaagggacgatggaggccgcccagtgcggcccgggcaggcggcccagggacgccagcggtttttaaagttagcccgaattcctccgcagctggcggcggctggcggggctgcgcgcggctttccggggctccggcttctccgcgtctcttctcgccggagactcttactccggtctttaactttgttgtggccgcccaaggcaccctgcaggcctgagcgccgcgcatgtcccgggccgacgaccggcagggctgggcctggccgggctaagacggagcctccatcaccgcaggccctgcgcccgccaccaggccggacacctgggccgcctgggttcactcggcgccagcaccagcgcctggcaccaggcgagccggactccgccgagccagggccaccttcctcctctacagctcttcttcagggcggaccttgggctgccagcggcgtgaaagaggtgccggaaccggtgtcgggcttggtttccgtacttgagattttcctaggaggcggtcagaaacccagcgggtgggtctcctcctgggcggccgcccgggagccgg

SEQ ID NO: 5740 - DNA, 3541 bp, Homo sapiens
  source 1..3541: mol_type = unassigned DNA
cgaggctggacagctcccggcctgcacgccggatttctggagagcccgagccccttccctgagcccatccttctcctctcccggggcgtgatcccaccacgaccacagccgatgagccgttcaagctgggagaaggagcgagaaggctgcagcggcgcaggtcagatacccctgggcccaacgtccacccccaactagcgcccttgccagcagcgttttccccggagccacagtctccacctcgagatcttctccttctggaaccccggagcgcggccgggtaccaggggctcgcgtaggactgtagaaccgctgccgcccgccgtcccagccccagctgcccgcgcggtactcacctgggcctcagtgcccgggagaaggtgtgcccgcgcgaggcgtgaagccagagtccgtccgactccgcccgcaccggacgcgctctcagggcagaggaggtcggcggagttgtgacgctgggactagaggaaggagaaggaaagccgagacgggccgggcagacgcgccgaggagcgcccagtgcacgctggcagccgcgggaggcgaggcgggcgcggtgagcagtcgcgccggaaccgagccgcgaatccgcgccgcctcgcgctcgcagccgccaggacccgcgggaatcctggtccgccggcagcggtactgaggagggaggggcgcggggctgagccgcttctcggagcccgagcgcctcccggagccggcaatccctgctgcccgggcgggatgcgggcgggaattcagctcgcgtggaatgtgggaccggccgggctcggagtctccagcgctgggggaaagcggggcccacacagccaggacgagagggggtgcggtcccagggccacccccgcgccactccccacgtggcggccgcgcccccggggcgtgagtgtgtacgcggacggtaggggggccgtgaatgaagccccagcggccaatcagcacggccggcgcgcgggaccccgggagcgacgcccaatggagagctctgggcggccgggcagggtggcgggcgggcgcgcggggcgggggccgggcaggggaggcgggaggcagctccgcgggcagccaatgggcggcgggcggggtggggctccggagcgccgagcgggtcggggctttaagccggcggagcgaggcggcggggcccgcagacggagcggagcggcggcggcggcgcggcgcagggcgcggggcggcatggccaccaccgcgcagtacctgccgcggggccccggtggcggagccgggggcaccgggccgcttatgcacccggacgccgcggcggcggcggcggcggcggcggccgcggagcgattgcatgcaggggccgcgtaccgcgaagtgcagaagctgatgcaccacgagtggctgggcgcgggcgcgggccaccccgtgggcctagcgcacccccagtggctacccacgggaggaggcggcggcggcgattgggccggcggcccgcacctagaacacggcaaggcaggcggcggcggcaccggccgagccgacgacggcggcggcggcggaggtttccacgcgcgcctggtgcaccagggggcggcccacgcgggcgcggcatgggcgcagggcagcacagcgcaccacttgggcccggccatgtcgccctcgcccggggccagcgggggccaccagccccagccgctcgggctgtacgcgcaggcggcctacccggggggcggcggcggcggcctggccgggatgctggcggcgggcggtggcggcgcggggccgggcctgcaccacgcgctgcacgaggatggccacgaggcgcagctggagccgtcgccgccgccgcatctgggcgcccacggacacgcacacggacatgcacacgcgggcggcctgcacgcggcggcggcgcacctgcacccgggcgcgggcggcggcggctcatcggtgggcgagcactcggacgaggatgcgcccagctcggacgacctggagcagttcgccaagcagttcaagcagcggcgcatcaagctgggctttacgcaggccgacgtggggctggcgctgggcacgctctacggtaacgtgttctcgcagaccaccatctgccgcttcgaggccctgcagctgagcttcaagaacatgtgcaagctcaagccgctgctcaacaagtggctggaggagaccgactcgtccagcggcagccccaccaacctggacaagatcgcggcgcagggccgcaagcgcaagaagcgcacgtccatcgaggtgggggtcaaaggcgcgctcgagagccactttctcaagtgccccaagccctcggcgcacgagatcaccggcttggcagacagcctgcagctggagaaggaggtggtgcgcgtctggttctgcaaccggcggcagaaggagaagcgcatgacccctgcggccggcgcgggccacccgcccatggacgatgtatacgcgcctggggagctagggcctggcgggggcggcgcatcgccaccctccgcgcccccaccgcccccgccggcggcgctgcaccaccaccaccaccacacactgcccggctcagtgcagtgaccccgcgggccgggcccccgccggcgcgctgcagggcgcgggcgcgcagcccgcccgcgcggcctggactctttttgttcggttgctttggattttacaaaaaaaaaaaaaagcccagaaactttcgaacaaaaccaaacacccggacgaccctctccggtgagcggcgaagacagcccggtaggctgcgtcgcccgagccccgggagagaggagcgaagatccggaactcgccaactcaccccgggcatcctgcccgccgcctgctctctgcccccatcccctcgacgacccccgcccctgcccccccgggctgttcggggccggatcccggcagcggcctccccaaagcgacaggtaacgcagtgcggggttagggattccccgggagagaggacgaagcgaggagagttctccatcccctctccccgcgtggactcctgagcctgcgggtccagggtggggggctgtcactttattcgctacacgcctcttctctcctataaggatgcgccccaccccgctttcccctttctccgggcttggttttttacggtttttatttattcgtggagcctctcggctcctggggtccttctaactccgcccgcgcccttaatttaaatcgcagtatactgtatttatcggggccccggaggggaggtcgcgagagccgcgtctgtgtataaaagcaggaaatagccaaagctttaatctagcctaatttatttttccccttatatttccctaccctaccctccccccaaaaaaaagcaaaaaaaaaaaaaaaaaactaacaaaaaaaattcgagtgttcatttttcgtttcgtttcatccgagccccggcttggttcccggccacgccggaggggtctgcgctcccacacacccagacgggaaggggcttctgccctgctgcagaccgaccgccgcatagcgcggcccctgctccccgcgg

SEQ ID NO: 5741 - DNA, 1513 bp, Homo sapiens
  source 1..1513: mol_type = unassigned DNA
cgcaagaacggcccagcgaaccctgtgtaggggaggcgccgaggattggagaggctctgctaagggccccgctgggcggaaggcgcgcgctccctcccatgggaaagacagatgtggggctaatgaaagggaggccgagaggcgcggggacggccggggagacgggggcgtggcggggagaggaaagctcccggagaaagccgatcggaccaccgcaagcgaggcatgcagcggagtccggaggaggaaggcgccggggactggggcagggccagggcgggacgggggtggggggtgtggggggtaccacaggcagttggacccgagggtcctgagctgaaactcaacacccgcctttggaaggatcgtccctctttctcctccgccccttcccttcccctcccctttcccctccctcctttctcttaatccccaggacggagccctgcgcgggagaggagagggcctgaggggaggagaaaggaacagcactgagaggggccaggagcccaggaaggggagggaagggcagccgcgggccaggggtgagcctgcgggccacgcgcgacccccggagccttcgcagccctctcagtgtccccactcccagcccaggcgagtccacaggacccgggcccctgctcctccctcgccttctctttgctccttcttttgctttgtggcctttctttcccttcccagagacacctgggagctgcccccaagctttggggcgccccgcggggccctgccaagggtgcgtgtgagagagggcggcggagccggcgccgggtgccaggggccgagggtgggagcgggagctcgtggccctgcgccctggagccgaggactggaagggggctgggcccctccgccgcctgggcgcaggccgcgcgtcgggaaggcagtcccgcctgttccaggggtgcctgcgtgctggttgctgctgcccggggcgaggcgccgtagcggcgacctcagacccccgggcgcgctgagtgagtgcgcgcgtgaaaaccgccgcaccgccgggggtgcgagtgtctgggccgaagcggccactccagcgacccagccccacggccacgctctcgggggcctttggctccaggcaacttggggcaagcgtctcagttctcgctctcccttcctcccagcggggtcgccgcagaccccagccctgggagcaccgctctgcagcgcggccggcgggtggagacggttggcccctaaactcgctcgtccagcccaaccgccccggcggcttctcccagccctcgaggctctcctgagcggcctggagaggcgtcgagcgcagcccagcgcccgcctgctcacccgccccggcccgggaagggaattttcggatcctgcgagcccggggcgcccccgcggcctagggcgggcagctcccggggcctggccgagccggtggcgcccgggaggccgcggggacagcacgcagcgcgcgcccttggatgccgtcccgcagcgacgccccggcccgccccgc

SEQ ID NO: 5742 - DNA, 3541 bp, Homo sapiens; identical to SEQ ID NO: 5740
  source 1..3541: mol_type = unassigned DNA

SEQ ID NO: 5743 - DNA, 558 bp, Homo sapiens
  source 1..558: mol_type = unassigned DNA
cgtgcctggctctcggaaagtgcggacgagacggtgtgggtgggctaggagttatttgcaagggtgcttgcaaaccgtgaagcctagaggagaacgggagaaggatggaaccgagcggagaggggaggtgtatggtaagaaccccgctcgccccgggttgaaggggagctgtgggtcggcggtcaacgcttgaaggagaggggttccgggtggcgggaggcggctggggacccgcgcaggccagcgtgccggcccctcccagcccatcgctgccgccgccggggctgctccaagggagccaagcggagtgggagcgggtctgcgcgtctctgctctgcgcgcaggggcgggggggcccaggacggggcgccctttcccacccacatgctgatctaggatctccaagcggctcggcccaggacaccgcctggaaacccagccgcgtgggagagggcgaccccacctccaacccccttgctgtgcgccggcccagcccctagaagtcagcggacggcggaggaggtggcccggcctctcttggtggtcctgcgctctcgg

SEQ ID NO: 5744 - DNA, 7244 bp, Homo sapiens
  source 1..7244: mol_type = unassigned DNA
cgcatctgctgggccgcctcgggttcccgagtcctcgtggctacacccttggcttctgcgggatccccggtccggagtggggaaatctcacggtgacctggcctcaagcgagaaggatacctgggccaccgccccctcaaaagctaggcagatttgtatagtttatttcgttttcggtttaatagaatttcccgaaaactttgtccaaaggagctctgggagcaggcgcctggcggcccctgcgcggaatccggcggttgtcggcgctcttcccccgaccccatggctcacctacccaggtgcagccggggctagacatacttggcctcggaacctccaggtgttggaaggtggggtctgggtcctgcgctcctagaggacatattatccctgaagcactcccttatcctcacttcacgcgggagaccctcgcgggggctgacacccttctctctcctaaacccattcacagactccagcaagtggcattttctgggagcgagtaaccagctttttatcgctatcatagaccttgtccgtgtcggagcgccctcgcgccggggcctggtgaactttctggaagctctccgcccggtcctccagcgaatcacccccacccactcctccctccagcctcagcctcccggtgggcatcttccagggctcttccggggcgccaggttctgcggtcttcgggtgggggcccgttagtcgcaccgtccttcccccacccccattcctgggctcagaagctgatagactgacaagacgcggcccagtagtcgtgccaggcggaatgggctgcgtcctgaggccgcgacgacccgggccgagtctgcgcgcccagattcccgccggcctggaggttcgaaagagcaacgcagagacgcacggtcaagagtggagggagaacgacaggaacgctcattttcctcattatttaaacgaattttctttattctgaaggagagagagaaaagtagagaacaaaaacgagagtgacagaacattagaaattagagggaaaaacagaattagagggaaaaacagaactttagaaattagaggggaaaagacacagagataaaatcagagctacagaaaccgagggcgactcgcccgagggccgcggcattaattccagatgtttgaaaggcaacagcctttcaaaaaggaaacaaaatctgaaacctgttacctcttctgcagaacgagctgttcctcagggccgtgacatcaagacaagacgagaataaggcgaaagttaaaactgaaaactgtccgagggggcctcccagcagtgactttgtctcttgccgggaaggtcggacagaccgatgcgcgtcctgagtttaagagaatctgcggagacacagaggccactttttactttcgtttagaaaagaaaaaaaaaggggggggggctatttgttcatttgcaataacgacaaaaagaatcccaccaccacggaaaagaaatcgagatgctgaaaagtgaggaaaagagagctcaaaaggggctgagggacgcgaaaagaggggcggggagaggaaaggctcagggcgcgagggacgtggcgggcaccgacaggaagtgcaatctcatttctcttcgctgagcttctctttaaacacgaaaatcttcataaaccacacttaccctccaggatgactatcgtatcaggacttttaaaataaagtaactgagctttaaggagacaggaggaaaaaaccaaagcagcccccaactaccccaaactcgtcggatttgggagcgcgccgaaacatagcaggaagaaggcaggaaaaatcgtcctggcatttatgccttgaacaccctcccttccccacccccgcacccttgtcccgcccctaccccgaccgcagtaattgaattgtcacctgccccccatcccgcctcagggctccagagccacttgggaagctcggctttgccaagcgccccaggccagtaagagcggtgcagccgagccggcgccccagaagccgagaggttacacaagtctacgcagagaggcgcaccggacacggtaattaggagcaattcacacgctctcgggcgcacggaaactacttgtcaggaaattttcaacgctcctcctcgcccacttttttccactcctttcctggcgcgccccctcccctcccagaggcacgcagtggagcttttggagtttcgaatctttcggacactgcagaatgcggggctccccgggcgcgggcccggccaatcagagcgccgtctgcctcccctggccaatggcaggcgccacattgttgtccaattctgtctaatggagccctaaggaccaacaatagagcgggcgagcggctcattgagagtctggcagcgccgggcaactgggccccggctgcgcgcagcgtccggcgcgcaccgcgaggggacccggcacggcgagagtcaggtcgcgggttccaaccacgcggcccgcagacgagcctccgacccggatttctgaagggagggttggactgcgctgcgttctgaggggtccggaagttcggacatggtgactgaaggagggtgacgtggtcagataaggggccgggggcaaagggaagcggccaagagctccagcgtcgccagtggagccgggaggcgcgtgcagcgccagcggaggaggaggatcccggagcccaaggcaggtagttgagggccgcagggagagcagtgggtggagacctggtctgcggcccctgttgaggaggcctgggccccgtgggccttagggacgcccgaagggtctgggagaggaggcaacgctcatagagaggaggtctgggactctcggacggagacacaaggactctgtcgcgggctctggcagggacggggaacgcgggaagcagaggagaccgcggcagaagcggggagctgggcctgcttgggccttatggggctgcggcgtgggagggactctggtgtccgtttatggccagttgcgaaggcgactcccctggcttggtgcggcctgctgggccatccgtgtcctaggaccccaactctgagatcagaacgcaggagcctgcgctcgagaggggtcccctgggaccccaagacggggagggcgtgtctgacgactctgtccctaaacccggaggggaggggagggcagtgtgaggtggtcttcgagaaagatccccctcccgaaatgcctaacttttcgcaggatacgtcttccgccccgactactactccagactgcgaagctaaaaaactgcaccacaggttttacccaatcccctcccccagcatttgcctgtggggttttttcttacacattcccctctcccaggcgcggcccctggatcccggacacccagatcagctgcttttcactgttttccttgcccatgaagctcatctttgggctgggtttgcctatacagaaagtttctttggccgaatttttctctttaatacttcccagtcctaagctaaattccacatacattttgtctctcactctctggaggccctcaccgtggaacttttggcgctcacatttttacgggtcccagagccactgggcctaactttgcccaagttgtttcctcgtcctcactctgcttcctaaagctattctttctgttgttgatttttctctccaaagcttctgccccaaactgcattaaaaataaacaaacaaaaagaaacaaaactccggcccaaccggccttcacatctgcgccttcacatctctctcctcttcacccttccaccaaactgaccgttttgctccgggttttcctgttttgcccttggcatcagcctaacttctgggccaaaactgtcgctctaatcccagtcccgtcaaacgagcatttctctcacccgtctcaccccaattaggctaagctttggggtatcatcttaacttttccaaattctcattacagccatctgaatcagtgactttcacactttacatgtctctttattttttccagcggaatcactaattcagacaaaatcttacccctagcgtgtatatcaggtctaagagcagccatggccagactggggtgaaggtgctagggctcacaaggaggttccgactgcacctcctcccagcaattctggcccctctagcccagcctccgcggcccaaatttccctctccagcttgggttcctcaaggcggcgctttggcctagcgcgcggtgtgctcctcaccaggtctctcccctctcccaccttctttcccgtcaggtcctgtcatggagctgcgctcggagctgcccagcgtgcccggcgcggcgacggcggcggcggcaacagcgacggggccgcctgtggcgtcggtggcgtcggtggcggcagccgcggcggccgctgcatcgctaccggtgagcgtggcaggcggcttgctgcgggggccgccactgttgctgcgggcagccgagaagtacccgcggacccccaagtgcgcgcgctgtcgcaaccatggcgtggtgtcggccctcaagggccacaaacgctactgtcgctggaaggactgcctgtgcgccaagtgcacgctcatcgcggagcgccagcgtgtcatggcggcgcaggtggcgctgcgcaggcagcaggcgcaggaggagaacgaggcgcgcgagctgcagctgctctacggcactgccgaggggctggcgctggccgccgccaacggcatcatccccccgaggcccgcctacgaggtcttcggttcagtgtgcgccgccgacggcgggggacctggagcgggagcgcccgcggggaccggaggcggagcagctggcgcagggggctcaggtgagagcgcggccaggccgcaggtaggggcagcaggatcgtagctctggggcacggggcccaggggcttgtctcggttcagaaagagtagaacccccgtgtccagtcgccgcgactgctagggttcaccgctcgcccagcctcgggtatggagcgtgggtacagaaactctcctttctcccgcttctggagcatttgcactttacccctttctcctgcatcgggccgaaatgtacacgctttaatttttttactcgcctctacccaaacgcaggcaggtccctgcttctttgcttcgtcttctccccaggtggaaacctgcgcatcttcgttcgctctgcgcttctccacaggccctttccctctgctccttcccaactcccttaaggaatccccccccctttaactgacaccctaggttttgagacgccctaggttctgagacgccctagtttcttttccccttctcgcgttcctaacgccctctggacaaccgcttgctgcgccctccctccttctagtttcttccgcaccctccctggtttctcaggtctgctttcctatgtcttttcctcttcgcttcctactgcctgcctagcaccaccctctttttctggacccccgtggctttttgtggggagggaagaaattaggccagagccgttgagggaaaggagggatccgctctaaacttgggagggaagaacttctcaggtctcaattttggaaagggtggattagaaacaggggctgtacttctgcctgtagagaagcttgggacctcctagataaccaaggcgcctttccttacaggctgcactgccagggcaggcattttctatacagtgggctcttctgtacagcgtggttaggcagaagttatgttgtctcttgtttgaaccctggacctggccacttctccacggcagggcaggactggaagggcagttaagggtggaggtgttggggcacagacgtggggaaagcagcactgaacatcgagtttacagggcacaggtagttggggttctgaggagtacagaaagagagggagccctggggtcagggctgtaggggctcagagcggaaggaatgctagagcaaaaagaaagaggggcactggagcctagtgaataagggctgtggggctgagggagaggaaactgagatccaaagggccgaggtgctgtgactgctgtcttctagctaaccgctcctcacgacacgttttctcccctcccagaggccaagttgcagaagtttgacctgtttcctaagacgctgctgcaggcaggccgcccgggcagcccgctgccgccgccggtgaagcccttatcacccgacggcgcagactcggggcccgggacgtcgtccccagaggtgcggcccggctcaggctcggagaacggcgatggcgagtccttttctggttcgcccctagctcgggcctccaaagaggcaggtggcagctgcccaggcagcgctggccctggcggcggcggcgaggaggacagcccgggctccgctagccctctgggctctgaatccggttcagaggctgacaaagaagagggtgaggccgcgccggcgccagggctgggcggaggctcgggtccacggcagcggacgccgctggatatcttgacacgcgtgttcccaggccaccggcgaggcgtcctggagctggtgttgcagggctgcggcggcgacgtggtgcaggccatcgagcaggtgctgaaccaccaccgtgggggcctggcggccggcctgggccctgcggcgcccccagataaggccgccgtgggtgctgcagcagctgcagacgacgcgtggcccagccgcgtcgacgccgccgccgccgccgccgccgccgccggggggcctgggctgcctgcgccgctgcaggcggggcccgccgcacctccgcaccacagacccttgctggccggcgccatggcgcctggggcgctgggctcgctgagcagccgctcggccttctcgccgctgcagcccaacgccagtcacttcggtgccgacgcgggcgcctacccgctgggcgcgccgctcggcctcagccccctgcgcctggcctactccgcggcggcggcgcacagccgcggtctggccttcatggcgccctactccactgccggcttggtgcccacgctcggcttccgcccacccatggactacgcctttagcgatctcatgcgtgaccgctcggccgccgctgctgcggcggtgcacaaggagccgacctacggcggcggcctgtacgggcctatggtcaacggcgctccggagaagcagtagggcgaggggcctggcagccggccggtccccaaacaggaaccccagccctgttcccgcgggccatcgacccctcttcgcccagcgctctctctgcgccctggctgggcgt

SEQ ID NO: 5745 - DNA, 824 bp, Homo sapiens
  source 1..824: mol_type = unassigned DNA
cggagccgctaggagtgagcatcccctctccgggatacccagctccgcggcgtctcccgcgcgccctggccccacacggacctgccagccccagggaacaaaagcggagcccgctcgccctctactgcagccggaggatgagtcgagagggctgagcggagagtgtggtcctcggcggctggaggtaggagaatatgttgcgcccgcccgccgcggcgtgagaggctcgaggtgggcgcgccggggtaggggcggccgcgggcgcctgtccgtctagtgggcgctgcccggacctggcgaggtggtggtctgcaacactgtgcccgcactgcctactgtgggtcgggcgccgagctctcgcggccgcgagggagcctcctgggtgggaactggaggcagtgggggaaaagtctggagccagaagccaggcagcggctgccgcggcggctgtggagggctgcctgcggcacttggcggcgcgcgtctcaccgcgaagagcgggaaggcggcggctgcagtgtgcgcaaagttttgggtggcgcgcaaaggcgcaggcgagggccgccgcacagagccgcccaagttgtggccggagcgccagggcgacccctgggaaccccccaagcggaatcccccgagacaagcggctcttgctccctgacaccccagtcgaggccgagttgacgcgcagccatttaacccttcctgtcccggggaaacaacttcatccgcgtcgacgactggactctggctggctgggcagcgtcgagacttccggggggttcagtcctgtggtcttgagcatttcctcgctcagtccgcgt

SEQ ID NO: 5746 - DNA, 824 bp, Homo sapiens; identical to SEQ ID NO: 5745
  source 1..824: mol_type = unassigned DNA

SEQ ID NO: 5747 - DNA, 1415 bp, Homo sapiens
  source 1..1415: mol_type = unassigned DNA
cgtccaaaatgacttcgggcgccccacttaaagagacgccttggttcaggtagcccgctggggtcgaaggccccattttcccccgatctatcgggcttcgcggcggaagtcttcgttcaggcaggggatgccctaggagggaaggaggcgacggtgcccaaggacgtcggaagccggggatctccgcttccctcgggccccggctaggttaccagtgctggcccgcggcgcgggtgcccagttgcgcctgggacactgcgggcacggctgtggcggcaacggcagcggccgccgcgtcgccgacgcccggcaggactgagcgcacggagcggcggaactcctcgttcctccacgtgtagagcagcggattgagcgcggacagggcgcagcacaggagccagctggccgcctgcactccccagggcaccggcagcgagaagccgctggccaggctcacccacaccagtggctgcgtggccagcaggaagacgcagcagagcagcagcaccgacaggccgctgagacgccgctgtgcccgccgcgggtgcagcgcgggcggcaggggctgggcctgcgccgggtgcgcggcgccaccggggcccggcgcgtgctgggcgcccgggaaggcggcggcggcggcggcgcagccgggcaactggtgcagcaggtggaagttgagcacgctgacccgcttgacgctgacacgcacgcggcgcacgatgcccaggtagcagtgcagcagcagagctgtctgcgccagcagcgccgcggcggccagcagcgccgggtagtggactcgcggtggcgcggcgccgggccgcggtgcccagggcgggagcagcagcacgaggcccagggcgagcgcccaggacagcgccagcatgcccgccgtgtggcgcctctggtacagcgcctggtaggtggcgggcgcccgggtgatgagcaggtagcggttcagggccacgaggcagtgggagaggagggacaccgtgagtccgaggcccagcagcccaccccgtagcaggcggtagctgcccccagcgccgtcccagtctgcggggggctccgcagagccggtgggcaggagcccgagcaccgcctcctgcggcatccagagggcgcagacgctgaggtcggcggcgcagccgttcacgatgaaggcgttgctggtggtctgcagctttcggaaggacgacacgagatagatgaccatgccgttggccagcgtgcccccgatggccaggcccgaatacaggagtgacaccgggatgcgccggcccgcccacgactcctcttcctcgcagagcagcagcagcgagccaccggtggtggaggaggtggatgtggaggaggagttggtcattctggccaactcttcacacctccctcgctagcgtcggcttctggcagcgcgg

SEQ ID NO: 5748 - DNA, 1415 bp, Homo sapiens; identical to SEQ ID NO: 5747
  source 1..1415: mol_type = unassigned DNA

SEQ ID NO: 5749 - DNA, 3039 bp, Homo sapiens
  source 1..3039: mol_type = unassigned DNA
cgggcgctcacaggcggcgcgggcagcgcgagccccggagccccggaggcctgtgcgccctgagccggcatggaccccgagcactgcgcgcctttccgcgtggggcctgcacccggcccctatgtggcctcgggggacgagcctccgggcccgcagggaacccccgccgctgcgcctcacctgcaccccgcgccgccccgcggcccgcggctgacccgctttccggcctgcgggcccctggagccctacctcccagagccggccaagccgcccgccaagtacctgcaggacctcgggcccggcccggccctcaacggcggccacttctacgagggccccgcggaaggtaacgcgcggcgcggggcgtagcgcgcagcccgaccctctcttcttcttccttacccgggcccacccgggccttcctgcttatctctcccgctcgcctatttctcaactttttgcccctctcgcctttcgccacggcttccacggaagccgggttggcgctggcccgggccaggcaaaggccagtgtggggcgggagggtgaaccaccgttcctcggcggcgggaatggaaggcgggaggtcgagggaaggtgcagtggcgacggcccggagtccagtcggggcccgaaagcagttggacctgggaaggagagagcatgctctgccgaagttggactggaactgccacctaccctgaagcccagacccggccgagggctgtggagccacactgagacctgacgaagaagcgcggcttttgtgtctggcgccctttgagggccctgaggctgggcctcaacctagagtggtcaaatcggggtcggctggggactgcggcctggtcttggcccgtctctcctccccgggcctagccttcacaggaagggtgctgcctgtgcggcagactggcacagtctggccgcgactggtcgtgcaatgccagggctgtcctcaagacggaataactgtattcttatttctcatactaagctggcctccctgccgttatgcactatgatagccgcccttctggcagtcttggcttccccgcgctggatcatcaccgctgggcagtcaggagcagccctgggcagcctaaccccctggcgccgcgggctcacgggccggtgccctgtgctaaggccggctggaccgcgccggcatccgagaatgcgcctgaaggcaggggcctggcaggctgatcggcagctctgcggccgtccgccgcaccctatgacctgtaaggcgtctcggcttccgcactgcacccaccttatctgcgctgccatatcccgcagcctaggcccagaactggatcctccaagatccgcctcaaccccctgccgccgcccggctggcgcctcgcgggcctccacggagtggccgggcatctccggctttcgcccagccggggcggtgggaatgtgtaggggagggcggggaggtgtgtgtgggtcaacggaggaaatgaacgagtccgcggagcttcgtgtctgtgccctttgaaagaggctttcctgataaaaaccacagttgggacttaatgagaagcagttggcctggctcctctgatcccagccagacggcagaggccgcgcagtgcggtgagcaccgccagagacaggtacccggcctggctcagcgctccgcgtcgggcaggagccacccccccaggcccgcgtccctgctaggcgcgccgcatccggcaccgacagctcgggcccccggaccacaccggtgccgcgcgaactgcagagagcgctggtgcggaacgagcggccgggagaaacccagcaccccgggatccgacggcaagggtggccttgacaacgaaataccgagaaagaaaaccaaagaaagcgagcgacaaccaagaaaaggggaagggaaattgaacaaaacaacggagagcgcggcgagaacgagagggtaaatggcagtcggcgagctgggatgaactaaaatgaataaatgaggaacgaacgaataaaaaaagcaggagcaagatcgaacgaaacggataactagagaagggggaaaggacaaagagggagggagcagactaaacaaaagaaaacggagcatgtttaaagcgtagaatatatcaaaatgagaacaagggggtaagaaaattaacgatttcagttgaacggaggacaggccaaacgaaagggaggcaggcgggtgcgagcagagcctggtagagatcctggcggccgctagcctctggcgctcttgccggtgttcaacgggctgccagcgtccctgcggcagagcggacctcggcgcagcgcggcgcgcggtggagcctggctgcttgaggacagtcagcccccagggccgcacagcctacttggtgggaagtggcgggcgaagagggaacccgccttatttcccggtttttaaaataaccggctcggagcgtttccagtccacacgagtgagcgcgcagctgcgccccatctgcggcgcgatctttcacgaggctgggcagttgcgcgccccagagcctggcgcacctcgctcttctcccgcctgcagtccgccgcccgcgcagccccaggccgccctttgctgagagcgcccagccttgctctgaacccaggctgcgtgctggcgctgccagccactctcgcgccgtccgcgcttggctagtctgtcccgagtttggctctgacgtcgaaacacgccctcggcaagagactcctactagagttttgcccgctgccgctgaggccctgagccggatgacccggccgatcgccaaagtcgaggagagtcccaagttcttagacccgggctgaggcttctgggccaacgctgagaacccccaagaagggcaccgaggcctcaccggggtcctgcccacggcgtttatgtccactctggctttgagtcttcggcgggagctgcaggagcctgggcctcagcgagttctgcaggtcgcttagtgaccccacagtggccggaggaaacagtgcggcgcgggacaaggctgcagcgaaatgtgaaagccaaggctggtcccgcgg

SEQ ID NO: 5750 - DNA, 1277 bp, Homo sapiens
  source 1..1277: mol_type = unassigned DNA
cgcgcccctggggagcggcccacccatagtactgcgagcatccagcatcgcttcagagcacggcgcacacaggcataaatgcagcagaggcctctcgacccgccaggacggcgccccctccagatgggcaccacacgcacgtcccctgtctcagccattccgttccccagatgcgcttcccacgagggaggaagggctctctgctagctccgaatccagcgaggaccagccccaggactgagaattaaatattcatctcgggcgtgacagttctgcttcgcttgccaatgttactgtcaaggtcacaggcctgaggccgagcggctggggctggggtctccagctgcgtaagaggctcccagtggaactgcgccctgggcgcgcagtttcaagccgcggatgggccggacaggccccctccggttctccgcgggcgcttgcctccgcagctaagcccaatttcctccggagttcttgggcccttctgagcaccagaagctgaagcccggtgtccaacccgtgcgtacgccgctggggaccccgatgcgcgaaggagagcgggccccggggctccgtcgccaggcaacggcggctggagcggcgagaggagcccgggacgagcgcagggtcgggcggatgcgggggcagcgccgcctcacaccttggtcctcagccctccctggctggggcggggccagaacagggaaagttgcagtggccggcccggtaaagccaggcggggcgcggccagcgactcacctgtcacgcgtgggtagtcgcgcagactcggcccgtgcactccggccgagcagctgcgatccccgacgggtcgcggacgcacagctcctcccccgggccacaggcccccggctggggctggggcgacccggagctgcgcgccggcgcacgcgactccgctcgctcctcactccctgcctcaccaccagtcccaacctggctcccgcccgccgcgcgctcggggctcaggggagcggcgcggggacccaggtcccacggcggagagagcgcgcgggattgcgaagactggggccgagtgccgccctccctgcgccctggcagcgccggctctgcggagcagaacggagctgggcggagcgctgcgcgcactgttccctcgctttccgaaaggccaccctggcggcggggcgccgtgacgcaggcttgactcacgcgcgggccggcgtcaatgcgaggctctcgggcagcgagcgaggctctgatggccgacgtaggcggagagggtgggcgtggggcgg

SEQ ID NO: 5751 - DNA, 2394 bp, Homo sapiens
  source 1..2394: mol_type = unassigned DNA
cgctgtaaatgcgctaatatcccggctgccagcgcatggcgagcgcctcccacgcccatccgtaggagcggcgtcccggccgcccctccgttcccagcctgccctgcccccgcctccttcccctcctcggccatggccacctctggacgcctgagcttcaccgtgcgcagccttctagatttacccgagcaggacgcgcaacacctgccgaggcgggagccagaaccacgcgccccccagcccgacccctgcgccgcctggctggattcggagcgcggccactacccttgtaagtgcgtggtggattgcggtgcggggtgggaggtaggaggcgtggggcagcagaatcaagggcccagcccacgaggggccggaaagccgaaatcccagcccagagtctagatttcctcagtcttggaaacgggagccctgtcctcgaacccctaacgcattcatcccggtcggcacatcctaagagcagatccctgcctggcactggtgctccgagatttggggtttctgtgtctgacgatttctagaggtcggaataattgaaatttaaaacgcgccgccacctgccgcccccaccccaccccccgccccctctccatgcctgaaaacacggccacgatctccaggcctccgtctgggatggccagtgttggcgagtttacccccaccccgttcccactcagggctccgcaaacctcggcacactgcagtgcagtcgacctggaggaggccggcgctggtgacccagcttgtgataaactggtcggccagcgcaactaccggtgcggacatgttaagagggccccggggtgggttttttcggggcacgatctcaggcccgctgatgaccgctgtggtatgaatgaggtcaccgcattcggagaggtggatgtccagatgtggactcaggaaatggcctcatcccgaaagtctcgggctagtgggcgtgccctctggccagtgcctccacgcccgcgccagaagggcagcaggccctcgtagggtccggcgtctcacccacccgtgtctcctttgctgtccctagcctcggacgagagcagcctggagaccagcccgccagactcgtcgcagcggccgtccgctaggcccgcgtctccgggctcggacgccgagaaaaggaagaagcggcgggtgctattctccaaggcgcagacgctggagttggagcggcgcttccggcagcagcggtacctgtctgcgcccgagcgcgagcagctggcgagcctgcttcgcctcacgcccacgcaggtcaagatctggttccagaatcatcgctacaagctgaagcgcgctcgcgctccaggggcggcggagtcgcctgacctggcagcatccgccgagctgcacgccgcgcccggcctgctgcgtcgcgtggtggtgccggtgcttgttcgcgacgggcagccgtgcggcggcggcggcggtggcgaggtgggaaccgccgcggcccaggagaagtgcggcgcccctccagccgccgcctgccctctgccgggctaccctgccttcggtcccggctcggcgcttggcctcttccccgcctaccagcacttagcatcccccgccctggtctcctggaactggtgaggccgcagggcggcacctggggctaccctcgactttggagcgcgctctgcgattggagcagggccggagccgaacgcctggaacgctctccgtccgcctccctgcagccccatctccttgggcgccagggtccctggcgcgccctcatcagccgtcgcgcaagcacacacgagggacgtgtgccagagccccctccctcaccttccctccaccgccagccccagagttagattttatgcttgggccttatttgtatatttttaaatagcgatttgtataggaagcaagttatttttttaaaaaatagagtatttttcctcgtagttcgagaataaaatgtgtggggttgggtcccctgcgcgcctgcggggaacgtaggcgggagtcgtgccccccagaccggtgttcgcatcgctggctcgccccttgactggctaagtggggcccggccccagctggatcgaagggcgggttgcagtcccgacacggctttaggaagatacctgggggatggaggggtggtgatgtcagggttgggcgcgggaagaaaaggagaggaggaagctgaggcaactttgggattcttgtcagcgggaggcgtcactggccccagagtgactccgactctccgctgggctcccagagctgctggcgtttcgaataccgaaaagtcaaccctgtggaccacgacagggcagaaggagtttctccggagatgagccggcgaggccaggtgcggggcgcgctgcaccggagcagcccaggccgggccgc

SEQ ID NO: 5752 - DNA, 1627 bp, Homo sapiens
  source 1..1627: mol_type = unassigned DNA
cgctccgggtctggagggaggggaggctctccggaaaggggtggcgagagacccccgccacgactcccaagcttcttcgcgcgcgctggaggggacacggtgggcgcctaattctcggcgtagcagtaggtcccataggctgcctgttggggcctggggaagccgaaactgcgcactccgggatccgggagccccccgcagcgcggcctcggcgtggtgattgggaagcgcacactgccgtcagccagccagccgccgtcgcactggtctagccccgaaaacttccaggcggcgtagaggtgcccaaccttggccaccacggcgccgcgtcgccggcacgccgcgtgggcttcagacagcgtcagccgcccgggcacgaagaacacttggcctggggaccacagcgggtcaccgaccgagggcagggtgggcggagaggggcggctgacacccaggaggcggagttggggtgcgggaccgcagaggtgctggatcgagcttgggtaagaggagttgggggatcgaggcaaaagtgcagggagggtttggagaggtgagctggagcctgggcgggcgggcgggctgatgggggggcggtgccttggagggacccggagaccctgccctgatctcaagctgaggtccactcctcgtcccccacatttttcagacccctccccaagaccctgccttcgtcccgcgcctcacccgccagcgcggaggtgaagcagaaggcgtcgtagcggtcgcgcatccggtcgcggggtccgtagctgcggatcccgggccggcctcggccgccgcacggggcgcgtgcggtgagcacagggtagcgcacggagccctcgagcagccagcccgcgttacaccagtccagaccctcggtccaagctggcgggagacggcggaggtcggggataagaggcgtcataggcaggagccagactgagctcgcctggcgccctctctcgggcccctgagacagctccgcggggcttgggaagtgctgggttcggccgctcaccctggtagagctgggagtaggtggccaggcgtccgtcctgctcctcgcacgcctgcttcgcctcgtagtaattgaactggtaccggccccggctgggttggtacggaaacaccacacctagggggtggcggggatcctggggagggccagcggatgggagcggagggggaggaagggcggcgcggcctgggagagggagctggggtccccaggggtgcggaggagatactgggaaggagccctgggagacccaggcgaggcggacccgctgctacacaggaatggggcgggagcggaagggcctcaccctccaagctcaaggtcagcgccacgctctcgtcctcgatgccgttgatgagctcgcagcggtaccggccctcgtcctccaggcgcacgcccgcgatgaccagggaggcgtctagtcgatgccccctccgcatcctggcgcgccctcccaggggcccatacccccgggcgtgcagtccgttggtgatgaggatcagcgtttcccggagctccccaggctccaccttgctccagcgcaccttgtagctgggaggcgtggtgcccaggacgcagggcagcgtggccgtggccccacga

SEQ ID NO: 5753 - DNA, 271 bp, Homo sapiens
  source 1..271: mol_type = unassigned DNA
cggcccgcggagtcagcgctcctcccgcgccgacctcgggctccgggcggccgccggggggcgccgggcgcatccttcgctgccaactccccgcccgtgcccccgctcgcgcctgggccccgccgcactccagcagaagccattacagagaacaaactaccttcttgtctccgagatgggtccccggggaggaaggcaaattgcctgcctcgtgcataataagccaggcgtggagagcagcgcggaggaggccgcggcagccaccgagcgg

SEQ ID NO: 5754 - DNA, 884 bp, Homo sapiens
  source 1..884: mol_type = unassigned DNA
cgtagcattttggcgaattccttcacgtccctggtgaagctgcttcgataaacccgaaatatatgctgcagcgtctcccactgctggtcgctgaacgtgccctgggaccaaggcttcagagagcggacggtgtccgagtcgttgctccagctgtgcgtctgcagctcccccagccacgccaagccgtcggtgcgcgtccagctgctattggcgaaggacgagatctggaggcagcggagggggaaaagcctttgcgggactgggagagaatgaagattggaggcgtgtagcaagtggccgggagagcagccagcataaagagaaggaagaaagaaacaagaggagatgagcttcaggaggcggctgatgccagcgaactctgtgccgcgctgcctctccccggagccagggagcagcgagttttctacctagatcgcgccagtgcgtcccgggtctcaccagtccccatcaggcgttgccctccccgtccctacccagctccctctctccgccctcccgcgagtgcactcaagcgccctcgttccacccaccttcagcgcttccccaagcctggaggagcgcccagagcagcagaaacagcaggcaccccatatcgcccggcgtggggacctcgcggagcgccgctgcgcgccgccctctgacctgcgcactcttctcccccgccgctcagctcacgtccctttccgctgggtgccagccaattcccaagcccagaccccggcagccctcctcgctgggcttgccggcggtttgctgcttctgccgaagggcgccctcgcccttagctgtgcgagctgcaaagaggtcggggtcccaggaatcctggcgccgccgctcacttcagtaggtttcacaaccggcgt

SEQ ID NO: 5755 - DNA, 1007 bp, Homo sapiens
  source 1..1007: mol_type = unassigned DNA
cgcgggcttggccctaacccagcacgcggaggcttccctctccccagccttagcgaaagggcggcgggtgggaatcacccgttaccttggcaactccctcctgccgtctgctcacaacagtttgaattacacccctgccaggcagtcaccagtccgatttctttcctttctagctctcgttttccctctcagcgctcaggctgggggcggcgtcggtgccagtctagtccagggcgaagcttccagggccggctcgggccgggctgcgggacccgccgtggagcgcaaagtgcctgaagcccccgcgcgcattcggccctgtcttcaaaggccccttagaaatgcaagaggccaggcgcagaaacacacacggacggcagttttatgagaaaatgcagataaagagcccggcggtagggccatatgttccccataatctccaaagccgtcacttcaattagagcctcccctgagttctaatgcccaatcctgagtaaacaagccgctctgaaagaagaactcggtttccaattaaaagtgtactaacatttctccttcctttaattcccgcggagcaaagccccgcgcgggcggaggcgaggccaggtcgcggcgaggtcgtcccgggtccgcgccgccccgcgccgccgcgcgttcccaggtgacgtcaggcgggcccgggattagggcccaccctgcgctccccgcgccgcgccgcagagttaattaaaagtaatgccacggtaaatccaaaggctctccgctggcggagccgcgccttcgggccagcctgcgagagagggctttccgaggcaggtgctggggatttatttgtgtgtgagtgtgagtgtgtgtgtgtgtgtccgcgcgagcgcacgtgtgagcgcttgtgctgaaagggagagtcccctggattttttggagaccgagattgccttccctctttcgctcatgcctccagccctcctcgcacatgcactagtgaagaaacgcacggacaccgtcgc

SEQ ID NO: 5756 - DNA, 2191 bp, Homo sapiens
  source 1..2191: mol_type = unassigned DNA
cgccgcgccctgctcggcctcacccacccggtggcgcttgggcccgccctagtcccccacccccaccccagggcaccacctaccagggccccgccccgcctcagccccacgtgcggggccccaccccggcgctagcggccctttaaacacccccacccttacacattaccccccccccacccggacggcagccgaatagggacaaaactcatggcgtacagccagtttcctccgcggagcacgtcctgtgctgctccagccgttggggctctccaccccgggccacagcctcctggcgccccccgggccgaggcagccgggccgaggagtgtcggtgtggtccggctacggggcggggccggcgggagctccggtcgccgccgccgccgctgctgcctccgcctgcctcttgggccgcccgctcgcccgccgctgggtgcgctgcacgcggggggcagccgtggtgcagaggttcatgcagcggcggcggcggcggcggctgctgctgctgccgccgcggaggcagacagaccgggcgctgccaccgccgccctcccccggctccatgccgccgccgctgccgcctcctcctctccggcgaggggcggggggctccggcccggggtgggcaccattcctcgcagcgccgctcccctccctgccctccgcccgggcgctggagccggcgagggcacccgccgcctcctaggagtgcaccctccgcgcgccctgccggagcgagggggcgggcgtgggcggacgtcggggcagcggggaccccgcgcggctgcaagaggagggggcttccccaaggatgcccggcggctccccgctcctaggtgcgagctgagtctgaccgggagcgagcggcgcgtcgccatgccggcgtgacgggcgcccccggctgcccgcgcgggcccccgcgctgccccacgccgcgccgtgccggcaccgggctgcaggatgggctgtatccaaagcatcacctgcaaggcgcggatccggcgcgagaacatcgtggtgtacgatgtgtgcgccaccatcgaccagtgccccacgcgcatcgaggagacctcgcccatcgtcctgcgctacaagaccccctacttcaaagcctccgcccgcgtggtcatgccccccatcccccgccacgagacctgggtggtgggctggattcaggcgtgcaatcagatggagttcttcaacacctacagcgacctgggcatgtaagcgactcgccgcgcggcacgggagcggactctgggcccccagctctgcttgccaccttgacccccctccccagctccttcctactgctgtccccatcgtctttctaaaccttcctcccgcctcctctcccacctccctcctccctacgcttttgtttcagtgacagggcgggtgtagggaggctccttgcgaaggcattttctcgtggtttgcttctgacttcccagaaacgcgaggagaaaggtgcggggcgggaagaacgcgacaaggagggttcgagaggcggaggtggggatggctggcgagtgcctggcgagtttcagggcgccgtctgtgctttgtggggctccccgggaagagtttgggggaaaccatagaggagtggagtggagtgccgggggcgcatgggctgtgccgcgcgtcctttggagaaaccggagcgggcttggaagagcaggtcccgggcatccgagcgggagttggtagttctgtccttgccctcgcgactgttgaagtttcgaacccttgtcccccgggccagggagcccggaggcgtttccgtctggaaccacaagccggacacagttgcctctctgtttccgcgccccctggaccagttctggtggggagctggaaggcaccgagtgcgtcccggccaagaagggcggatagccttgtgcgagcagcgttcggctggcgcggcgcggggtgtttcttatgctaaaggaaaggatggatctcttgtctgtctagggtccttactttttaaaactttcctaattgcggcactggaagggattcccctggcgcccaccgccgaattctatcggcgagctgggagctctccaactttcagcagcgccggttggtgcgcgccgggcttggctgctgcggtgaagaccaaggatcgccgcggctcctcaaccgccaggggccgcaggctacgggcggtcgcgtccgg

SEQ ID NO: 5757 - DNA, 859 bp, Homo sapiens
  source 1..859: mol_type = unassigned DNA
cggcgcgctacgcagggaggctgcccggggctggcgcgcaccgagggggtgggggtcgagcccggggcggacccctcccccgactccccgactggaggacagggaggaaatggctttgtatcgcacgatgaaaggcaggcaggagggccaccaggcggggggtggcaggggacggaggatgcccagagctggaggaccccgcccgccccacggacaccgccactctgccccccattccactctgccccccattccaccgcagcgcctggtccatccaccctctggctcccgctgcccgtccacgttccaacggcccgcagcggggtcgccccactgccgcatccttactccgcgccctgcgcgcttacctgcccacgaagttctcgagcaccgagctcttgccggcgctctggccgcccaccacggcgatctgcggcagctccagcaggcagctctgtcccagcgccgaaaacgcgtcctgcagacggttcaccagcgggatcagctcctccatctcccggttccccatcttgcccgaggggccggcgaccagctggtccctgctcgcctctacgacctgacagggagtaggggccgcgctgccctggctgctgctgctgcgccgggctcagccagccaggtcctggcgcagacgtcggagcccgccgccagcccgccgcttggctctgacagctaacgacccgcagcgcgcctgcgcgggcgggcaggggcgtggcctatctccgcgacgccccgcccccgccccgcggctgccccgccccgggcttcccatcggaccaccaggccaggcgcgcacgcactgcagcccagctgcggccagatgccacggcctctgcgt

SEQ ID NO: 5758 - DNA, 791 bp, Homo sapiens
  source 1..791: mol_type = unassigned DNA
cgcgcgactgcagccctggggggcgcgcccggaaccgaaatggctcaagagacttgaggaccggcgcgtctcctttctccggccccagtccccaactcccgccacagcgcagagggggcagtgcggtgggagggggggagttgtggggctggggctccggcctggccggtgaagccccaggacccgtccgcttggggttaaggcaaggggtgcggcacgaggagcgcagggagccccgagtcccaggcgcagacccagctgcggacccgccgtacagccctggtgttgcaagcgtggaccgtgggcgtaaggccccggcgggaggcactcggcccggccgcggccgggtctgcagggtcctggcgcagcggatcccggcgcgccctggcccgcggcccgcagggttcagacggggccgagacagccaagcccggttcgctcgcgccaggcgctggagccaaggctgacgggcggttctgaatcatgtttggaggagcggcgcggcccccagggctccgctgagacgcgctgcagggctgtccgggccctccctcggcgacgcggccagcagcccgcgccgcgtcctcagcggcggcaaaaactaggagtcccggggctctgccgggcgccggcactggagggcaagagatgctggcttcccccggggctcatcaccccggggttccacagcacttacgtgggatggggaccccggagtagaccacggacggaaaggaacggtggtttcattctctgcaaaagaaatcctcgcgcgcacacgggtgccccgg

SEQ ID NO: 5759 - DNA, 586 bp, Homo sapiens
  source 1..586: mol_type = unassigned DNA
cgggctgcgcgctccgagctgcacgggcaggcattttccccggctttgttttacaaggtggggagagcggggctggacgcgggagggggcgggggggggagcgtgagaagaaacgaaatcgcgggaaggaggggacaccggcgggctgggcagagggcgaggcggaggccaagttgggcttgggcgccgccgcccccgcgcgcgcctgctgccgggcccgggtcacccggagagcgcgggcgacccgggtcccgcgcctgcccgccgccgccgccgccgccgccgccgccacgcgctcagccccgggctgctcgctggcccggccccggcacggcgcggcgcgggggcggtgggtgcagccccagctgccgtgcgccccggcgtctttgtgcgcgagcctcgttcagcccctcttcgcatgtctttgtgtgtctccccccgcaatgccctccgtgccccgcggggggtgtgtggcacggtccgggcgcccgcagctctgcagccctccgctgctctcccttcccggctcgctcctgtcgccccttgccggctcgtttccctcctttcggaactccctcctcttcgc

SEQ ID NO: 5760 - DNA, 1678 bp, Homo sapiens
  source 1..1678: mol_type = unassigned DNA
cgggaccgacggcggcgcttctccttcgcctcccgccggcaggagaggacggggcgggagaggaaggggttagttgtggttgtagccgccactccccggcgcccgggacccgggacgcccagtcgggccctgcagagggtgtcctacctgggcaccagcggcccctcgcctccagccagggcaccgaaggcgcgcccggcgggatgcagcgaactgcctcctgccccgggacagtggagcggcagaaggtccaaccttccggttcgcccacgcccgcaaggtggaaaaagtggggtgaaatcggggaaatttagcgaaattggggcgaaagaagagagaccaaagcgtgttactcacgtgccagatggcgaagaagatgagcgcagcgcacagcaccagagacagcatgtagcagaacgcagcgaaagtgaaggccatggccggcggaccccaatcccaccacacacgccaagaagcccctaggagcccgatgcctccctagaggaccgcactccctccaaggagccgcgtctgcacgctcctctccaggctagtgcccaggagggcgcacagctagcgaagcgactcgagggtcagcgaataagcgctggattcccgcaggctccggcgaccccagacccggccctccggcgaagacaggaaaacgtgtgtcgagagtcgctggagggaaccgtccgcaaatcgaagaagaaaccaaatcagcagcgaacacctgcaaattagtgccaagctgtgagcccctcgagaccaacacgacaagcgatgcgacgactccacggaggaccgagggaggaggtcccattcgccccaggaagagctctctgcttttctccactaaaccgctgaggagagacgagcgctccgctccggaccctcccgcgccaccggggcgcaaacggatagtgtccagcgaggtgcccgagcggcctccgagctcctcccaaatcccagagccgggcagcgctctttcccgagagaaggagtctttaggtagccgggaggaggtaggtcccgttggtcctgcgccccagacgcggcttccagcgcagccgtgcgctccgaggcgcgcccgtccccaaccgtgactccggccagccggcctccgcaacccaagtgtcccggaaaccgggggtcggaccggggcgagcactggctccacccaacgggccaactccagcccgggtggctgcagcagtgggtttcaggccaaacgctgtagctcgctccacctgctgctgccgctgccgccgccgccgccgccgcctttgccactgcgagaactgtagcggtgcgacccgggattccctcctctcggcgccccaccctcgactcctgttccgctgagcgcgccctccccggcgggcggagactgcagcgccgggggctgaggaaaggtgggtggcgaagcgccgccgggcgcttggtggccgctgccgccgccactgcagctgtgcacgcccgcctctcggaggaaacttgaagccagcagtacaagcagggctggaggccgagcggaggtggggcgggaccggttggagcagggactctttaaacacgtgcgtctggaggaggtgggaagctgcggaagggtatggtgtgtgcctcgcgcctaaacgccgcagccgcccctcccggttcttgcagtttcgcctatcgg

SEQ ID NO: 5761 - DNA, 1600 bp, Homo sapiens
  source 1..1600: mol_type = unassigned DNA
cgagacggagttagcatctgaccagcgaccaacagtggaccggcgaggcgggctcctaattagagcgagattcccagaagctggacagcccctgtatttatgggagcatgcggcgcagctggcagtgacccccaggaaacctcggcagcagccgccgccgcgggtgtggtgacctcgggcccgccgcctacctggagcgtttcggcggcgcctggttcagaaccaccggggcggacagctccctggagctgcacgcggactgcggaaggggacagtgagcgggatcggcccgcactccgtccgcgggcccggaccgctggaagcacccgggtccccctcccctcctgttccccggtcccgccctccccctcccgcgctgcgcgtggcggtcccgggctgcgcgtccctgtaggaggagaccggcactgccgccggcggccctccccctaaccgccagccccggccgcgcgccccgccccgccccgcggaggagggtgggggcgttccccgcgccgggcccgcccagctcccccgcggctgtccgggccgggctccccattggccggcgggcgggaggtgaggggcggcagggcccgcctctggcggctcgcgcccgggaaggtcggcagccgagcgccggaggccgtggagagggcgggcagggaggcggcgggcgccgaggagacgcagcggcggcggtggtggcggtggtggcggcggtggcggcggcggcgcctggtctcggccgcagcctctgcgtcccgcccgctctgggtcgcccctgccagccccgcgcgcggctcgcctcccgccgcggcccgcagcctgcggcgcccgagctccgagggcgcttccccgggcgctgggcccgaggcggccaagacggcgggccggccgggcacggggcggcgggcgctgtgctgcgggctgcgctggtggggggcggcgggccgcggcgcgggcccagggcccggcgtgtgcggctgggaggcactgtgggggcgggcgcgcgggcggcggccggggccatggccgagggcggcgggggcgcgcggaggagggcgccggcgctgctcgaggctgcccgcgcgcgctacgagagcctgcacatctcggacgacgtgttcggcgagtccggcccggacagcggcgggaaccccttctacagcacctcggccgcctcgcgctcctcctcggccgcctcctcggacgacgagcgcgagcccccgggacccccaggggccgccccgccaccgccccgcgccccggacgcacaggagccggaggaggacgaggccggcgcgggctggagcgcagcgctgcgggaccgcccgcccccgcgcttcgaggataccggcggtaaggggctgcccgcgggtggatgtcgggggcggcgctggaaccgggcgcgggggaggcgtgggtgctggggcgggcgagtccagactctccgtgggctggcttgtgggtgtctctccggaaacaaatgaggctgcaggagcggtgatcggtctgactgctcctgggggctccgaacccgtgggtggagagggtaaggcggaggccgtggccagcacttttccagtgacaatgtcgtcgg

SEQ ID NO: 5762 - DNA, 2394 bp, Homo sapiens; identical to SEQ ID NO: 5751
  source 1..2394: mol_type = unassigned DNA

SEQ ID NO: 5763 - DNA, 1160 bp, Homo sapiens
  source 1..1160: mol_type = unassigned DNA
cgcaggatccgctcctcgatggacgtgagccccaccggcccgctggtgagatcctccacggagcgcgaccatttcagatcctccttaatcgcctcgtccaccaccaagtacttgagctgccggagctgggggctgatgtcggacagtctccgggggctgacgtccggtgacctcctcatgccactgcggtcgcaggcgccacgggcaggtgggtgggcagggggagcatggacagagaggaggggattcgtgaggagcagatcccagggcgagagcaagagcgcggccggggccctccgggggcgagcgccgcggcagagcccgcgctcctcccttcccgccgccactcacccacttccccgggcagctgtccccagtgccctatcctgggcgtctcggggcagtgcgggttggggcgagtggcgagggaaagaatgactgaaacttcccgagcagctccaccgcgcgcgccgcccttccccgagcctcagactgcccagtgtcccagctgcaaagggctaccccggcgctccggcctcccgcccgccggctcgctcacccacgcccggggcgctactcacacggcaatgctcttgcccctgggtgcgccgctgggaaactctcgaatccccataggcaaagacagagtgggaccggcagctcccagacttgaggcggaggggccgcgggccggagctccctgcagccgctagcctgggaagactggagtgcgctgcccaccgagggtctgcgccgcgccggccgccccgggccgctttgtgcgcgcccgcgcggtctgtacccgagcgcctccgcggcgtgcggcacgatgcaggcgcggcggttcagcccggtgactccaggccggcccgcgcgctcgccgcaacgacccggcagccgaggcagcgccgcgccccacgcccgtcaccgtcgccgccgccctagcacaccgcaggcgtgagtctcgccgcgaccgggagagccctcccagctgtgcgctctcgaggcacctggtcgggcggggaggcgtcgggtcggggcgcacaggggccaggcgggggcgctgctgcccacttcccgcctcccgggcgtgcgctccgccccggagcccgcacctcgcgcccgcgctccgcctggaagccttggggcaccggacgcgc

SEQ ID NO: 5764 - DNA, 588 bp, Homo sapiens
  source 1..588: mol_type = unassigned DNA
cgcaggcggcggcgctctgcactgcggagccgcgtcctgggggagcagtacccccagccccggcgccccgcagccagacagcccccctcagggtggcagcattccccggctagggtgcagggacccccggggcgaggcggccgcgcattaccttccactttggtaagggtcaggaccggactgttgcaggcgctgagcggggccacccgggccgagtgcttcttcatgatgagccggccgcctgcaggagcgctgccgccgatcgcctacatcctggggccggctggagcgcgtctctcccgggcccgtggccgacgcggccctctgccgccggggagcaccagcggctcgcccctctcagtcccggcctccccggctgcccgccgggctccggttgccgcgttgctcactgcggcggccgccctgcagcgcacatcctccccggccgcgcagccactccacacacacgcgcgcacagcctcctacttggaggttgctgcaaactccaacgtcacgtacaagtgcactccctgctcccaccccgcagctcacctgctccgccctcctccccgggacgcccagccccgc

SEQ ID NO: 5765 - DNA, 878 bp, Homo sapiens
  source 1..878: mol_type = unassigned DNA
cgggaggcgaaaacgaaatccacccccttgcgcccatttctgccagaggtttgcaggacgtgtctcaacctggcatcccgagtccagaacaaaagccacgggggctgcggcatgggcagggggaaggcgcgcggtggctgacgcggggcaggggccctggcgagcgcgggaggggcggtcagcagccgctcgcggggctggactgggagccccgtgcgactccgggtctggcgcctgggtcgggggtggttcccgggcctccctcgggggtcgccgaggcccggcctcgatagccctgcggctgctgcgagcgcctcccgagctcccgccccgcggtgctcgctccaggagcgggcgcggcgctgtgtccctttacctgcgcgcagagggtcgtccggtgaagccatggcggcgggttaggggcaaacgagcgtccgagcggggctggcaggcctccggggcgcgggaggaccgtgggaccacggggatgaaaagtcctgcggttccgacgcgcctggagcaaaccgtggctctgcgcgcccctgccctcctccgccttcccctcccttcttcttctcctccttcgcttcttccacgagctcacttcctgctttggcaattagcaaagccccttcgctgcgcgtccctcggtacctccctccagaggcgcggggcgggagccggggtgccgcgacccggggctgggacgcaaggcggggccccgagtgtcccgggcgtccccagcgcccagagcgcgcgtcctgcccggtacccacgtccccctgggcgggtcctagcggggggctgacacgactgccgcccgggacagactgcgagcgaaggactggccttaagaaacggctgcagtcgcgggtcgc

SEQ ID NO: 5766 - DNA, 561 bp, Homo sapiens
  source 1..561: mol_type = unassigned DNA
cgagtgggcgcgaacttctacagcagcgtcaagcagcaggactacagcgccagcgtctggcttcggaggaaagacaagctggagcacgtaagggcgactcgctcccgggggcctcggccaggcacctgccgcatgcaccctccccgtggtggtggcatgagcgcgcgcggggcgcggggggcaggcgaggggatcctggcaggcgccgacgtcctaggtcggattcgggggcttctctgcctgcagtttcttgccttaatgaccgggctgcggggaggggagggcaggttccctttcaggctcttggtccctgccgacccgacctgcccacctgcgtctcccggtagggttcatttgcacggggttctggaggtgcctgtgcagagtgagcacgaaggggaagtgccaccagcgtggctccgagcaacctggcgttgcatggtagtgggctttagagcggcgtttgcccgcgtctttgggggctgttttactcagtccaaaaactagcaaattaacgaatgagtaaagttggcgccgctagcgaccagcgtggacccgcgc

SEQ ID NO: 5767 - DNA, 1235 bp, Homo sapiens
  source 1..1235: mol_type = unassigned DNA
cgagctgagctgtccgcgaggctgcggcaggaggcctcgtcctcccgggcagggtccctcctggaggctcccccggtctctcccagacgcacccgcgccgcgtccttgttccccgggagcagcctccctccagccgccggtcctgggagcttcaccgtccaaacgggagctgagtttgcaagcggccaggcggcggtgcggctggtgctgctgctgatgtcagagccagaaagcagttgtgattggatctaattagacgctgctgcagcaaatagacaagctccctgcgtgattggcttcaaagtggctggtgccaaacaactagcagaggcgcaaaagtagcctccctgcgctgggagcccagagcaggaggcagagcccgcgggaagctcggagcactcaggacgccgcgcgcccttccccgccctccctgaccagggagcagctcgctccaggcgcccagccgaggcccccagcccagtgggagcaagtcatagagaacaattcgagagacagagagacggagcgcgctttcctgctcagtcctgaaaagtgagccgctcccgggtttgcaacctcaagcttcgcagcagcggcggcggcggctgccgggaaggaggcaggtgcaggtgcaggagggaggcggctctgggctccgcgcctgggtctcggccatggcctcggtcctggggagcggcagagggtctggagggctgagcagtcaactcaaatgcaagtccaagaggaggaggaggcggaggtccaagcggaaaggtaaggaccgcgtggcgcgccggcccctgccccccttcacccccggcttctccaccccggcctctcatggggtctccgggcttgtccgttgtgagcagcttcactttggggtgctggcgggatggctgctccgtgcagggcgctcgggagttcagatcccgtggaaatgtctggggcctcctcttgcccagaggggacagtgagcagccacgctgcgacatgtttgagggacccggacgaagtggggcgagggcggcgaggagctccccggggaccccgcgcgtctccgggccccgcagtccccagtggccggccgggctggcactgccttccaccctccggaggccatctcgtctcccagtgccaaaggaattacccaaaaacgggggaacgagccctcgcgccagctactcccatccaaactgtcccggaggaagggataggcgaagccctgcgatcgc

SEQ ID NO: 5768 - DNA, 5964 bp, Homo sapiens
  source 1..5964: mol_type = unassigned DNA
cgcggtggctggttgcagctcacgtctccacgactcctgcagaaggaaattacgttctccccttcccccccgcacccctacccctaccccaagcccccgggaagccctgcgctggcaccagggcaagcgcctgtcggctcccgggagctaagcgaggccgcgcggtctgggacgcaaatgggagggagcagccgctgtcgccctgcggggccagggccactgggtaggcgcagcgcgggccaagagtgggaggctcagggcaggggatccgcactcggggccattcctgccgcggcgcgccctgcgcttcagcagtgcacagggtggggacccctcgaggacagtggtgcgccgacgggtctctcggcccctccctttccacaggccccgctgtgtggtgaaggagccagaagaggcgacttgggtgttgagacccggggccaaaccgtggagagtgtctggagcccacactccagatttctggacgccgcagtcagtccagcaggttctacctggagccgcctcggggctcaaccgggaggcagcggggtgcaggcgagagggttaatgcgcccggttcggttggtttgaggagtctctgctttcagcgacccacagggcagagagcccagggctccggcttgatgtccccaacagctggggactggagagctggaggggtcgcagactcaggctagagtttaaagtgcgccgcgcggcgagtcgctggactcttctgggtctcacgtggctcctgtgtcacatggagtgacaggccggcggaaggcgctttagtcgtcgcccagcgttctccaaggtgtaaggaggcaggatcttcccatactggcggcgcagggggcctcacggctgcggacgcccgccctggatctctcagctcggcagatcctttgggtggagaggcgctctccagggtcgcggcgaaggagagcggcttctcggcacgtccctccgtatttcttctagatcagctccggccccaccgtccaggagagggcccgcctgaggacctctgtctgtgccgcgcgtggtcagccccggtcccctcactccatggctggcccctagcccttcagagcggacacctctccttagggatgcagggcgaggaagggcgggtggagctgcgaacccacggggacctggaggacctcttggccccctggagaggggtactatgagagggattcatgggacacagatttgggggactgggtaattttaccccctttggcaaccataaaaaccctgagcaaacgtgtccattcgctatttcgcagaaatatacaatgcaggcccacacaggcatctctgcgaggccccctagttaagggcgcagcgttcttcggaagctcttggtcttgctaccagggcgtcaccggcttttccgcactggggacatttcgtttgggctctgcgcagccgttgcacctaaggccctgggagctccgcgttcctccccaggcgcccgggacaaagtgcccgagggctccgcagacgtccagccctgcccggggctcacggccgccggggctctccaacggaccgtcgagggccacgttttgctggggtgtgagcgacgattcttttcccgccctatgaggcccgccactagctaggtgccccatgagacgccgtggcgagcacggctacctggcagctcgcccgggcagccccaacttaatttcctgcccctcggggcacctttccctcgaatagctctcctcggcccctccagccctgcccaaggggcctggaaatgttcgcagcttcaagaaaggctctatttaagcacaggatggggtggggcgggcggggccaagattgccctggggattgaatttatctccgctcccagcgatccccggcggataaagcgcaagtttgtgcacacggtcgactgagccattggaaacccagctcacgaaccgcagccagggaaacgggagtttgcccagttgtccttgcggaggggtgtgcggaaacgcccgcgatgggaactttctgcagatcatgtatggagggagctcacaaaaaggaggaaggggagcgcggtggggaggaggccgcgtgggcgtggaaggtcccagggtcctgggggtgcccgcctgcttaggcgcagggaatggcgcggagctggctggggaaggagccgatcacgtcccgcaggctaattggcttaagaaattttgcaagcgctggaaaaggtcgttgaaggagttcgctgcacgcgcacgcacacacatacacacacacacaaaatcttaaaaaaaaaaaaaaaaaaaaaaaaaaaagagcgccgagcatgcgcacagagaggatgccatattggaatgagctgtagtgggagccggaggaccggagcgggcgcgcgagggaggcggcgggcggggagcgagcgggcaagggcgggcgagcgagcaagcgagcgaggccggtgccctcccgggcggcgaccggggcctgggtccacgccgagggcaggacgaacttcaccaggtaggacgccgcgccggctgctgtccccggcgcccaggctggccggagagcagcccttcggcccgcaggttgagtgcgctggtcaggggctttttccagcctaggaaaaaaaaggaaaaaaaaaaaaaggaaggaagcctgagggagctggggttggaggtggcgggtgggggaaggctggggagggtgcaggggagcgaaagagaagggcaggagaagaaagcgactgcacttgagcgaagcttcaaactcctctgtgcgctccaggttgtcatttttgcttcccgggtccccttcgcctgcgtctccgggctcggaaaagccgagccgtgcgggagtccgtccggagttgcaaagtgtcctccttccccgggcgcagcctgtcccctcccgccgcccaccttcctcgtttctgcactcattttagcgacgcagccgccgctgctacctaccccgcgctcccgcgtctcctccgcgctggggtctcccctttcttttggtttgggtgggagaaaaagatggtgaggacggggaatcggagaccggcatgggggtaaaaatcgtgcagacattcggaatcgctcccttggaaacatttgcctgagcaactgaaataaaattggcagtagtagttttggagcgtgctccagcgaggatggtctttttgttcattattttctctttaaagtaatatcctgtcacttaggggctttccggttgtctcctcttattcgaccccctttcaaaattgctgacttgagctggttctggagtttattttttaatatgcgtgcgtgggtatgtgtatgtgtgtgtatgttttgcagaaatccgccaaaatgcaactgtaggaactgcgagatgtatttattgattttgaccaggggcggtgggaaggggctggagggagctgggggatcctggagggtgggaagtggctgattctcggtggccggacactcatccagagcctgatccgtactcgtgttttcttggaagcgccacaactgcggggaaggagtctttagaaaccgtgccagtttcaatatggcgggctaaggtggcttttaaaaactgaaaataaaggttttgaggtgggaaaaaacccagctgaagtttccaccccttagtttcgactctctttggctaccccaggaagcgctttagcgaattaagtggggaaaaaaagaaggaatgggctgtccggttttttttttccgtggttagagtctgtgtgtcaagtccattgctaggggggaaagggatggagaagtgcccctggcccggaccagggcaccgaaacgcaactgtcgtgtgtgcctgtggattagtgtgcaggcctgcgtgtgcgcagtttttttgggtgtgtgtgtcaaagagaaccaccccgaatgtgtgtgtgcgtcttggaaccagaccctgccatgatttgacgtgacaaactgcggacacgtggtgtaaagtacatgagggcagagggagtgatttattttgtctttctaggagacgagctagctctcgccttgtgtgtgctggatcctgcgcgggtagatccccgagtaggtggggcgaggaggtgcttattaaaaggactaactgtcccgggtattgggtgcaatcgggctgcagacgccagccggatttcgtgtgtgcagggggcgcgctgcacttaatagtgggctcctgctttcctccacgccgctctggggtgggaggtgggggaccgggaccgaagcttggagaagaccaaagtggtggtggtggtggtggggtggggcagaagggcgggagcgcgcggctctgggagacaagcacgtagggtcgaggcgaggggttgccttccttacttttgggtttcgcgctctagggaaggtgggggatggggacagcgtttggggaagaaattgtcccttgctcggcttaggaaccctctcggcgcatcggagaggggcatcttcttgtcttggcgggcatggaggccgggcagtcgccgggggatgtgagtgggcggcgaagtgcgggggaaaggtcggcgttccagggcggggaggatctgggagtggagttcggagacaaaatcggggtcaggcagaggagccagagggaaagccagcaaacgcgagctcgggtgagagccaccggaatgcgggaacgcagcttagccgggaacagggttcccgacaggggtcgcccgtggccaggacgcggccgctgaacagaggtcgcgcggcggttcctgcccgagggacctcgtgggcgggggccacacggaggccgcgcacggtccccggggctggcgggggcaggtgggaggacctcctccgggcccgcgaacctgatctggcagcggccaggtgcctggaagcgtttttaaatgatagggttacaaagacatgttggccaggtttgtagttagcgcagcaacgtggtttgcaggagcgcagaacgaggctagacagggtcactcggacgccgtgctgtcagtgggtgggggccgggagcaagcggcactggcttggagaccccgcggcaggtgacccctcccacctgggcagcgaggctgaacgatggcgacacgccggccaggacgcgtccgtggctcctccagcctgcgtttgggcgcgccctcccggggccggctttcccatgggccccgcgaggtggggagcagcctaaaatggctctgtgctgcgaagctgcagtttcagccgcgaacccctccccttgtcctcctgacgtcgccgctgacaagcgcaatttgctccaaggccccgaaacccgcgattttgcacgaggccgtgccgtggaagcggatgtacagttgattacaaagaacattccacagggttctcgaagggcccaagtttttccttctggtggggaggagggaggagccgagactgggcaggagcccggccgaccaccgctctggcacctaggggctcggggcgcaccagtagctggggctggggacctggatgcgcgaaaagccgagggagttcccggggacgcggatggggaccattcggggcaatagccacggacaccggtgctcgtggttgatggcgtttgtggtgtccgagaatcccgggacgacgctggaaagcctgggagaccgttctcaaacttctggagaccagctcgcagtttcgctttcggaattttcaggatctttgggcctttaaagttgggtgggattccaagaaggcaaggcgaggctcgtggccctgacgatcggccgcccgacttctcgctcaccccagccttctctaccttgtctccctgaaccttgccgaaccgagccgggtttggggttccggggccccgcgcaccaaccccagccgcgtcctgagggctcccgcagcacagccgcggctgatccgaggccattggtgggaaaccaatttagacgaggccgacccctcttggatctggctcggttgccgc

SEQ ID NO: 5769 - DNA, 5964 bp, Homo sapiens; identical to SEQ ID NO: 5768
  source 1..5964: mol_type = unassigned DNA

SEQ ID NO: 5770 - DNA, 5964 bp, Homo sapiens; identical to SEQ ID NO: 5768
  source 1..5964: mol_type = unassigned DNA

SEQ ID NO: 5771 - DNA, 703 bp, Homo sapiens
  source 1..703: mol_type = unassigned DNA
cgcttggggacctccgtgctgggcatcccgcacgctttggacgcgcgcagcctcaccgggagcgaactttgtctcgcctgcgggtgccacggagaggggctgggaagccgagccagctctggcggcgactgggggcgtccctggctttctgggggggcgggggcgcgcattgttgtccaggatcgggcggcgggcggtggcggcggcggtggcgcgcggtggccgcctagcacccgacctagcagcgcgccggggactggctcggggcgcgctgggcgcaccatgcggcgggccgggcgcgggcgaggggcgggccggcggcggggctcactggcgccgggccaggctcggcgcgagaggcgcgagcgggctatgggctgacgccgagggcccgcggcgggggcggcggcggggacggggcgggggctcgccagctgcgggcgccaaggccgcctagtaggccaagggccttcgcccgggcgaatgggacgcccgttccggggtaccagccgcttgcagccagaagttcctcggatcccttggaagcgcaaaaaataaaaggtaatgtgtctttgtttcccggtcgcggtggcagggaggcgactgacggcagcccttcgccttccgtgttttcacgctgggccggggaaaagggacgcgccgctgcttctttactgggggcctggagtcgtttatttcgcgt

SEQ ID NO: 5772 - DNA, 1315 bp, Homo sapiens
  source 1..1315: mol_type = unassigned DNA
cgtgggcgtccgggggattcgcgggcactcgggacgaggcgagggcgcagaaaacttggagcccaatcagcacggagttgagcttccgcgccccaaccttcaggtgaccccgcgcggcggcggcggcagcagcagtggcagcggcgaccggagcccgcagcagctccgagcgcctccgggaggacaggcggcgagctcggcgaatcgtcatctgccagccgatcgcggcgctccgcgggccggggccgggagcccggggcgagcccgaacgcggcttcttctccgcccgccgcggagactctgccgggtgggctgcgggcgcccctcgctgccgcctgtgaacgctgtgggtgcgcggggctgcggccacggcggcggtggcggcggcggcgggagccgcgagtcggggccgcccgggctgtgcttcgccccggcagcagcggtggcggcggcgcctgtggctcaggatgcggccggggggcgcactgctcgccctgctcgccagcctgctgctgctgctgctgctgcgcctgctctggtgcccggcagacgcgcccggccgcgccaggtaacccacccacccgccggccgcgccccgcgccgcgcgccccgcctggcgcccccggacccccaagccgcccatcgcttcccctcgggcgcggagacttttggccgcggcggggagcagcccacgggcggcgacggcctgagagtggagtgggggagggggtcgcagggaggcgaccctccgaccggtggacggcggctggggagcagagggaccggtcagggctgcgggggctctagcgcgcatcgctgtgggcgaggcagctgtggagcgggacctgccgtcgggttccgcatcaggatctcatgctccccattctggtccttgctgtctcttccttcccgccctaaggctcttccaactctggggctggggacctggcctgggagccggggagtgcgagatctccctgccaggcaaggagcgcgactcccagcctttcagccaacagctcccggcggggtgtagcaacttaagttttctccccggctgtgcaggattctggtggaggaaagcagggaggccacccacggcacccccgcagcgctgaggacgctccggagcccggcgaccgcggtaccgcgcgccactaacaggtacagcggcgcccagcgcgggcggactggggctcgggagctgcgagccgggcatggggcgcggctgcaccggcttggactcgttgggagtaggcaggctgggacggcgcgagtgagtgtaagagtgtgcgtgtgtttgaagagggcgcgg

SEQ ID NO: 5773 - DNA, 1316 bp, Homo sapiens
  source 1..1316: mol_type = unassigned DNA
cggggtctcccgaggtcgtttcgccgtccaggatggagcaggtctggcccctggaagggcgcgcgggctgcttggggacgggggcgccttttctcgcgcttcgcggtttcctctctcctactgcaggcagcgcgcgtttgcagcgttttgggaccgaactgatgcttctgggaaacgaaactaaacctctctgaagtttccagctcgggctttttttgtttcccgctatccggcgtggcccagtccgggcgcggaacgagggcggggccgtggccaccgcggcggaaacgacccgggccgggggcgggcggcgaggacaagggggctctgtgcggcacccgcccagcttgcgccctggggactgcggccgggcggcggggctggacgggagtggacggggctgggcgcgggctgggcgcgctgggccggccaggcggcgcgctgaccgcggtctccgtgcgtcccgcaggcggggagctcgcaccgccgcgcccgggccgcgagtgatgataacctaagaggccggcgcgggcgggcgtgagcggcggaggagccgggcgcggcgacacgcggccatggagcgggagccggcggggaccgaggagcccgggcctccgggacggcggaggcgccgagagggcaggacgcgcacggtgcgctccaacctgctgccgcccccgggcgccgaggaccctgcggctggcgcggccaagggcgagcggcgacggcggcgcgggtgtgcccagcacctggccgacaaccggctcaagactaccaagtacacgctgctgtccttcctgcccaagaacctgttcgagcagttccaccgcccggccaacgtgtactttgtcttcatcgcgctgctcaacttcgtgccggcggtgaacgccttccagcccggcctggcactggcgccggtgctcttcatcctggccatcacggccttcagggacctgtgggaggactacagccgccaccgctccgaccacaagatcaaccacctgggctgcctggtcttcagcaggtgagttgggcgggcgggcgagcgagcgcgcggtggcgcagggcagggcgccccgggaacttggtgttgggcacagtgattggcaggggctgggtgcttagaaggcagctccactcagggtggagggcccggctgcgcgggacccggtgccgaccgaagccacagcgccgccaaggcctctctgtgcctccgccgcagctaaaggggcgccctggatgcggggacgcgtggggatcccctgtcactccgtgtcggggccagaatgatcccaaggctagaaaccgacggccgc

SEQ ID NO: 5774 - DNA, 1110 bp, Homo sapiens
  source 1..1110: mol_type = unassigned DNA
cgcccaccccggctcggagcgtggccaggagagtcggcatcgtagaaagcgctgcgggaagcgggccccctcccgcccacccggactcacgatcttcagcaggtccagtccactcccctgattcatgtctctccatgtgcctctcccgggaaggggcgaggagggccagctggagcaacccgggagaagtctgggaggactggcaggtctcccccgcccttccccactggcttttcggaagcagagaaaaatggaagccgaggcagagccaggaaaaggcgcaaaggggcagggtccccggcgccaggagaggagcagagggtgggcaggcgacgaggggaggaggtgcgaggctagagatccctgcagtggaggcgccgggagaacccgaggtcggtgccctgcccggcggctcacaaaggaaggagaaggcgccgcgctctcgctacctgtgcggcggctccgagcgcccccgcgggagccacgttctctagcagttccatctggatctcctgcgccaccgccgccgccgctgtgggaggcgacttggacatgtccctttggaccattggcgaaaagtcggctcggagcgaagcagccagcccccggcggcgggtcccctcctcctcgcccccgcctccccgcgctctgatcggctctgggggccgcccagggctcaggcccggccgttctcggcgcagcgccccgcagcgccccgggactcggcgccctgctgccaggcgctcagtgcgcgggacggggccggggcatcgggcgaagcgagccgctcgggaggcgggacgcgggggcgcggctgcggtgcctgggagaggggagccctcagcggggcagccggggccgggagagcgggcgcagcgcggcggggatcggagccgcgggcgccgggaaaggtcctcgccaggaggggagggaactccgggagcgcgagccagggggaggcgcgtcggaaagcgagagtgacaagcagcctacaagccgaaaagttcctcgcgggaggcgcgcgccgcgtgggctccgactcagccgctgcgcgtcgccgtggcacacaggctgaaaagtttgcgaagccacagaagccaggcccggcgc

SEQ ID NO: 5775 - DNA, 1655 bp, Homo sapiens
  source 1..1655: mol_type = unassigned DNA
cgggtttcccatcggcgaactgaaactggtccgtgaagaagtggcaaagtaacataactcctgcagcggccaggtcggccttcgggaacctcgccatgccgccgccgccacctccctaccccacccgccagtccttcgccggtgctcgggggctcccgatgcaataggcacgaccgggccaaacgctgcggatcggtctcggtaggacccggaggcctttgtaaatgtcgctgcgatttcacagtagggaaccgagaagaggaagaagcgaacgcgagtaggagcgcagcgctcttcggacctctgaggctctctttgcaacttgccacactcgcagccctcacccgacactgaacaacaaccgcggggaggagaggccacttgcagccgaggctcgcaaactgtcggttccactcgggcagcgccaacccggtgcccgcggacggtgacttccgagccccagcgatgcgctccactgggttcaaaacagatctaattccacagccagcgccgctgcctgccccagatccactagggctggtcggctctgcaggaactttcctctgtctagggatggccccggcaggaggtttaggtttgcgggaaggaggttgatgacgaaaccctcccgacaagttttgcttcttttcttcgcccgacgcagggcgcgcgtcctttctcgcagccggaggaatgggcagctccaaagagctgagccctgggaaggttagggctgcagcagtctgaggtccgaagccaggaaaaaaatgtgtttaaaaaaaaaaaaaaaaaagaggaagaagaaaggaaaagggtggagtgggagggagtcacgctggaacctatcgggagagggttcctccgggctcaggaggaggtggccccaagcccccgcggagccccaggagtttggtggcggaggaggcgctgccgtcgccacgctcccccgcgctccttctccacactttgaggagggaaggcagctcgcaatttgccagatctgccgccgcaccctcctccctcctccctccgccctccccttcgctcctccaggcttctcccaccttcctccctgaaaccggcagcccgcacagacctgtccaatggctgcactttcctcggggctggctgaggagtcgcggccaacagattaagccgggggagcctagcgaaggggagggagagggccactccagccccgtgcgccccaggcagccggctgccccagagcgcggggagaggggacaggccggggagctatcgggggagcgcggggcggtacctccgcgccgccggggcgccatcctcgcagcctgctcgcacgccctgggcagctccgccaactgcgccccacacccacctggctcccgggccgccttcgcgcccgactgcggggggcgatcgcgccccgccccgaccctggcggggtctccctgggcacgaaagggttaaccacagctcgccccttcgcggaggctggttctggtagtggctagggagtggagaaagcaaaccagagccggttcggttaccgactctgcgaagccccctcgaccccagcccagcgcgggagggtggcggaaggtggtgcaccgcagcgtggtccccgccgctgccgccgcggctttgcaaagtgtcagcgggggcgaaagcga

SEQ ID NO: 5776 - DNA, 1655 bp, Homo sapiens; identical to SEQ ID NO: 5775
  source 1..1655: mol_type = unassigned DNA

SEQ ID NO: 5777 - DNA, 304 bp, Homo sapiens
  source 1..304: mol_type = unassigned DNA
cgcggtgggcagggttccaggaggcagctcccgctcggcgatagcccccggggcgcaactccccgcaggacgcgcacctgccaggacagccactaagaggatgcggaggttgggggccctctcggggacaaaatcagggcactccaaggaactctctgcgcgttcaggcctgtctgtgaagctggcaggcggaggacaatgggagcaggggtaggtctccagaggcgagcccgcctccacctttcccacctgctccccacctctgcgccggccgcatttaccccgccccccttccagcgcccgc

SEQ ID NO: 5778 - DNA, 1666 bp, Homo sapiens
  source 1..1666: mol_type = unassigned DNA
cgaaaccgcgcgagtggcaggagcaggccaggccggaggcccctccccggcccccaatccggcggcctgccctccccctcccggggcgtttgtatagcagacacctgcagcacgggcggccgcccgggttcccgacacaaggcgctggtacctgagcccttgactggtaatgcaccataaaccgctcctttcaggccctttcagagcaggagcacggaggtcaccgtgcctacaaacccctctgtgtccgccacgtctcctgggccctgggcgctcgggcctccagccgcagagcacgcctgcccgtgggaatcccaacacttgtgctccgcgaggccggcggggcgggggcgggggattgggaccaccctgccctcccccagcccggcctcccccgccctgcccgccgctggttcacagagcgcagcgagtggaacgaattgggtgcgccgtcctcagacgctggcggaaatcaaatgatgaggcgaggtgggacacccgctctccgccccgcggccgacgcccagcccacggcaaaggtatcacacggtgtcccgcctcgcggcgacgcgagcggcgggatgactcggcctgggccctggcgcagccaaaggcccggctcgctggggcgcgatcccagctcggcgcgcacagccctccgagttccaggttggattgggtgcggttgtacctgtggagtgggtggcccggtgactgccacccgggccagtgctgccagcagatgtgcacatcctgggcgggggctggcggccgagtgtcactagtaggggcggcggctaggcagccattcgccgccttccaagcccggcgctgcgcgcagggcttggagcactcggtgctgagacgcgaatgcgcataaagagaaaagtgtttccagtgtttccccaaaatggggaacagggaagaaggacaagtatcatgcaagactgccactgccacctgtcttttgcggaccatgctgccttctttcccgctggcctggctctgagcactgaaagccggggagagggcgccggccttagagccagccgcactcggggaccgcaggcggcgctggcccgggccacccaagcccggcagatgagcctttggcctgcgggggaccgggccggaggccagggggacggcagtgtcgccggagggagcgcgcagcccaaggccggtgctccggccccgcgcgccccctcccgggtccgcagggaacccgggttacctggggagccgggctttgtcggccacgctggctctccgcggccccagaactaattaaacgcctcttttggccaagggaagtcttgcgccggacgggggtgggggcgtgtgggggcggcatgtgggcaccggaataatcagccccattcttgcgcttctacagaacccgcggcgcagcgagaagtgaacagcggccgcctgaatggcggtttcaaaaggcgacacctgcaagcgcggccggttgtgaattgaattgagtcaaatgcggcgcccgctcgtacctgagccgcgagctattagtgtcaggcgcgcccggtcgtccgggcggggaagcgcgcggccaggccgtccgcgctgaatgcggcaagctgcggcgcggccgctccatgggaatgtcgccacttgtgctgctagcggtcgggagggggtgcgc

SEQ ID NO: 5779 - DNA, 5030 bp, Homo sapiens
  source 1..5030: mol_type = unassigned DNA
cgcgtcacagtggcctctcccgcctagccacgcgcagtgaaatttccggcaatcgggccagctaagacacgggatttgcaccgcagcctctcagcttctggagccggagccgagcgctcccggcagcttctccaatttctctcctaaagtgcgaagggaaaagccccgtctgctccacgactgcaaggccggcggatctgggagccgcgcccggctccggaggactcggcgggcccggggctccccggcagcggctcctctgctaggggttaacagcagcccccgcggccgggcgggcgcggacgcttcctctccacccgcccgggaacgtggataccgcgcccgcaggatgttcgccggctgggaccggcagtcaggaaacatgagaaggcctcgctattcctgttcccgggcggcgcgcgccgggctgggtaaataaagccgagacgacggcggtggcggtggtgagcgcgctggagcccgcgtggagaacatgcggcggggatgggagtgcgcctagtctcgaggcgggagagccagccgccctgcagccggccgtcggccccgcagccacaggtacagcccccgcgtcgccgagtctcagccggctgcggcggaacgccaggctcgctctggcccctgcgccctgggcgccggtgctctcccgcccttcccccaacttccctccaaggtctggtggagaggcgctcgggtagcggccaaggctggcccaagggtctgcgcggagcttgggagcccacctggccgcgcctcctttgctttaaaattattcgccggcgttgggggagggggacacttctgcagggagtgacctccccggccacagtctggagtgaatcggggtaagtgatttgagaagaggcgcgggtggccgcgcgcgggagtcctgggagggtcagcaagtgtggttcacacgcccccggaccccttgcgacaggacagcgctcggacctttgccatcgcttgcctctgagcctgctgcctgcagacctacagcgcgccgggtgtctgtgtctgcgatctctgcgtgggcttggggctgccggggaagtgtccgaggtggctaacctcgtgatgacttcgctaggaaaaacacgtcgtcgcatctaggaggacgcgctggggtggctcggagaaggccgggccggggaagggtgtcttgtacaaataaagcagcatgaacacacatccctaagggcatgattttaaaagaaaacaccaacgcgagtcttgactgtagaacaggggctgcaagcacgaaaattctctttgacacttatcaccgaggctatgtgcacaccccaggcacgtacctgtctgcgcgggaggacgcagtcctaggggacacacgacatccagcagaggtctgacttcacttccctacgaacacagaccgtagccgtcgtttgatcgcggtggtcacgcgtggtcctaaatgtcacgcgtggcctctgctgcggtggccgaagggcggggcgggggcgttggcgagtgtgggcgcttggcgaggcaaagggtgtgtgtgtgtgtgtgtgtgtgtgtgtgtgtgtatgcgcgcgcgcgtgtgttagtggagtagcagcccatgccgcggctggacgggcaaagggggcgctggcagcgaagctgaggccgctcggaggaaacgggagctgtcccgaggcgcgaggcgaggagatggggcgggcgaagtccgccgcgcgccttggggctgtaactctgcggctccgcggccgcgcggacttgctcctgacgccggtgcgcggcaggcagaggctcagggcctccgcgaccccagaggtgagctgctggctctccccgacagtggcagcagtggcccgggaggtgcgccgaccaagctgcctcctgccttgggcttctgacacctttacagcctctgaaagggtccccggagaccccagagagaggcgggtgtcgaggggctacgagctcgcggctgacacccgcgctgcggaagagaatggcactgattgagggctctggggacctgggtcctggcgccttggaccttaggaccatgcacttcccggggcgcgttgggggatgataggaagattctgggagagaagggggagaagtggtgctttcgtcctgacgccacttaactttttcctgtccttgaacccaacctcaccccgggggaccttggcggacagaagatgcgggggtttcaaccaaaccatccacgatctagaaaacacgaaaatcccccaaatcccggtatggcctgggactcatgagctggggggtcttgtggatacggttggcacattaccccaaatcttcccttccatccaacccctcctgacgccccgagttggggttcctagaggctttagtcttctgctgtgattgaagaaccacgcgcggcctcacgccggtcgcgctccgcagtccggagtatgcctctcccagattcaaactgaaacccagaggctcgtttgggaattcgtttcctttgcctctgcgggtgaatgattcccggttgtagttctggggagtgaagggattggggggatcgatcgcccaggcaaggaagagggcaggtacctgtccggggaacctgcaggggcgggggcgtgtagccaactggggagagccgcagggtccctgccagttgcggcggcgccgctcctcccctcggctccgcagcccggcgacccggccaagttcaaggccctgaacctgcaggggtctgagcactctcagccagtaagtaacgagatgcaccttcctctcctagaagccgagccccgctgcggagctcccggcggcccagccccgaggctctgcggccgcgccgcgcgtccctaccaaccgacaccatgaacaccatcgtcttcaacaagctcagcggtgcggtgctgtttgaggacggaggcgcctcggagcgggagcggggtggccggccctacagcggtgtcctggacagtcctcacgcccgccccgaggtgggcattcccgacggcccgcccctcaaggacaacctcggcctgagacaccggaggaccgggtatgcgcactcccctgggggccctgcccgcctgcggcccggaggggtgggggtggtgagctgtgacggggtcccgtggcaacgcgggcgggtggacgggaaagggcccggagttccctgggagtgcaggtctgcccctccagggctcgcgcattctcatgttaaggggctcctatcttaaaacatgagggatcaattcgtcggggcagctccaaagagcttggtggagactaagggcgccaggagctgcccctcggccctccgctgcctggacctcggagttgggggttatttgcccctctccggactgtgggtgccggtgcgcggctgagggcgaggaaaaaggactgagctcggtgcagagaaacaggcgaagccgagcagtcggggagtccaggctcaggctccgcggacttctcttcggtcactcgagcccctcgccagagccccgcggctcgcctggcccaaggagtcgggaaggtcgcctcccgccagggagtcccgggcgtgagcgcggctcggctgggcccgcggcgaacccggagggggaggccccgggcctgcggggccgggtttgagtttagcggggtgaggggtatgctggggggggcggtagcttgcgggtgggccagctgctcagactgccggtgagtggagggcaggctctgcctggcccgatccggcggctccccgggcgccccgccggggaggggcggccgtcctagccgcctccacctgaacgattgcatcagctgcttgttctgcggcgtcgctgcttagtaaaacagagattcggtttcgtcaaaatgttactaccagtcgtttcgggtggaattgcatttcaaagtgtttaaagaggcagaaacccaggaggctccggcgcaggcgcgcaagcctcggggagcggctgggctcgctggcggccgcgcgcgacacctcccggacccgtgagggagcgcagcgccccaggccacgctccaggctcctggctgcctctgcctcctccccctttgaatgtgcttttcctgaggtctttttaccttacatgatgggacagagcttgccgtacttttaaccctcccttagtcgggaaacggcccgacggtgtttttgggttctgcagctttcctccacaaaccaccaactcctttagaaagtttcccccttttcctaaaagatcaaaggaaatagcttaaagagagccggggcggcaatgctcctttgctttattccctatgtccagtcggcgacctttcccctgaccacaagcgacggaaagcctctgggagcagacaagagatccccgagggaagtttcgagagccagccgcataccctgccaggcctgccaggccagggccactcgagggtgcggcgccagcgggtgagggaagggtagcagttagccccgctgcccagatacgcgactggaatagcagtattcttcaaatcacttgaccttcgtcttctaaacctctaaccttggggtattgggttcaaggtatccccctattcaagataaacctatcgaaatgatctccccatccagaaactgtgtggctcccacttcctgcctctcccaaacactctgggcgcgcgcaaagcaggggcgcaaggcaggaatgcgcagtttggatgcggggcccgggcttggccggggcgtggagcgtccgggcgggcaaacgcgtcgctcaccagggccgcctcctctccccatgtcccagcgcccggcagaatggcgggaaggtgaggcacaagcggcaggccctgcaagacatggcgcgacccctcaagcagtggctttacaagcaccgtgacaacccgtaccccaccaagaccgagaagatactcttggccctcggctcgcagatgacgctagtgcaggtaatcaggacccattaacaccctgatccgttttcccgcgaggggctgaagagcgggaacgcttagagttcgtgtggctctccacgtggcgc

SEQ ID NO: 5780 - DNA, 2868 bp, Homo sapiens
  source 1..2868: mol_type = unassigned DNA
cgcgtttcgcatcccagaggggagggagaaagggagcccaggcgcggggggtggggctgggggagcacgagagagttttctcctaaacacgtatttcctcgttttctcgacgctgcagcggtcccattatagacgcatttattgcccctctcttaaaagtcgttttaaaaataacgcaggaaccaaagcgagcccctcggtccgaaatgtacgtgtaattccttatatagcctgggctgcggccggcggcagggccgttgccgcccattattatacaaacaggtaccggggcggcgcaggcgggggctgctctccctgcgctcccgccgcccccgggcggacaagtctcgcccctctcgccacaggaactgtccagacaataacaatcagcagacatttcgctgctgcacgagagggagagaaagcatagcatcgccccgagataaccagaaatacaatcaacttacaacgtctctccaaactggaaaaggcgactgtgcaaccaccaccacatgttcaggtctcgatccctcgggctgtctctctttttttttaactctcacgccaggcagaggggtgtgtgtttcccttggcacagcagcacaaatcaataaacactgcagctgcggtgcaagtagcagccccgcgcgtccgtcggtccgtccgccccctcccccaccctccttccacccgagacccagagcgccatccaagccccattatccggcttcagcgctccgtgcgtccggcccaggtaacaacttccccaaaaaccgaaagagaaaagcgcgaggcgcacgcacaccggcccatcccggcgcagagacctcgtctgccccgggagggggatctgtctgtggtgcttcccggtctctaagcccaggtaacaactccgcaaacacacccgccgcccagctcgcccccatccgcgcggctcccggcggcgttaagtgggtacctttcctgccttgttccccgcgccgccccgccgcgccccgccaaacgtggaccccactcgcggggctcgccgcggagtccccaggccggggctctgggccgggcagcgggaggcgccagggaggaggggcgcttagggacccgcgcccccgcgcctctaatccccgttacgcgagcgcgcccggcccgcgggtcccaactttaccgccgccggccgaaccctgtccgcccgcggcgcgcacagccggcgcccgcgcacacgcgcgcacaaaccccacgcaacccgcggccgccccgtcccgccgccgccgcagcccgcctgccgcgcgcccacagcccggcccgagtcgcggggcccgagcgacagcgacggcgccggccggggccgcggcgcgcggaagccactttgcacggtcagcgccgggcacaagtttgttccgcggctcccgggggcctgggcgctgagggagaatcgcgctgagggggccaggaggagggggagagggaggcgccgaagggcacaagagtggggaaaagtgcggaaagaagcaacagccgctccacccgggaccagaaaagtggccagtgcgtcccggccgcccgccctgcgccggggatgcggcggcgtcggcgccggctaacggtccagggaggcggcaggggcggcgggagccgctaggcggagagagaccaggtaagagacataacggttcagggagagcgagcggccgcggcgcggctccggcagcggcggcagcggaggggggcagagagcactactttctactttcccactccactttgccgtccctgccccggctgcccccagcccggctcgcccccctcacccccgggggcgccccggctgcccagctccccctgactccgccgctccccggtcccctccgccactcaccgttattgcgccgcgggttcgcctgctttctgcgcttacacctggggccatccgccatgatcctctcgcttgtgtctaaatgctcgagtcacctcctccccctccctcccccttcccccccacccctccgcctccacccctcccccctccccaccgcacctggtttacgacactcccggctttacgacatcaccttccttacacctagaggctctcgctctacggccggaaccttgttgctagggaccgggcggtttgcggcaaccgtgggcactgctgaatttgaattgaggggcgagggaaaagttttcctcaggtgtggtggggagagggaggcggatgccgggaaaccgtagggacgcggtcagaaaggcgacgggctgtcggagttggaaaggtaaagttggaggctcggcggcgtcctgcctccgcgctggccacacccgccgcggctgcccggggcagggagggatctggctgattctccctgtaccctgtgccctcggagctgcccctccgagcgcccagaggtccccgcctgcctgcttcctggaggcagggctaccatcagtcccacgcctcgcgtgtccgccccccgcaccccggggccaaggaaagggatcgcggtctggactccccggggagttcccttgatgaggggaagggcaggtttggggacggcgaggacacgcggcgaccggagagaggctacctgacccgcgcagcccggactcccttcccttcccttccagggacgcctggtttccccccaagcgaaccgggatgggaagtgacttcaatgagattgaacttcagctggattgaaagagaggctagaagttccgcttgccagcagcctccttagtagagcggaatgagtaatacccacacggtgcttgtctcacttccccatccgcacccggccctcacctgctgtcacctcggcctcccacacccggtccgcgctccccgccctcttcctcgcgtagaaccgt

SEQ ID NO: 5781 - DNA, 2678 bp, Homo sapiens
  source 1..2678: mol_type = unassigned DNA
cgagaggcgatggcgtttgctttggccagatttaagggcaagcgaggctgcgcgcggctcccgcagggtcggatctccgagctccagggcgcccctccacccgggtgtagatttcccgcggaccccttcgccctcccgggtttcatcagctgcgcaggaatggagctggccagagctctgggagcggggagggaggcgccgccaccagagggcgccggagccccagcgctgcggccggtgagcggccaggctccccggcccagcccagcaaaggcctggggacgcccgacggctgccttcttcactggacctcactgccttcagttctttaagagcagggccaagtcagtggggttcccggctccaagcccagtgcccagggtgggtgggtgggtgggtgggtgggtggatggatggatggatggatggatggagtgccggcccacagccatctaacggccaaagtggttttggaaaaaaaatgcacagaagacacctactcccaccagcggagttccggagccctcgcagcctcctgttgaccgctcccgcctaatgcagccgctgaccgcccactccccgacggccaggactccccagggacagggacgtgtccccagggcaggcccctggatggacgcggcgactgaccccacttcgctggacgctgtgctgggaaggacacagagaggtggctggggcagcctgcggtcacaaagcgaggcccaaaggggcgctctcctcacccccacgtctcctgggtgccgacctgcaccctcccttcgccaccggactggggccatctgggatgtctcgggggtatccggagggctaagcaccgccgagggacggctccgtgggaagagttttctggacccagaaggcagacgccagtagtactgtcctaggagtcggaggtcggggtgggggagttctcagctctttgggtcgcacggagcttttcttgggtaaggcagtaagtacttaggtttaaaggacttacttacagctaccatttattgagtactgtctgcttgtcagacacgatgcagagaatttcgcggcgtggggcgggtctcattgaatctcccgtcccactccgcggggtgggcctgtgattagctcatttcaccattgagaggtcggaagtacaaaggctacattcgcttttactgagagccgccggcgccttctgctttgtttgtacaggcgaggaaactgaggctcggctggtggcgccgtgggcttggagtccgagccacgctgactgcaaagacgggtctcattcccgcagatcgagctctgccggcggctgcgccgcaagccgggcaggtggcgagcttgagcccccacgcacagaaagcaggaccccctcggctgccttgggccgccaccgccagcaggccctccgcccgggactaacttgtttgcttttcattggttctcattcagttcccgccatcgaaaggccccgtcccgcagctttccacgcgcgccccactttacgcctaaggtcctcagtctctccagtggggccctgtcacagggacaataagcggccctccagccggcgtcgctcaggctgcggacctcactgcagaccgggccagcggtgcggggcccagcggagcctgagaaggtcaaaggccggagcgcactgcgcctcgggagcacagagggagcggaggaggggcgaaggggatgggtggggggtgccgccgagggagtcgcgcgtcagagaccccggccacggccagcactcggctccgggcccgcccctcaccgcgcgccccgccccgccccgcctggctctcccctctaaagcgcccggcgcgcgcctcccaccgccgcactttcactctccgtcagccgcattgcccgctcggcgtccggcccccgacccgcgctcgtccgcccgcccgcccgcccgcccgcgccatgaacgccaaggtcgtggtcgtgctggtcctcgtgctgaccgcgctctgcctcagcgacggtaagtgcgctcggcggggaggccctggcgaggctctgggcttcggctcccgcccggcgcagagccgcggctcctctgcctgcgcccgcagtttgcgccgcccgacacagtgggggtggaggcagctcgcttagctgggcgctctggtgcggtgtcgcgttcaaagccctacttttgcgccgagggtttgtgacctgcagagagcgaccgcctgacctcaagctggctgcagagcgaggtcagccgggacaactgggcaggaacgccccaagagagcgttcgggactggcgcgggaaggcgcgagggtggggagccgcggaccccagacccctgcctgcccaccctccacccactgccttcccgctgcgggctcggtttccacaggcgaatgggctccgaggtcctgctgcgcacagtgctggaggtcgggcggtgcatggcgagagcgcgctttgcaaagttcgcctcatgccgcgacttgaggctgtgaggtccgatgcagccgcgcagcctccgctccctgcgaagccgatcctctccccacaccctcgcggggctcttggccaggcgcgggcgggctgcgcggcgcagctgtcgggcttgtgccacccgccaggccgcgcttctgcacagctccgcggtccgcagcgacgcggacctgggcgcgcgtccagccgc

SEQ ID NO: 5782 - DNA, 2756 bp, Homo sapiens
  source 1..2756: mol_type = unassigned DNA
cgtcctcgcacgcatcaaaagggccaggcgggctgcgaggctcgccgtcctggccagacacaggacgctcacgcaggcgcaccgcatcgtacagaccttgcggtggctcatcaagcagcacatcgcgctcggaacgggagcgcgtcaggaggcccacgttgcggagcagcagcaagacgggagcatagagcaggttggccagtcccatgccaaggctgagctgctcaaagcccagcgagtgcacaatgtggcctgccactatgggcccgagcgcgtaggccaccgaataggagatgtcggcgatggcgtagacgctgccatagactgagacatggcgcacgtccaccaggaaggcgagcgtgggcagcagtgctgtgtcgactagggctatgccaaaacagaggccgcatagtgagaccactagcggcgcgaaggagcggcaggcgggcacgatgcacgagctggcgccgatcacagccagcccaagcgcgccgtacagccactgcaggtgtgggtagcgcgccgccaggcgcacggtgaggtagacgcccagcacatgaggcacgaaggccggcagccaggccatgcccatctcccactcggaagccgccatcgtatgcttcatccacgtggcaatggtgggttcgaggaaggcgaggggaatgttacaggtggtgagcgcgccggccaccacggcaatgtaggggtctagcatgaggcggtggatgggagtgcccactggcaggttggcccgagcccgtgcagccgccgagaagggtttggccactgccagcagcaacagcgcgtcaaagagcgacacggcagctagcaccaagaagggcacgcgcttgccggcgaactcatagaggatgcccccgaagggcggggccactaggcttccgaagctaatgaaggccagcgccacgcccagtgcacgactgcgctccggctcctccgggtacttatcggcgatcatggctatgccagacgtgtcggcgaaggctgagcccaggccctgcaggctgcgcgccgcgaacagcgtggcgtagtcctcggcgaaggcgaacaggactgtagaggcgaacatgacgcccaggccgatcagcagcggcacgtcgtagctcatgcggtcgatgaagggcccgctcaaggggttcactagcagctgcaggatagccttggaagcaaacagcaccccgatcttcacgtcttcgctctccgtagggtagcggggccgaagggctgagcccgctggccacgcagctgtcggggacgccgaggtgttggccgtgtaggcgctggcattggccggagtgggcagcggcagggtgggctcccacacctcgggagtccgggtggggccctcgccgcccccgcgcatgtgggcgatgtagtcgggcactatgggcacgatgaccatgtacagcatgttgtccagtaacagcgccacgcacacgataacaagcaccaggcgcctctgccgccggggctcctgcagcgccgcgcccacagcctccgacagcttggtggccgccgcccgggcctggcccgcaggttccgcggattccatgcccccaccccgatgctcttccgaggacgcctccgccagggccgagcgctggcgtcccgcagtgcagaggcgagggcacgggacttcggggaggctgtcctggccgagcagactcccctgtgcctcaggtggccgcggagctcatggcccagcgtcccgggaaaggaaaggactccgtccggcgaggcgttgcagctactcttagccgatcccgggacccgcggctgctgggctcaggggcggccgggaagtcgggcgcgccgaggggccggggccggagactgggcgcacttcgcccggggcgcgcccagagcagcccccgccgcgctaagaggccgcccgcgctggccgagggacatgctgttgccgcccgcccgcttgcccgcccgttagccccgccgctgcgctcccctcccctcgcgtcggctcttgcctcctccgccgcctcctctttttttttcccttccactcggggctgtgacgcggcgagtcccagcccccgagtggtgcccgggccacttacgtcgctcatgctaatgcgacgtcggcggggcgggggccgggggcggggcgtggccgggcaggggtccgctctccagatgctccagggctggaggcccaggaagggctctcggtgtggaagtcttgaaccagcccctgggatgggcgttccgcgccggtagctggccctctgccccccgccccctgcctgccccccgcccgcggttctaggactcgcggggtcagcgcccgctcttctcctcttggggaagggggcgcggcagccggttcctcgaggccccttgggagaggcgggagccagaggcttgcgatctccgcttcagcctggacctcggcgcacagcgagcaggaagcccccgaggtgagccgccgctgcgtccatctgttctcgcagctggattgtggagccgcgtccggaggagcgctggacacggacacccccaaccctttctccgactccgccccctggccccttgcacacacactcccgccaggaggggaggggaaggctcagcaactgcctggcctggctctgacccaccggcccctccgcagaatttctcggccgcgaatcgcggccgggagcttgtggggactgagggcagaagttgccgcgccccagtcggggtcgcgaatattagcctggccgctgccgccctcccgc

SEQ ID NO: 5783 - DNA, 990 bp, Homo sapiens; identical to SEQ ID NO: 5553
  source 1..990: mol_type = unassigned DNA

SEQ ID NO: 5784 - DNA, 829 bp, Homo sapiens
  source 1..829: mol_type = unassigned DNA
cgcagcgatcccgcgcaggtgagggtactggggagcccgtggccttctccgcccgccggctcctccccatcagccgtcagccagggctctcggcgccggggaagcctcccacagggtcccaggccacccaagcgcggtcaaacgccggcggcccggcctcgcttacctgacgcagccgcgcgtccgcctcgacccatcaggcgcgcagggcccgctcccgaaactcgcgcgggctctcgcagtcggccgcgcggcccttagccgcgaagagagcgtcgcgcacggtggcgccgccacagccgtgggccgccgcgcccaggtagcgctccagctgcccgcaaagctcctgcagcgccgcctcgccggggcccacgcgcgccggccagagcagcgcccaccgcccgagccccagacctcaggccccgccgccgcccacgtccagctccggcggcagccgtgggaagcagtgttccagaggcggccacagcgccgctggctgccggcgcgcgccgcggaaccccgcggccgagagccggccggcccagctgggcggggacacggcggcctcgggcttgtgctccagccccagccgggccccctcgcgccgctgcggctgctgcgcggtgcggtcgtgacaagtcacagcaaacttgccctccgcgccgttccaagccaccaggaagcgcaaccggtgcctctggggatcggcgaagaggccctcccggagcggcgcccagccctccaggctgtcgggctgctcgtcctccatggccgtcggcggcagcggccctagggcttggcgggcgcgggcctgacctcgtcgcaccgc

SEQ ID NO: 5785 - DNA, 4119 bp, Homo sapiens
  source 1..4119: mol_type = unassigned DNA
cgggaaaggtggcagccgaagacctcgcggttttccctcgctcaggcaccccgccccgcccccagccccggtcctgccctccgcgccctgctggccgggcactcgggcgtccaggagctccccctcggggtggcgcgcggcgaccgccggcgggtttggcagcagcgccagtcgcggggcggcccgggcaactcgcccgcctgccggtccgcccacgtgcgcagagaggagcgaagcgcgagcagtcgcctcgcccgcgcttgctgccggtgggtgcctcacctaaggggccggcgggggccgtaacccgagccccatcgcagggatccgcatttgcataattcggctttcccccgttctttcggactcagggcccgagatgcgagtcggactcccttccgaggcgtcgtcttgcccatggtcagcgcgggggccgcgggacccgccagagcgcaggcggagtgggctggcgcacgtggtaagaacgcagctatcttttcttgcttttcttttctttctttctttcttgagaaataggactttgcacatttttgctggggtggggtatctactagggtgctaaccttgctgcgatttctttccatgtccttttcatccccaattggaaaaaagcgcacagcgcgagcgagaaactttcccaaatgtgctctgggtgacttaagtcagagagatggccggccgctggataccggctgttttggagggagggggagaagcagcgcttcagtggaagagcagagggagagaccgctcccggcagcctcagggccctgaccgcggtgcgctgggcccggcgagagctggcgcacggctgcagcggtcgaggcaggtgagcggctgaagacccgcctgcagcgccgcgcttcctccacggcgtggcgccgtggctcccgcccgccccggcccacactaagctagggccgctccgggcccggggtgaaaaagggacaggacaggcctgcgaggctgaccctgcgcgttatccctggcctccgcggctttggagcgggaaagggctctggggcagttcgcaacctgcacaaacgaccatgaatgagtcatgcaggcggcggtgcgctggacttgggcacccgggaccagcctcctgtggggccccggacaggcccggctatccattgcgggctggggcgcactgggaggtagaagctttgcgcccagcaagccagaacctgctgctatttggactttggaaaagtttttaaaaattgctttgggaacgaaacagaagggtttctaccggggtctcgcaaagtaaaacgagtgggttgggggatggggatggcgtcttgaaagtgattagagatgctttcggccgtcactgaggaccgcgctgggctcaccgaggtgttttttggggagggagagaaaatatttattctagtacgtgtattctggctcgggtgcgggcagggcgcggtcctggatcctgggctatgggggtcagggggattctgtggctgcagggaccggtagtgaaggttaggccagtgtcttcatagaacctcctgtccagcgagcccggagcccgctctgccgccgggacactgctggcaacgacggcgcgcggacgcagtcaacagggaggtgtgtagtgtaaggtgtgtgagcgggtgtgtgaagagggcagcgggggcgggagtgtgtagcggaagtggagcgagtgtgagtgtgtgtgtatgtgtgtctggaggggcagggtgagtgtccaagcttccatctggacgcccccacgcagccgaccgcccagacgcgccgggaagggcgcccgctccgcgcagcagctgaaggggggcggggagcgcgcgggcagaggaaggagggtgtctccggctgaggatttctctcgaagctccccacagtaattctgctcctcctagggtttaccctcccagtcccaaggtgcccaaaatacttaaacaaacaaacaacccaaacctgttccgttttcgctcctgtataaatagaacagactttccaaaaaagcaatacgcattcactcttatcaccagccacttctttccaccaagtaattcagaaaaaagcagtcagcttccgtgaatgcatgtagctttttttttcttcgctgcctccttttgcttgcggttttgagctgccaagaaagtgagtaggggtttgactgtagtgtctcggctccgctcggtttctttccgaagtttaattttccggaatggctcccaaacaagggctagggaggcggagccgccggcaccggatcttcgccttttttggaaagtcccagagaaccggaattcctccccgccccgggaggctgagccgcagcctggagcagctcgctctcctgctgtggctgtgactgggtccatggcgcgccctctcccccgcgatccctgcgccccggacccaggctgcagctagggccgcgcgcccgggaccccagcgatccccgccgcctgcgagctggaagtcgcgagcccggcggagtccgcgcggccgagcccgtgtatgcaaatcagccatgtgacggcaaaagccgcctggcccagccctgttcctcagtccatatatgggcagcgacgtcacgggtattgaagacctgcccataaatacttagagcaacactttccgtctaactgagcgaggagcaattgattaatagctcggcgaggggactcactgactgttataataacactacaccagcaactcctggcttcccagcagccggaacacagacaggagagagtcagtggcaaatagacatttttcttatttcttaaaaaacagcaacttgtttgctacttttatttctgttgatttttttttcttggtgtgtgtggtggttgtttttaagtgtggagggcaaaaggagataccatcccaggctcagtccaacccctctccaaaacggcttttctgacactccaggtagcgagggagttgggtctccaggttgtgcgaggagcaaatgatgaccgccaaggccgtagacaaaatcccagtaactctcagtggttttgtgcaccagctgtctgacaacatctacccggtggaggacctcgccgccacgtcggtgaccatctttcccaatgccgaactgggaggcccctttgaccagatgaacggagtggccggaggtaagccgcgtgtcttcgcaggcccggacctgcgcggcccggaggtggtggatggggtgcagtgggtgtgcgggaatcgcaggagaggattggggctccaggtggacggtgctgactgcactggctttgaagactggaagtgggtgcaggaggaacctgcgacagctgagaccagggcgcgcgggcagatgcgccaggtcgccagcaaaccggcgtgcgtgcgccccggcgcgcccagccccgggcgagcgcagggatgggggtggaagaggcgtccccccgggtttcgaggcttgcgtaggccctctggccggcagcacttcgacctcccctctcccggggcaggggcaaagtgacggtaaagttcggggctctcggggagagctgcgcgcctggagagccgagcggcggagaagcgccaggggaaagcgtcggtagctccctcctgggcagagccgaccccgggaaaatctcggagcgctcccttcttgcggcctggaggcgcgcccccacctgcccgccgcccgcgaagttgagggggttagtaaggcgggggctccggccggcggaggcagcgagtgggtggtggaggagggcgcgcaacggcgggaagcagcccccggactgccgagggaggcccgcgggggcaccggcgacgccggtttccttggcgatgctgtggaaagtcgtctctcgcggcccccgcgccttcctcgaggccgggccactggccttgggctgaggcggggacgcgcggctgtcgggaaaggcggagaagattgggagggcacggaaacctacggactccttcctctacatcccccattcgctccagcagccctcggctgaagcgcagcgggagagggagggagaaaaaggcacaaggcgccggggatggggagcagccgggaaatcacccacccccttctcgggctctcctctcggtttggcaccatcacgg

SEQ ID NO: 5786 - DNA, 1575 bp, Homo sapiens
  source 1..1575: mol_type = unassigned DNA
cggcctgggcctctgggcgcgcttgccgctgcgcgggcgcggggcggctgtcacaccaccctggccgggtcccgaaagggaggagtggagcttgcccgcctccgcgagcctccgcgcgcccagccttcctccacctgcccggcgtgcccagggcgctcccagcgctggaagccgggggcgcttgcccgaggcgggagtcgctgggtcatgctcttgcccaccaggtcctccgaatccctggtagggcagcgtctgtccgtgtccccgacccctcccgcaggcaactcgcgcgaacctggggctcgcagagagcgagcgcccgcggacaccggctgaacagtctggaggctgcgcgagggggcgccgcggggagggataaaagccagcaacaaagagcacagacctcgtccagcagttgattgactcgtcccaaaatagccgtctccatttgctgctccccgcgctccgcttccaggcgcagcacccgggcctgcagctcggccgtccgaaagtgggcgagcaggctgagtgccagcgagcagagggccagcgtcagcagcccgcacgaccctggactcggcagccgtgcgccgcgctccgcccgcgccgccaccagagccaccgtcccgggcgcgcccaactccccagggccgcgggcaccggtggctgccgctttgtgggtgcgctccgctaccatcctctcgcgtcttgagaaccaataaataaataaatagaataaataaaggcgacagccgctgccaaaaggctctatccaaactgcggggcagggggaaagggcttgtatcgctggaaaacgtccctttccgctgctcccggcaaagaggacggaaaaattagcagtaggagaggaagtgccgaaaaagcacaaccagcggtaattggggtacacctaggtgagaaaaaagttatttcgaagaacgttccaagtccaggaaagttaggggaatctgaccggctctccttctctccgcccagtctttcccttcaagtgtctgcagagcagttggtgccgcgctgtcagtccttctgggcgcctcgtgtctcccgggccagtcagtttcagtccccgggcgaaggggcgcacacggagggccccatgggcagaggtgggtcgtggcggctggcgaggagcgcaggggccgattccggcgcctctgtaacttgacacactccctgcggcggcacggatcggatgagcaatccgtgctacttcccaaactaatctctccctcccccctccctcctcctcctcctcctcgtcactcctcctccacctcccgcggggccgacggcttggatttgtttatttatgcaaactcgcccagggtggggggcgtggtgagcaggtccggcggccccagcccgccggcccgggagcccctctgccgcgctccccgtcctctttgaagtgacacttggggttatttataggcaggaagggggtgtggagtggagctggcgctgcacttccctctctttctccggattcacaccgagggctcgtttggccttccacggaggcggtgaggcgggcaccaccttccatggacgcgt

SEQ ID NO: 5787 - DNA, 2401 bp, Homo sapiens; identical to SEQ ID NO: 5563
  source 1..2401: mol_type = unassigned DNA

SEQ ID NO: 5788 - DNA, 1579 bp, Homo sapiens
  source 1..1579: mol_type = unassigned DNA
cggcccggtgcacgccggtgccactctcgcggccaagcctggggctgacaccatgcagcacacggcgctacccacaatgcaccggccctcctctgtcacacacaggcacgcacactcacccccgcgcccggagggagcccagggcccggcccgtgggcgcccaggcgccgacccctccgaccccgcacttacctagaagttgcaccggtcgcgatcccgccctggcgccctcgggggcttggggcccggccggcggcggccgcggcgagcgactccgggtaggattcagccagcgccgaacaaaggctgcgcgcaggcagcgggcgccgcctgcatccccgctccgcgccccggcggcggcggcggcgcgggggcccgggcgggtccggcgcccgctcgctccgcgctgcccgctccgagggcgctccggctcccgcgctcccgctcgctgctgcccgccaccgccgccgccgtccggctaccgcaccgcacacatcaattattcatcgcccgtctccagcttcccgggcgaagccaatcataggcggaggctccgctaatggggccgccgccgccgccgccgaggaggcagccagccgcgcgcccgggcgcaagcgacagctctccagggacggggatgggccgggggcgcgcggggggcgggggcgcacggggcgcgccggagaaacttcccacggcccgcgctctgcgccgcgctcgcggaccctgcgggcgtgaccacccaccctgcgtgtgcccgcgtggggctgggggctccgggggaggccaggccagccgcggcggggggaggggagggaggaggaggaggagcgcgggaggaagatgaaaggcgagcagacctgccttggcgtctccagggagccccggctcgcgcgcgccctccccgccccgcgagcctcgccgtccgcaccccgccccccagcccgccgcccgcactcactcgcgcgcgcagaccgtcagcccagccacttcgctgcgagggagcgcgagcgagtatgaatcggaggcagctcacatttcaaacttgcacgcaggggtggtgctggtgcacgccgctgccgagcgaacgcacgacccgacgagcagcactccagcctccgggcgggggcggcgacgaggcccctttccttcccccgcccaggcaattaattggaagcaacacttgtgcgagtggggctcccggagcgctgtcgcccgaggaggccgccgggaaggcgctggcggtggatgacttcgggtgtctcccgccccccagcgaatcctcccaagtgggcatgctaatgagggtccacggcggggagggggtggaggagggagctgaactggagggggcctcggccggggggaggggaggggaggggaggggagggcggggctaggcatccagattaaatctcggtttaaaggattttcggaacgggctacggggtggagaaggtaggcggcccggcatcttacttccctgaccctgggtgccctggcacccccgggattccccgagcgaggggcccaggacagggtgaacacgcgcacgtacgctcccgctccccgacttcgg

SEQ ID NO: 5789 - DNA, 919 bp, Homo sapiens
  source 1..919: mol_type = unassigned DNA
cggctcacccaccccgcgcgcctccacatacgcctttcctcgacccctcacgagcacacgcccgtcccgcgtgcccgctcctctctgcctcccgccccgatcctacgctccccctcctccctggaccccgccccctggagcgcgcccgcttctctctgccacgctccccttctttcattccctctcctctctgcccgttgccccctcgtgcgcgctctccctcctgcacaccgcctcatctctgccgcaggcccgactcctgaacgccccctcctctctggccccctcccctggcgcgcgcccccttccgcacgaccccttctctctgccgggcgccccgcgcctgcacgccccctcctctctgccgcgccccctctactctgcggcgggctcctactcctgcacgccccctccactctgccgcgccccctctactctgccgcgccccctctactctgccgcctgctcctactcctgcacgccctctcctctctgctgcgcgttcccccttcgctgcccaccgcgtgccctctgctcacctatccgcgcgccccttccgctttgcggcgcctacactggctcctgaggcgcgagctctcgttgcctggcaacgggacgccgctcctgggtggcgagcaggcgcgtgtgtaggggtgagcgcaccggaaaggcccgaactgtttttgggatttgttcccctagcttcgctgggtccggcgggcagaggcggttctgaccgttgggccttgggcgtcgagcaggactcacctgaggcggagagaggccgcttcgcgcctggggctcccgaaagcggccagctgtcctcctgctccccctgagcggggagcgctgcgtctcctgcgggctgcgggagacccttccagactcccgggtgggaaaaccacactgagcgccccgg

SEQ ID NO: 5790 - DNA, 944 bp, Homo sapiens
  source 1..944: mol_type = unassigned DNA
cgctgggcgaggccagggctgcggcaggggagccgagccgggagaggggcgcaagacctggcgctgggcgggacgctcgggcagggtgcgggaggggctgagggccgcccccactgcctccccgccttggagctggggccaggcggccggagattggctggggcgcacggcgaggcccgggctggagccccgaggtgggaggcgccaggatcagtcggggcgcccgcagcgcaggctgccacccacctgggcgacctccgcggcggcggcggcggcggctgggtagagtcagggccgggggcgcacgccggaacacctgggccgccgggcaccgagcgtcggggggctgcgcggcgcgcacctggagagggcgcagccatgcgggcggcggcggcgggggggggcgtgcggacggccgcgctggcgctgctgctgggggcgctgcactgggcgccggcgcgctgcgaggagtacgactactatggctggcaggccgagccgctgcacggccgctcctactccaagccgccgcagtgccttgacatccctgccgacctgccgctctgccacacggtgggctacaagcgcatgcggctgcccaacctgctggagcacgagagcctggccgaagtgaagcagcaggcgagcagctggctgccgctgctggccaagcgctgccactcggatacgcaggtcttcctgtgctcgctctttgcgcccgtctgtctcgaccggcccatctacccgtgccgctcgctgtgcgaggccgtgcgcgccggctgcgcgccgctcatggaggcctacggcttcccctggcctgagatgctgcactgccacaagttccccctggacaacgacctctgcatcgccgtgcagttcgggcacctgcccgccaccgcgcctccaggtagcgccgccgccgccgtccccgcgcgctccgacgg

SEQ ID NO: 5791 - DNA, 1096 bp, Homo sapiens
  source 1..1096: mol_type = unassigned DNA
cgagcatcaggaaagcgaagccacacaacgcggctcctcctagccccggcgcggcagcctggaggggatgtcttttttgcaaagcgagttctccaactttcccgggccttggcggagctccgggaccgcgcaggggtaagtggagtgccggggaaggggcgctggggctggggtgccggggcaggggtgccctgtccgcacgtacccacgacagtgagcagcatgttgtccagcagcagcgccaggaacacgatgaacaggatgagcttccgcgagcggcggctctcctgcagccagcggaccagcgccagctcgctcagggccatggctccggggctccgctgcgggcgcggtgcgcggtgaggacccaaggcggccgtggaccccccattctcccgtcccccaggccgcggaagggcgggtcagggagccgcgcgcaccggcatccggggacacccccgggcgccccagcctcggctcacctgcctcgagcgcgtccccacgagagcccgcgctccctggaaagagcgcccgcgagcgccgtcggggacccaatctggagacccaacctagaacccccaggacgctgccctgatccccgccgcccccaactgtgccacctcccaaactgcacgctcggccccgtgcaccttgcgccctgcgccctgcgccccggctgccccggggtccccgcagccccgcccgcgtagctctgggggcctccctgcctccctgcctcccccgggcccgctcccctccggcaccgcgccctgcgagcagggaaccggggccgtgttacctcggggtcgcttgcgatgcctgcccgggtcctccgtgcccgcgccaacgcccgcaccgcagtgggctccgtcagtccgggcggctccgggtcgcagtctccgccccagcgccccgccgccgccgctcagtttaccccgtccggctctgacgtcacggccggagggagcgggggcggggggctggggcgccccggcctccgcccgcccgcgccgtcgctgcgcaggaggggctgccgcctccctgtccccgcctcggccgcggccgcgcctcttccccggacccagcgcgtggccga

SEQ ID NO: 5792 - DNA, 4048 bp, Homo sapiens
  source 1..4048: mol_type = unassigned DNA
cgcacgcctagatgggttcctcgcgcccgggccgcagtcacctgagtttccgtgaggctgaggctgtgtgccagctgcttcctttcggcgcccaccacgtagtgattcttctcaaaggcgtgttccagccttagaagctgggacggggagaaggcggttcggatccgcttgggctttcgggccagcgcgttgtgcaaaaggaaactctcggggctagtgtcgttccctgcggggagcacagcagaaatcccattagggggggctgctctgaccggagccgcgcacttctcccgagccgggctggcccggcaccgtgctcagggccttcgcatagccgcgccgctcgacctgcgggggccggtggtcctcccaagggctcacgaagggaacgcctgctcagctgcccggcccggaacgccgggtctccaccggtgcggcacccaaccagccgctgtcgcagaggagccagtccccaggctcctgacctcggccggctccgcagccgccctggcgccgcgggcctcgccacctcctcgccgggcgctggaggcaggggagggagccgcagagcctggccaggggattggcgcccacaacccgaagaaactactttctcttctttctaacctctcggggaactttgacccacggtggaaaggcggcgggctgctctccagagttttcatggagatttatttttaaattatttgttttattgcccctccggaaaagtatagaggcggggcgagtcgttgaagcccgatcgggacagaaatctggccggcgggtgtgcttggctacagccgctgctgcctctcgcgaactgggctccggggctcccggctcccgagaactagaagagaaacgcgagcgaagggatcgaaacccggggggttaccgacttgcagacaccgccaggacagtctgtaacgcaggaagatcccagcggctccgggtctggtgaggggaccataagcatgactgatagcgaatgaggaagggcagccctaaacttttcaagcaaagcctcagagttttgggttcactcattagcataggaaatcgattcaccgaaaacccaaacaaagaaaaacaagccgacagtccaggcaggatgcaggcaaatccagttcgggattaagggtaaaaggctttttgggttttttttcctttggtttgattttttaaaatatggggaggggggtgacatctacccgattctaggctccggcaggaacgcaatgggttaatgaatggacaagccgcggagtattgatcggctgccgccggaggtaggtcttttactgactccaatccgtaaactaattactcctttttctgaagttttaactctcctcctcccaccccgtacccagagaaaaacaaacaaataaaaaatatcgcaagaaatgaaaacacacgaacagatatttccctctaagacagtttcctgaccaggttctttttttttttttttaaagaaagaaagaaaaacaaaaaccagaccgaacctgccttcccgctgtggctgctcggcgccccaattaagcaggtcgcggcgagagcgccaagccctggagctttcctcccgcacgggttcccgcccctccccaggcctccgaaaagcaggaaagaaaaaacaaatcccatacttttctcccggggcgcgaggatcctctcgcctccagaagagggtggaagactaagaagccgcgggtctggactgaaggggcgcaaagtgggtggtgaacagggtcgaacgcagtcgaaagcaagcctggcggccgagtcctgtccgcgcccctcggagccaggacggttgggggcattgccgagggtaccaggagcctggggatcccgcgggctctgggctccgcggcgccgggcacgcacagcccagcctgctctgattcgagcgcactgggggacaacttctccgttcgcaccccttcccaaagggtcaagcggcccgcaggccatcactccaaaccagtcgtagcttcggagactggggatcgacaccacgcccggccccgcgccgcctagtttcccaacagggcgcgctggcccgcgagccggaggaacctccgcccaggccttgccaagcgcccacccggagcaggccgggggcagtgaaggatgcggcgggagcggcgcgctgcagttccgcgacgtggcacgtaccttggaagcgatgacccagatatcggtagcggtggatgagccaggggtagaaggtggacggatcccgctgctgcgaggcgaatagggggtgtggcgagtgcgaggagggtagggggtgggcggccagggcgtgcggcggcggcaccgggtgcactggcacggcggggttgggcgggtgcgagaccgcctcggcgaacaccaagtccgggttggagtagacgcccctaccggcggcggcggcggcggccgagtggaagccgttgaggaacggatttatggggctggagttagcgtagctgagtgccgcgggacggatggggtcctcggagcgcgaggcgggcaggggactgtccttggccaccagcgactcgatggtgaagcagcgcttgggcgccggctggaacatgctgcgccgaggagcgggcgccctgggctcccagctcctggcgaccgccgcacgctgcctccgccgcccgctgcccgcggcgaggacggacgagaattggggactcgtttgtttggggtgggggtgggggtggggggaaggaaaggaagaaagaaaggaaaggaaaggaaaaaggaaaggaggggggagggagagggagaggcaaagccgaggatcccgagaatcttgcaccaaacgcgcccaacctgaagagaggggggaaaatccttccagaagaatttgcaggcgtggattggggtaattttttttctttttttttctttttttttcttttttttttttttttttttttttggcgagatggcgtggggggatcggagttagaggcagggaggagaaggggggaaagttctcgggggaggcaaaaaaaaaaaaaagttttttctcctctgcaaaaggcgggcagggcgccctaagtccaaggacaatccatggaagtgttcgcttcttcacaagttgtgcaaacgatttgttagttcatgagcctaattagtgcggggatcacataaacagcttcctccgaagcctggtaaatggcttgatgattggtcgctattactcgccctgaggtggaaggggggagactctttaaagtgcgtcagagggaggtgagcgcctgggaacccggaggcctggatccgggccgagagtggaacggagtcggcgccgccgcctcggctgagccttctgccgcccaccgggcggccgggcttctccgcgccttcgcccctcgctcccagctcactcgctcctgcggcgcccgctgcggcttctcctcctccttcgcctcctcctcttcctccagtttcttcttctcctcctcctcctcttcttcctcctcctcctcttcttcctcctcctctttccccacctactccccctcagccaccgcctcctcctccaccagcaccactccctccggggcaccccggtccctgcagagtccctggccggcgccgcctccgctgcggccccctgaatcccgagcctgcctcgcccaagctggtaggacagaaggacagacagattcctctagcctagcgctccgccgctgctgccttacgcggccccgcgtcgggagaactgggatcgccccaagagcaccgcgagggtaagcgggcaggggctggttcccgggctaaaggcgccgttcggttataccaatccccacacttagcaaaactcccagcggtttcctaggccaggagggatcctggagtgaggggtacggggtcctcccaccccatcaaccacgcttagcctcgaggtcccagggtcggtgcgttcgcgattcttgacccggctcgttcgtttgcgagttgagaccgggagctgccgaccccgccggagcagtgggcttccaactctctccctctctcgccccacggtctctagcgt

SEQ ID NO: 5793 - DNA, 3292 bp, Homo sapiens
  source 1..3292: mol_type = unassigned DNA
cgcgcccaagccccagttcctgaaggccgctggacttctcggcgccctcggcccggcccagtctcctccggggtccggacaaggaggccgggcgctccctcccccacccctctggggcctcagaccggccgtagcagcggcacggaagagaccaccgggtgcgagtagtagacggggtgcgggaaggtgagcagcggctggctgactggcaccggggcccccgcggctgcagccgccgcgccctcggccgccgagttctcgtggtagaggatgggcacccgcacgatgcgctgcgccgcggcatggctcaggttggccgcctccagctccgccgccagctgccgcttccacttgttgcggcggttctggaaccagatcttgacctgcgtctcggtgaggtgcagggacgcggccaggccggctcgctccgagctgctcagatagcgcttcatgtcgaaggtggactcgagctggaagacctggctgcgcgagaagactgtgcgcgtcttcttcttgcggcacgccggcttcttctctggactttcagcgcccttcttccagtcttctgcgcccggagtggccgccgccgcccctacgctcgccccggccgcgcctggcgccgcttcgccttcctttttgctttcctcggagtcgctctcctccagaatgatctcgtccgggctcttggagtccagctccttgtgatcggggtcggccttgagcagtggctccggagagtcgcggtctgtgccggaggcgggggaggagtctctcagcaaggccttctccgaggctggggagacagacagacggacgcacacacatgcacaccgacacagccttgagcgaggcccggcgcctggggacggcaggctcaacccgcgccggcctccaggtcccaggccatgaggcctcaccattcccgcgggctgcctccttctcggctgggccagagaagggacgccgagtcctgggatccccctcctcccgaggacaggcaagcagatggtggtagcgcggccacctccttccattccctcagcttcctcgccaggggccggcagaacggttccctttcggcttaggcgcattggaatcaccccctccttccaggccgtgtcccaagccccggccgtccgaagcctccctattcacgcccgaggccacttttcccgggaagcaccgtgcccggggctccaattccacttcttttctcaccaagtgggattggattaacgggcagcgcaacccagcgcgagggcaggctaggggccgaaaaaaactgaccgagcagagggtttgcgggtgctggggtcccagaactgcggagggaagcagcgcggggcggggacggggcgggcgcgcagggggacaacgaaagttcaaagagaggtcggtaccttcaggtcgcgggaggtggccgccggcgggggtcagggtgtaggggtaccaccaggctggggagcgctccaggtagtgcgcgggcagggcaaacctctgcgccgggatctcaaagcgagggaaagccaggtcgcccacctgcgagagcgcgaagcccgcggcgccctccagggcccccttggccgccgcggcagcggcagcggcggcggcggcggcagccgaggctggcgcgaagagcgtccgtgggggcggctgaggcttagggggcggccggtggtggtctccgttgagcaggttcttgatggagaacggggactccttgggagcgggtggggggggcggcggcggttggggctgtgcgctggcggtgccggcagcgtccggcccgggttccggcatggtcccctctcctccgggtccccgggagggagggagcgggacaggcgggcggcggggcgagcaggcgagaggccggaaatcagaccataaacggaactcaactacggggcgcaaagtcgggggccgccccgggcgcaaatccaacggcgggagggcggagtgaggacccagacgggcgggctcgcatgagggaggggtgcggaggggcggggagcggccctgccgcggcaccgagggatcgaggcggctcggctgcggctgcggctcccgcggaggaggcagcaagagcagtccccggctcgaggctgcgtcaatccggcgccggatgctaatgatgaaatcaaaatgtcatccaagttaaatgcggggagtatacggcgattgggcgcgtacaatggcaaatgggattaggcaggcgaaggctcagccgagccccggccccgcagccgcctccgccaccgccccctcctcgccttccctcggattttggcgctttggcttcgggctataagagcccgcccgttattggctttatatagtccaattaggcagcaaatgaggacaagcctattagcacaaaaggatattggctcccgctaaagaggcactcggagcgctcctgcgagcgcaggaggcgagcgagggacgcggagcaggcggcgcccttggccgaagcgcactaacggccgcgagcccggagaccgcgcctgcctctcccccctgcggcgcagggacccgcttcccgccgccaggcctgcgggaggggggaggggcggaccaggccctcccgggtcacctcggggttatctgcgctcgcagctgccgctcccccgccccctggggctggacaggggcccgccgcccccacgcagctggagagccacgcagcgccggcccaagaggcaggacgtgacctcggccctcggagaactcatcattttcctaccctttggggtccggcgacctcggtatttttcctaaagcctgctaggaagggcgaggccaagaagagagggatttgggttccccacccaccatccagccgatagtaagggaatccaggtgtaagtcctcgcactgcgtcttcggactcagaaatccgcgtggccttggcctttagccctggaaaaccgaagagtgagccttcccccgggaccaggagtgggtgtgcctgtgtgcgtatgcgcgctgacccggccaaaacccgcgcgtcactcggtggggctgctggggcaacagcttctcggcaccgacggctgctctcggaagggcacccctctgctctggccgccggtgcccaaggctcgcggatcaactccgagtctgtgaccccgacgacagcactttctcccaggaagtctctccggccagctggcgtttggagctgtctaactaacgctttaatgggggcaaggtgaaccgaaggcgcagcggcgtagcttcctccgccgcggcaagcagcggcatccgctgcgcgtctcgacggcagcga

SEQ ID NO: 5794 - DNA, 3753 bp, Homo sapiens
  source 1..3753: mol_type = unassigned DNA
cgcggctattctctcggtgcagcgccctcccagcccctgcgcggccgcaggtgtcagggcgaggaagtccgtgggcgcccccgccgcgcgtcaaggttccattcagagcaagcggccgcgtgctagccggtgatccagccacacgctgaaccaatgcaaactattaacaacaaaagagtgtagggaagcgcctttgcctccctcaccttctttgcctggtcccgggcctcggatctctcctgagccgcagaactgcctcaccgcgcccagttccctctccgcgcgagacacataactctgccaccggccgggtagctgggcgcagcgacaagctggtcgcgccaagctcgcggcgagcaaagtggaggctttactaggtacaagcagcgccatcgcctgctttatacccctggagaggaagtgcgcggcacagggcatgtcatagcgggagctgctgtggccaagctcaaggcgagcccagtgccgggaatatgccgctgggcacccagctcgcttgttcccagaaggcaatcgcttaaatggcgaggcctgcctcccagtctttgtctttctccgcgcggactcttgagctggattccagccggggtgcgccccagcccgcgcgacgattctgggcgttaggagggagagtgggcgggcagctccagccacgtgcagtctgggcggcgccaaggtcccgacctttaacccctgaccccggtcccaccctccacgtggagcgagccaaacttccacagacagacgcatgcaagtctttccaccgaaaaacctgaaaaccttccgtgcgttatcatgccgggtaaccaagcccaccaaagttagcaaagatgtttaaaatgttttatttttttttctttttaaaaatatttacagatctgaactctccccttttcgtccctaccatcctcgggatgagggaaacgaaaagaagcaatttagtaattgtccaaagcctctgagggcctggcttggccgagcgtgtatgcatgtacatatatacaggtgtatatatgggggaggagtgtacctggttttgtaggtgttttcctgatttttttccctaccaaccacagcctgtctggccaaaactccctttcccaccaccacccgagaacatctcactccgaatggttttcaaagcgtactggttcggtctaggtaggaagcaggctctctgacttagggaatgccaataaatacccgaaacaatcaaaacaaaaagtagggcagagaccataaataagagctaatgaatacacatggtgtatttcttcatatttctggaaacacgccgccttgctccggagccctgcttacagtacagtacgcgcccggctctgcgggcagctgggggcggcgcggggcggcgggccggtcagtagtcgagcttgttgtataggttgtagagaggtaaggccgagaggttgcttcccgggtagtagagcggcgcgggaaaggcgagcgagcgcggcaccggcacgcgcagcagcgaactgtcccggaacaccagcggcatgctcaccagagtctgcgccgacgcgtgcgccatgttggccgcctccagctcagccgagagctgccgcttccacttgttgcggcggttctggaaccaagtctttacctgggtctccgtgagctgcaggctggaggcgaggcaggcgcgctccgagctgctcaggtagcgcttcatgtcgaaggtggactcgagctggtacacctggctgcgcgaaaagacggtgcgcgtcttcttcttggccgcgccggcctgccgctcagcgccgccgtcccgcggccgctcggaccccggcgagggcgagcccgcgggcaggagcctctctttctcttctttaaagtccgagtgcgaaggagagaggaaaggcgtgcgctccaagccgcccgggcccgagcctccgctgcccttgggggtacctgaggagcgagaacagacagaaaggccatggagttggttggggagcctcggagaccgccagctctccctgggaccaagcggttggcaagcgcctgcagccttggtcccaccttaccaatcccctcctcttatccctctcactggccccccaaacccagcaccccgtcctttaaaagcgacaagagagggacccagctacttggagtatggggtctctgtgctcccacctttatgaatgggccaggggcaacagggagaggaggtctggagggggaaacattagcatggttttaaaaggcgaatttgcttggtggtaattgagctggaagagttcctcgagctttatagggtggcatcatttcacaggccgtttgtttggaaatcacgctaaggactaacgcaggactccccttcgtcaaatgttgtaaagaggaaccgtctctgaaatgcaccattgtcaatcatcttggagtgctaatcattccaaggaggagagagagagaaaggcagagatacggagcgagtgaggaagaagactcagaaagagattacggtggagacagactgcccagacccgacttgcagatctccacctcgtgtccggaaagaaagtaccagatgtgcagtgattgaggacagccgggtgtaaggccggccgcgtgtccctctcgctgtggtccactctctcaacaactcaaccttccccaggaagcccaagccggcacgggtctgtgttcgcctgctcccaggggcccaccgggcggaggaggcaccacagtgcgcgcccctctccccgcggtcccgaacccccggctgccgcagctctggccagagggggcccggcgcgggagtcttggcggggcgctcagcctccctcccctcgcgctcgctcgctgccacactggcgacgtgcgatccttacccaggcaaggaaaagggatggggggatggtgcttggggccctgctccttagggccgtgctggtctgggcagaagcaggcgggcgccttccagccgtcgtccggctcctcctcctccgaggacacggacaggctgcgcttcctggctggccagccgacgggctcccgcggtgcctccgaggggcccccgcccaggatggactggatggtgaagctggagacgccaccggccgccggacaccccttgcccgcatcttctttgctgcccatcctgggttcataagaaatcgaaggaaaccaagaactccctttagagacgatctgggtgatctgggtggaaggtggtgcagcaggcaggcagtggggaggggcggggaggaaatctagggggagggggcgccgaggctggtgaggcgtcccttccgcgccagggacatgcaggcaccggatggctgcgcaggggttcctgcccgcctggctctgggtgcgcccgcccagccccggtgcaaatgccccttcctcgcccgccaactcgccgggtctccggcggcgcggaggcggcgcggcctcatttgcatagaggttacccgaacgcggccaatcgcagcgccgccgagcggccccggaaaatttcaaaacgctccggccaggcacacagcaccggtgcgcccccagagcgcgccgagggcctggcgggcatcagcggcgtctaaccaggggcagccagggctgaaagcagctgcagattctagcccgggttcctggcggctgcggcaactccgactccttggaccccttggacccttctctccagaggcaggggcggtgcgggactcggagctggagtggctcgacgcctccgcaggcgacgggtctccgcgc

SEQ ID NO: 5795 - DNA, 829 bp, Homo sapiens; identical to SEQ ID NO: 5784
  source 1..829: mol_type = unassigned DNA

SEQ ID NO: 5796 - DNA, 1328 bp, Homo sapiens
  source 1..1328: mol_type = unassigned DNA
cgggcgagagatgcccctttgggcgcttagggccgggcggggtcgcgcgccgggctgtgggccgcggtggagacctgacccgcactccgagggttcccagagagccggggagcgagtagcagagtcatcgtttccagcttcagcctgaaaagctggaccgtgccgccgcatgtgcgcttggcagccgggcgccccgggccctgcggccacatcatcctggggcggggacgtgtgcgctccgggcgcccggacgccactgagccacgtctgagccgcccaccctcgggggtgagcgagccgcggctcggggcgggaccctggcggggggacccgagcggtctctaggacccgcgggacgccgccaactggcgggggtgcgggggagacaataatttgttccgcggtaataagaacggtgactgctggccgtggatccatttcacaggcctgccttctctcactaacgctcttcctagtccccgggccaactcggacagtttgctcatttattgcaacggtcaaggctggcttgtgccagaacggcgcgcgcgcgcgcacgcacgcacacacacggggggaaacttttttaaaaatgaaaggctagaagagctcagcggcggcgcgggcgctgcgcgagggctccggagctgactcgccgaggcaggaaatccctccggtcgcgacgcccggccccggctcggcgcccgcgtgggatggtgcagcgctcgccgccgggcccgagagctgctgcactgaaggccggcgacgatggcagcgcgcccgctgcccgtgtcccccgcccgcgccctcctgctcgccctggccggtgctctgctcgcgccctgcgaggcccgaggtaagtcgccgaactagggcggctcgctgcccgccccgccgagggcaccgcacgctgcgcctgggcgcgccgaggtccagggctgccccgaggggcgacgcgccccggcgcatctccggagccccggggcttgcgcttccagcgcggcgagaccgaccccccccccccaggtgccaattccttggggaagggcgacacttggcccgcagccccacaggagccagtacctgccccggagggcacagcctcgggaccgctcccccgtcctcaccctcttgggtgacatttgcagatgtctctgtatcttgacatttacacgtgtcactcgggacgatgcgtgtcgggtcctcttgctggccctatcccgcagtgaatatccccaccccaggctccgggccagcccttcaccaggtttcctttccagccccgcctcccccgctaacacacttaggggggcgcgcagcggccccgc

SEQ ID NO: 5797 - DNA, 2957 bp, Homo sapiens
  source 1..2957: mol_type = unassigned DNA
cgagccgcccccggctctgcgcttcctcccagggcaccaaggccttcaacgccaacacgtggggctgtcaccaggggaaaccggaggcctgagctcagcacctctggacccgcacccggctagcctccagcctcccttcaaacttcggtcccttcccggctgtagaggaggtgactgaggcggaagccggcggccgcggtctggtggccaggggcgaagccaggggaggggttaagggtctggggagcgtgggtggcgactgtcggtggccgcctcccgaaagaaaagtcgcccgccaggcccccggggaaggtgccaaggccgccagccagagcgctcatagcagaagcgaaaccggagaagcaggtggcggcctcgggtgcggatggagagggcgaggcctgcaggtccaggcaagccgcgctcgggggctccagcgctggcgcctcggcccctcccacgctcctggctcccgagcgcacggccgcgctggcttcagctctcctcttcctcttccttcggaagttcccgttgtcaaacatcttctcgcagttggggtccagggtccagtaattgcctttacctgcagaagaagaaacagcccagttcagaaggttcgagctttgacgggccgtggtgtgagccagcgaggaggtcagcttcagaaagatcccctgctggcccttacagagggtctgagtcctcgcccccattccacccttgacgggcactctgtacccgatgggcctccacagcaggactgggaagaaagtgacaatccagaaaggaggaggaagggagccctgggaaaggccgagccccgttaaggtgaaggaaggcctgcgagatgctaatggtgggactccgccagccgctctgccaaggacagcgcagaccacgccaggcccccaggtaggctccagagctttccaaacgggcatcctatttgttttgcccatccttggggtaggcgctgtcttccccattttaccaggtagggcactgaggcccagggaagttgagtcactcccaaggtcacccagcttgctggctctcccgcttcttcctccgaaggagcgcacagagattgagagccccgggaccgccgcactgtaaacgcgggcctgtggtgggctcagccgctgtctgagaacctgtccatgcccaagcacttcttccccttctccctcctccccgggtatccccaaccgcgcagggagaaattaggttgtctaaggtgctcccacccccggagtgcccgcggcccggcgggaagatggggagtcctggacggagcgagccggcgcgccgctgttacctgggtcgtcctcgtcgcggggcaccttcttgaagcagtcgttgagcgacaggttgtggcggatggagttctgccagcccgccttgctgcgcttgtagaaagggaagttaccagccacgtactggtagatctggctgagcgtcagcttccgcagcggcgcgctctggatggccatggcgatgagcgccgagtaggagtagggcggccgcaccagcctcagcagctcctgctggccggagaggctcagccaggcgaggtcggcgcccgccaggccgcccggggcgccgaggagcgggccgggagccccgtagctcggggccgcgtagggcggcgcaggcccgggacccgaagcgtaggacttggggctgagcgctggcgcgttcacccacaggagggggcccccgcccaccgcgcccagatcccctggctcatagcccggggggtgcgcggtggcctgggcctggccgggcggggccgaggaggggcccaggtcgtcgcagtaggtggccatgtccagccgcgcccgggcctgggccagcggtgccgcaccgaaactcactggcgacccatccagcttggccgccagcagcgcccgggtgcgaccagcccggcccagccctccgccctttaaacaccgtcggggccagagcccatggagagtgacggtggcgagcccctcccctggcagccctggaggagcgaaatccttgtcctcgccctggtgtcagttttccgccccgcccaggcctgacacgtcctggaccggacgcccctctgattcccccttcctcctttgtgcgatccgtcccgagtccacagtcgctcgcggtcttggttgcagggaccctaagtccgtagcctcgtctggcttcacgggccccgcagccccgactgccctggaccgtaccacgactcctcaaggcccccagggctgtggcttgggagccccgtccaatgcgcggcccctttgctcggctcgggacatctcgccccaaagaaactcgcctcgccggggcccctgggttacccgggactcggggctagggatagagggcgactacactgcgcaagagatcgcaatgaagtccgtagatctccaggctggagccgcagagcgaggtggcgaggtggagaacgcggggctgggcctggacagcggccctggggtcgtctggagtcctcgctccctcaacccggaaggcagcggactgacatctgcgccgaagtcgcgcgtaccccacggagggtcgggaccctggaaatttcgaacgccccagcagttcagggcagtcatcgcttttcccaagccggggagtccggggccccgccaggtttctccgcgctgtgacctcgggcgcgcagagcggagagcgccaagctctctgctgggtgtcggaggacgcgccgaaaacagggacgtctctgcagtgcgtccgacaccagctctccagtcctgctgccgcccggggttgctgcagcccgggttatcccggccccccaagctgcccggctttcggcctcccctgctccccgcgctgtggggtggcggaggatggacccaggctgacgctgggctgggtacctggaaagagggcccgcctcccggactccgagtcgggcacctgtgcgaaagaggcga

SEQ ID NO: 5798 - DNA, 1860 bp, Homo sapiens; identical to SEQ ID NO: 5570
  source 1..1860: mol_type = unassigned DNA

SEQ ID NO: 5799 - DNA, 1422 bp, Homo sapiens
  source 1..1422: mol_type = unassigned DNA
cgcggggagcagaggtgcccagacacgcggcctgtccccggcccccactccacagagcctcccaccccggcactgagcccggaagcccggtcaccagctcgccattccacaacttttccagcctgggagtccccatacgggtggccgcccccccgcagcggcctagcccccagctgcaggacccccgggacccccgtactcaccatgagcgctgcaaagttgcggaagcgtgagcgccgctggaggaggcgtccagggggaggcgatcaggtggcgccctgctccccgccagcctccatggcctctggaaggtcaaagtcccagacggcggccaggaggtcgcgctcccgggcccctggcctcagggtgaccgcggcggggcgggcgcagtccgggagctgctcccatctgtgaagacagcggcggtcagcggggcgggcggagggtccccgcggagggcagctcgcagccccgaccccgccagggagcagccgcggcccctgtcgctccctcccctccgcgggcggcctgggggctgcgcctggggctggcggaggcggtgccggtggggaccggtggggggctcggaccgaacgcgccagcggcagatgcgtctccttctccatatttaaaaatcaatctgcgccccactcccggctccggagccaaactcaaccatctcgggctgcacaaagccagaggcgcgccggggggtttgcaccgggaaccggcaccgagtgacccgcccgccccagcccggccgcggcgcctgctctgcctggatgtggctcgagctccgggccgggcgcgcggggcgggggccctggattatccgtggcgcctcccgccccagcggagccgaaagttactcggagctgctttcctcgcggccagtgtcacctcggggcgcgagcttttctgccgagccgcggccccgcgcgtccctcccgccgcccagacccgcgcgtccttcccacctgctgtggccgaagcggctgccggggcggccgggccgcgctcccggagacagacgcgctgcgctccccccgccggggacccgctctccattcgcgagggcagcggccgagctgggaccgagttatcaacagattgcggggctgcggcgccggccggtgagtcacagccccgcgcacgagcggcccagcccggccagcagcgccgccgcctctgcgcgcacctcccgcggcgacagcggggacccggggccggaggcaggcgcgtaaccatggggaccggggcgggcgatggcggcgggcgggctcctgccgcagggtggggatggctcttccagccgggcggccgccgtcacactgcagagcgtatttaaagagacacctcgctccgcgctcgctccccagcaccagaccctcgcccgaaaacgccgccgggcggactgcacga

SEQ ID NO: 5800 - DNA, 1479 bp, Homo sapiens
  source 1..1479: mol_type = unassigned DNA
cgacgagtctacgaaccccatcgtggccggcggtagtcgctggtcgagcctagcgcccaggcccaggccacctccatgccgtgcgacccgccgggaacgggttcaggcccgtctgcccaaggccagaagcaccctgtccccggcccaacgccggatcgcgtcccgcccttctcaccccataccaaggaaaggaactagacgcttgggagaaaggatgagcagcacccggtgggattcggccccaacccggggccgtccccaactcccaacttcccagagtttccttcggcctcgtcccccttcccacggctccgaggccgccgcggcctcccctcgctctgagtgcagatagcccgggaagtggagagcgtagctcggagctagggagccgcccccaggagccttggcgatgggagcgcaggtggcgggcgtggtccctccaaccctgccctagccgacccggagtcggcctccgtgcagtagccaccgcccgggtccccgcctggttacagcatcaggccacagtgcgctggttcttgatcactctcctggctcggtggccgccccccgccctctcccagtccgcgtcgctgttctgcctcaggccccggtgcggccccaagtcccagcccagggcccttaggtccctccaggcggcggtggcggcactcacctgggtcgcggagccggggtctggcacggtcccgcaggtggtaaatgaaatcctggcagctgtcgtgctccagggccccacgggcacagagctcggccagcagctgcagcgcctggtgacagagcgcgtccctggccccgggcatcgcccccccgcatcctcggaccgcgccgggcaggcgggcgcaggagacagccctccgcctgccagctcagagccgccgcctccgggccgtccgcgctcaccgccagggacctgccgagaaacggtgcgagcctgagcccgagccccagacccagccggcccggcctcccaccggttgcatgcagctcttcgccagccggtcggtcaggctttctctctctcccgcccggtccctccgtccctccccagacaccgaggagaggcggtgccgcacagcccagagcgcctctctgcttgcgctccgcccgctactcgcggccgccggggggcggggccaggtcaggagtgcgcgccgcagggtaggatagcggcggccccagaccggggacctggggtactccccggctcctggccgagcgcgagacttggcttgggacctcgcgcccagagcggccgcgccctggcttggggagtgtgagtgagtgcgcgctccgggcgctttcgctactccacccctcatccctgatgcaaaccaagcacccgctcccaccgccgagtgtgtccaaagcacgttcttggatgcctagtgcgaaggttacaatctgggcacacccgccagatgcgcagaaccgagtccctgcttcgaacttggaaagagccgc

SEQ ID NO: 5801 - DNA, 446 bp, Homo sapiens
  source 1..446: mol_type = unassigned DNA
cgtgcgcctcgcgcaccttgtccctcgcgcgacgccgtccgcgccgcccgcggttcggtcgggagcggcagcccgtgctccggttccggttccggttccggctggcgtctgcacctgcgaccaccgtgagcagtcatggcgtactccacagtgcagagagtcgctctggcttctgggcttgtcctggctctgtcgctgctgctgcccaaggccttcctgtcccgcgggaagcggcaggagccgccgccgacacctgaaggtaagagcaggccagctccctctgagcttcccggcgccgaagagtacggagaacgctgcttgagggaggggtgactctgagagtctgcagccttcaccgaaatatccaccaaactgactggagagggcgggcgagacggcgttgaagggccaatgcccacggttccgttgttatcagcgggtggcgg

SEQ ID NO: 5802 - DNA, 2991 bp, Homo sapiens
  source 1..2991: mol_type = unassigned DNA
cgcctgccgcctacaggcgtcgctgagggacagctggcccagtttgcggattttcctccggatcccacacccatgtccagggaaagccggagccacggcggtataaattagcgcctttattttgatcacctgagcgagcgcccgcggctcgcccgcctgcggtataaacgtacaaattccctgtagcaccacacaccatgcctcagagataaatacagccccaggggctcctgctctggcaaagcaactcttatttacaggaatagattacaaaagtattacaaaaagtggtcctgaaccgggaaacgggttgggggtgggttacggttacacctgctacatttgggaccggagtgcactgggtctcacgcccccccaaataaccggtgcatcccggggcagggcttaggtctgcgagggtctcacccccatgggggagggcgcgagaaagctgaacctagcccctcaaggttcagctctggcccaccgaggaacacggagcggccatcgcaatgggtctccgagaagggtgctgcgtggaaaaaaccgcgctgtgtccttgccctgtggggcgggggcggaaacttcagttctcccgcctctcctacctcaagagaggtcgcttttaaagcgctgttgggaggggggcatttaagttcaatcttttgggcgcgagggaccctaggggcaccatccctcgggcgggtgggcggccaccatcccctcagagcacctggtatatcgggttggggttcgcacccgcagggcactgcggggcggcgtccggtgactgggtggggtcgccgctgctctctccctcgctgggggcggcagcctcttgcctgcgcggaggcgactcagaaggcacgtccgccagcaggagggcgggcgccgcagggctctcggtggagatgcgctccacgatgctggacaggcagtctaggctcgacaccgccgcactcttcccgggcctgggttctgcgcggggagggctcggttagtaagcaggggtggggccgcgacaagcctcccacccccgggcccagtactttgagacagattggaaactgaggactttagttagagtccgggacaatccaaaagacagggagctacttgcttagtatttcatctcctgcaccacttcccaggacataggcgtgtgtgagtgggggtgggagcgtcctagatagaggccaggacagctccatgaaggaggaggagcgagcagggagaggcccggaatacccaccgctgggcgcctcgttgtagtaggcgccttcgtagcagttccgccgccgggcgccgctcggggggccgctgtagtccatctgcaaacagcaagggcgactgagtcaggcccgcgggacggctcgaggcccgaacaccaattcctgtagccgccccctccctaactctagcctaaggctctagttccgggcccagacctgtcctggttgggggggtaattacgggtgggtaggagatgaggtctgcaacatgcagggccaaaccaagggcggacagtcaccaaggggcgcaaatttacattttggaagtagggataagtagagaaaaagatcttcacgttcgcgctgcagtgttctaatagcgcccccaatggggcagctcgaacgcttgcccgcacacttccaaaacaggctaccccagtgacagctgcccaggacaagggggtcctctctctcgggaaggatcctggcccaaacctcccgcaaggccagctccccgccctcggaaacgcgtccctgatatcccgagcgccgccctaacttcctcacttcctggggtcccggccttaccatgccgtcggagcagttggagcgcgggctggacgcgtcggagtcgccgctgtagtgctcgccgccgcggcccgggggcagcgggcccggcgcatagaaggcggctgcggcgccagggggcgcggcgtcctggtcgcgcagcagagcctgcaggccctcgatatagcggatggcgttgcgcaggatctccaccttgggcaaccgctggtttggattgctcgacgtgcagcgcttgagtgtctcaaaggcctcatttactttgctcaggcggcgccgctcgcgcatggtggcggccttgcggcggtcggcgttggtggtcttgcgcttgcacgccttgcaggcccacagtaggcagcggcccgcctggtggtgcccgctgggcgcgcgcacatgctcgtcctcacgtgcgcccggggccgggtgcaccgccgcggggaagtgcgagtgctcttcgggtttcaggagcgcgcccacgtgcatcaggcgcgggtccaggtcttcgaagaagcgcaggtccggggagtcgaaacacgggtcgtcatagaagtcgtccgttgtggcaaaggagcagagagagccgtcgggggccgtcaggtctacgtcgcggagcggtggcgacagtagctccatatcctggcggtggcgcggcacggtcctggcttcgcccaacccaagcggcagagagtggccggaactttctgccgctcgggagccccggctgtagatagcaaagtgctggcagtctgaatgcccacccactgtcccccacccctccctctcctgtccggcctgatttgtggttaaggaaagcggcggcagcgccccagggcttcctcacccctagcttctcgccaggcgccctgggctatttatccgtagtagcctaaacgccccggagcccaggcgggcagctgggggagggggagtccgaggccaataggaacactgcggggcggggcttgggggggtccccggggtggccgcaggggcccgcagactggccagccagcccgcccctccacactggcgtgcgcgctaggtcccctaccgggcagggagggagggagcgaccggcagccctaggcggctgcacttggctctccggcacgccctttccaaacctctccaacacccgactgctgtatccgcgggaaacgctggctgcgcgcgc

SEQ ID NO: 5803 - DNA, 928 bp, Homo sapiens
  source 1..928: mol_type = unassigned DNA
cgagcctcgcagccctcctccttcgcctcgcccgttagctccctgccccccctccccacaccccccaccccaaagccaggcgtcgggcgcttttccctgtcgccgcccggcatccggccaatctttccaaaatgcgctctcactctgttggctgctccggcagggagcatggaggactgggggtccgaagcctgcaaagggtgaccttagcgttgcagccttcccgaaacggagacttgccatcttttcagagggcggggaagctcacaccactctctgctttatagtgtccgtttcgcctcgcttgctggcccttcgcttacccgagacattccaggcacggctcgcactggagagggccgcgctgctgctgcgaccgcacggcgcccggggcaggaacatgctcgctctcccctgcgcggggggaacgaaacccccagagtgcgttccgacacgctctttctactatccaaggcaggtttcggcagctttggccacctaggcccggggagccccagccggatctgctgcggcctcccccgcagcgtaggcaaggaccttaaaccccaaaccagggactccgattctctcttttcccctcccgtcttcttttctcttgaaagagaaatagacagaaagctcagccttgagacaaagaacgcgagtgatttctccgaaataaacttgaagataacgacataacagtgaatggcaggacgcacaaaaccccatgggctcaggtcaaatggcattagtcacaggtcttagccgcagccgccgcgccgcgcagctccttgggctatcgcggagtttgaaaagacgcgttcaaggagatcacttaaagtaagatcctttcgtccgatttcttgcttccttaggatttatttttcctttcacgggcggccagccctcgccccctcgcccccgc

SEQ ID NO: 5804 - DNA, 1267 bp, Homo sapiens
  source 1..1267: mol_type = unassigned DNA
cgcgggatcccagggttctcccgcagctctctgccctcgccgcaccgcgccctcccgggccccggccgcgcccgccagccggaagcgctccctctgcgggtgcgactcccgcagctaccccttcccagcctggcgggggtcggcgagagtggtttccacagcaccttacaagttcgggaactcggggcacgcgggcccgccctgctgcgggtttcgactccctgggacggaaagccggttactagcagcaagagggtgcgcctactcggccgcgcccctcactcctgcgcccctgaggccgggtcccctgagaaggggcactcaacggggacatcttcaagcccgtgagtccctattttcaccctgtcactccgagcagggcaaagagatcccaggaaccggtccacgctaccgccgttccccagaccagcgcaaagctcggctccaggtctccccacgccgccgtggtctgtgggcacccccatttcccggatccctctaaccgccacagtcatgcttacctgtcctggcagtgcacacacagaaccacacaactaaaatcaaatccatcggcatcgctctcgagggtccccgcctagcagggggcaccgaagctaggtggaagcaaatgagcctggatcctgaggcgcgcctggcttggagccgccaaacttgctagcgggcggcgggggaggtggctcggcagcgccgggtgctgcgctcgcatatgcgcccgggaaggcagccccggccgccccgcccccagcccgccccccaccgctggcgcggcggcggcggcgtggggctcggggcccggccccccgctgcggctgcgttcgtctgggagcccgggcaggagcgcggggtttggctactgtggcttgttgcgctccccactgggggccgattccgttcgcctccttcgcccgcagaactgcgaggatctggactgcaggcgccgcagccgctatcacccggagcaccgaagtcggagtcccaggacctgcggccgaaacgagagagcgggaggcgcacggcgcccccacggcttcacgcgctccagcccctccgagccgcagtcgccaatgttgccctctttacttccgcaccgcggtgggggctgccgaagttgccacagttcatccccgccgagtcgaaaagccgccgagccctcgcgggtgggtatttttcctcgggggaacccagaccgaggcggcgccaccgagcgcgcacggaccccctcggaaaacaattactcgggattcgc

SEQ ID NO: 5805 - DNA, 1225 bp, Homo sapiens
  source 1..1225: mol_type = unassigned DNA
cgccggtcgccccctggtgcttccggggctggtaagcgcgtagctgaggaaagggcacaaaggtggcgagctttgcgggagtagttgtgcagaacctgccggaccccagggcttggccggtaggctcgccttcggcggctgggctctccccttggagctcagactccccagccgcaggctgtctctcgggcgggccccagccagggcgcgcagccctgagcgtttgtcgctgcggcccggctggcaggccccgaggggcgcggggtcgcgggccggccggcagggctttgtgccgctcgttcccgggtgtgcgcgaggcgcggagcatccaaattgacaccatatgttttcctattagttgcttcgcggtcgagttctaggcgcataatcatcgccagtgggcgagagcgccagcagtccctagggaagggacacaatgattgaggcttaacctctgaaggggaatttggagctgcgctttctctctgccatttcgatgctgggagtggcgctctggccctggcgtctcctgggcaagcaccagccggcggtatctgcggaggtggctggcacgttgttattttttgaaatgagtgaggagggaggtctagatttaggcggccttacgcgcccgccttggcattagcagactgggaattgccgtggctatgcccgaagtttggaaagtctctctcggtctctttctgggacagcctttctttttccgggaagcttcctgtgcctagaggtggggctctgtagctggaggggtagatggaacttgcgaagcaaaggaaggcaataaaaggaagttaggagaaaccggaaacgtgggccaggccttgctctgttggagaagcggtgtccccgcaaagtccctgcttgcgctggtcccggccggagcccagatcccccaaacgcctgtcacttctcatcgagttgaggctccggcccccacccgcgccttggtgagggccccccctcagccccaagccttcggctaccctgaaaacgcggctcccctcgaaggggaaacaagtgcagttcaatctcgtctgagtgatctacaaataaggacggaaagggtcgttttatcacggtcccgtttgtcgtgacgatgcaatttcccggagcggagcactgtcacaaagtgacaaggctgccacaagcgccccgactgatcttttcaattagccttccatgcatgatccggagcgacttccgc

SEQ ID NO: 5806 - DNA, 1627 bp, Homo sapiens
  source 1..1627: mol_type = unassigned DNA
cggctgccggcgcgagcggcggctccctcccggctgcagaacgcctctcgttgccggagaaggggctcagcaaaattgactcttccttatttgtttccatccataattgatggggagatgagaacgtaacacatctcagcaccgagctcttgtcgcctggcggagaccctgtccaagacgcttccgtaaagcatttccagtcggggaacaaagcacggaaagttgctgggtagagcggccgggaggagacaccgggagccgggtgggcggtggggtggccggtgggctgctccgggcccgggagtccgcccgcagcgcgctctgccagtaaggggagagggacggtgggaagcggccgccctccgggcctgggccggggatggggatggccaagtcacccgagctcccgcccctcgccggcaggcactacccgggggccgtgcaatccgggcgctcactgacaggtatcctacgcccgcgaggggctgctccggcctcaactgcggcgctgcgccccttctccaggacgcaggctaatgctcgcccgcccgctcctagccgggcgcagagctgccagaccccgggcgtcccagcgtccgctctggggccaacgggcgggagggggcggctaagcccgcaggcggctccttcggccttggctcagctctccccggctggctcctggagacgctgtgcccggcagagaagcaacccctgctaaccccagctatgtgcgggggacgccgagctggctctgcctggcaagaaacttttacttgatgccccctccgctttttttccaagggggtgcacagtggaggagggcctccaagtccacttgcccctccccctaagccgccagctttgccagttttgacgcgtccgccaaacctctctagccctttgcgcgtcccttgcacggcaggcagagagagcagcttggaaaataaatcaactgtccagtggcaacacacacacacacacacacacacacacacacacacacacacacacagcgattcgggatctcaggttccgacccccaccgcgcgcacacacacacacacacacacacacacagcgattcgggatctcaggttccgacccccaccgggcgccacaagagcattagcaaattgttgaaaacggtcttacctcattggggggaggctggtaagaaaaaagaaaaagaaaaaaaaaagcttgccacgcgcaaggaagaaagaaaataaagaaaaatattgtaaaaatagatatccctctgtctccttaggtcttggcttccttgatagaatcctgaaactcgccaccaccccttgcagcagcagcagcagcagcgggacagagcaggagcaaaacaaaccgatgcacggcaaatggtgtaattcgatccatctccaagtcaatccatcaggcgagccggagcctggctccctccacgcactcggcagctcccggcgcgggtcccacccccgggcacggacggcaggaggcgcggccggccgggcgcgctcgccctcgcgggtgaaccgtggccagcgccgcctggaggcccccaccctggcgccgcggccctgctgacccctcggtggcctccgcgtccctcctctccggcgctctgctgcgc

SEQ ID NO: 5807 - DNA, 1857 bp, Homo sapiens
  source 1..1857: mol_type = unassigned DNA
cggcggccgtacttggccttacagtgcaaaatgtgcttggcgaggaagtcgaggcggcgctgtagcagctgagcgtgggggtctgcaagggcggccagctcggggaagcgaggctcgtggcgccggtagaggcgcagcagccgggccgcggcgtcctgtccgcggtgcagctccaggacgcgccgcgcggtccgctcgcggaacacgcacactgactgcaacagcggctcgttatacttgtcccacatgcctgctacccggtagccgtgcaccaagcccgcctcattgtccagaaagaccagcgccccgcccggaccgcggtgcaggttgctggtggcacgctgcatgacgcgcgggtcccactgcaggctgaagaggttgcttacgagccggtcgaagttggccgtcaggtagtcgaaaaggattaagtcggtccattgtactaggtccaccagctccgcctggctgaggttggccagctcacccccggcatcccggagggggcgcagacggccgtcctccgagcgccagggcgcgggcaccaccacgtccgtgaggttgggcagccagcgtgtcaggctcaccacgctgccctcggtccagtgcgcagcgcgcagctcctcctgcacctgcgcccactgcgcgccccgagcctccacccgagccagtgccagcggcggcacgtggcgctggaggcccagcaggcgcgccagatagtaagacagggcctcgccctgaatctgctccgggttgatgccgtagcgcacgcaggcgcgggtgccgtcggcaaaacgggccagtcggttggagctgcgcccgcaacccccgcgctccagggccaccatccgggcgccgcgagccgcctccagccacgccgccgcctgggcctccgaaaagcccgggggcacctgctcctccaggccgcggctccagaagacgcccccgtgcaccgcggcgctctcctccggccggggctgcctggctgacacgtgccacctgggctcgctccgggactgccggggcgggccgtccgcgccggccgccagggtgagcagcgcccggaaagttttcagggagccgccgcgggcgtcccacgccaggggcgggggcagagggaagcgaggcgcgggcgcggggccgccgctccgggccgggcgccgtgggagtcggtcttcgggcggccgggaggcgggcagctcggtccgcggcggcaggagccctccccacagcgccagcagcgagcccagcgccagcagccagagccccgcggtggcggcggcgccccgcatcctcctgcccatgctcccgcggctgtgccggtgcgccgccgccgcttcaagccgagcccaggcacccgggtcccggcggcgaggcgggcccggcagtttgtgggctccggggcttcgggcgcttcggccccatcgcggccgcggggcgctgcggggctctgtccggcgctccgcccggcgctgggaactcgagtccccgccgcttcccagctgcttttgtatttcgctgtgagaccctccggtgggcgcgattcacaggcgcccggaccacgtgggagccagggggatccccctccccctcctccgcctccgctccccgccccccgctcccccgcccccttcctctcctcttccacttaaagcggcgatggctccttccgagagggagaggcggccccacactcggtccgggacttgggggcctggaggaagccggactggctgcgcccgcgccggggcgtaggagggggtggcgcagagccggagtctggggcctggcgggagggacgcgccctgggccctcgcgggggtgtcttggtcgccgggtccctttgcctaggcagcgcgg

SEQ ID NO: 5808 - DNA, 2423 bp, Homo sapiens
  source 1..2423: mol_type = unassigned DNA
cggagcgcagagaacggctggagacatagcggccgcggttttccccgcagcgcaggagcgccaggcactgcgctgggtcaactgcggtcagggagtcacctgcccgcgacagcgagcgcgcacccacactctcgaccaacccaggctggcctccagcccactctcgggtcccaacgcccaaacatctcgcattgctggctccgacatctccccacccgccgccaggaatcagcgcagagggagatgcgtcttctgtggcgggtgcggggcgaggaccctgaccccagctctgggaagtgaactgtacggaggagagagctctccatcgtcagctctgcctccgcccctcctgcggcttcacttcagcccggatgccggcgatggggaatagaccagggacgcaggagcacactggaccgggggtggatccacttggggaggcaggcaaccgacccgcgcaccggtggcgcaacctcgttccggtgaccgaagcttgtggaggtagctccactcccggctccctggtccgacatccccctgccacctcctcccccacctccccgagtcttgggagcctggaccccgaaggtgcaaaaagtcaagagcctggaaaactgcactgtgcaaatatattgactttatttgtctcctttcaggagcctcacagacatatccaggtaaaaagatcgttaaataaatgccttcagccatcgcaatgcaaaaataaatatcaatcctccagacgcagtagcagccgcgctgcgcccaaagtcccaacggccacgcctaacaattataaaagtgttcagcgagagtgttggcgtgagtgtgaatgggtgtgcgctggggggcacggtggagcggtgtgcaaaatcggagttgcaaaccatcggacaagggcatggagtggctacccgccgccgactcagcgcgggcgcgcctccccgcacacactcacagcagagttcgcactgggaagagttaaaaaataaacatttacaaggacgaggaaagcggccccgctcccggcgctcccgggccagggcgagcgcggcgaggggcgcaccgaccggttcgcagcggggcgggagtccgagcgcgcgaggagcggcggtcccgggtccttgcgggtcccccgggagcagggcgcgggcactctcggggttcacacgccggtccccgcgcggaccgcggacgcgcgcgtcccccccgcgggcggcgccccttacagggccgagtcggagtcgctggagtccaggctgttcctcagtttgcagctgctgagctgctcccgctgcagcgacaggctctgcgtgctgcggcgcaggcactccaggctctgcaggaacgacttcttggccttctcctcctccatgggggacaccccctcctcctccacctcctggatctcgtcgaaggtcaccggctgcgtcttgaagcgagactggcgcggccgccgcagccggccccggcccttgggcagcttggcgggccgcacgggctgcgggaactcgtcggccaggcacacgaagtgcggcatcaccgcctggtaactggagcagatgcccatcagctcgccgggcttggcggccatggcgcctccggcgtctgcggggccgggcggcggggcgccggggctctccgagggcggccgctgcgccggggccccccgggaggcagcagccgggggctcgccgggcgggggatccaaatctgctgcggggtggcggcggccctcgcgggcccgggccggcgctcctcgggagggcgggcgggcgggcggacccgtcggggggcacggggctcggggggcgctgttccgccgcgctccgaggcgctcgccgccgctgctgtcgccgtctgccccgcggcggccaggctcgcggcttatatagcccgcggctgcccacacggctctgagctcggatgacagcgaatgccatttaaagcgtgcgcgccccgcgcccttccgcctgacgtcgccccgccgctctgggaaagtaacggccccttccccggcgccgcccgccccccgccaaccggctccggaaggcaggccccgcccgcgggggttccgggagaagccgcggccccggagcacgcggctggcccgagctgcgcccggacagggaccctcaatcgccgcgactgggcgggcactgtcccttctgggatccccaagtctgcaccaaccgggttggccgcggggccgcaggtccccctcccccgccccctggtcccagatgcacacacttgaggcgctggttattccaccgccggttctgcgcggggcgcgaggcagctctcagctctctttgcagcctggcgagcctgagcgcccggctccccagagctgagctcggaagaaggggtgggctccccttctggatccttgccacccccctccgcaggcgcgcgcgcgc

SEQ ID NO: 5809 - DNA, 1146 bp, Homo sapiens
  source 1..1146: mol_type = unassigned DNA
cggcatctgggcctctgcgcgcctcgccccgcggccgggcccatggcactgtgagcctgcaagggagccccgctcagcgcggggagcgcccggccccctcccgccccatgcgcccgcggctctgaagcctgagcgggggccgggggccgggcggggccggggccgccgtaggcatggcgtccgggagccggtggcggccgacaccgccgccgctgctgttgctgctgctgctggcgctggcggcgcgcgcggacggcctggagttcggcggcggccccgggcagtgggctcgctacgcgcgctgggcgggcgcggcgagcagcggcgagctcagcttcagcctgcgcaccaacgccacgcgcgcgctgctgctctacctggacgacggcggcgactgcgacttcctggagctgctgctggtggacggccgcctgcggctgcgcttcacgctttcgtgcgccgagccggccacgctgcagctggacacgccggtggccgacgaccgctggcacatggtgctgctgacccgcgacgcgcgccgcacggcgctggcggtggacggcgaggcccgcgccgccgaggtgcgctccaagcggcgcgagatgcaggtggccagcgacctgttcgtgggcggcatcccgcccgacgtgcgcctctcggcgcttacgctgagcaccgtcaagtacgagccgcccttccgcggcctcttggccaacctgaagctgggcgagcggccccccgcgctgctgggcagccagggcctgcgcggcgccaccgccgacccgctgtgcgcgcccgcgcgcaacccctgcgccaacggcggcctctgcaccgtgctggcccccggcgaggtgggctgcgactgcagccacacgggcttcggcggcaagttctgcagcgaaggtgagccccggggagcggccgcccggtgcctgggcgcgggggtgagggcctggggcgcttcgtgggggtcggagtgtgtgtgggctcctgaggcacgggggctgggcacgagggcttgtgagtgggtgcgagcgctccagggctgcggggacgcgtgtccgggcgagggcgcgtggggttggcggtgggcggggcgagtgggcggggccggcttgggcgtggtcagcgtgagtcctgcggcga

SEQ ID NO: 5810 - DNA, 577 bp, Homo sapiens
  source 1..577: mol_type = unassigned DNA
cgctctccctaccctgcgcgccccacgtgcctcctgtaaacaagagaacgcgcaggcgccgcaaaccagcgcccattggtcggcgtgccgtcgccccgctggagggaggactcaggccccgctggccgcgggctcggtacccggtgggtcggtggagcgtctgttgggtccgggccgccggcttcgccctcgccatggcgccctggctgcagctcctgtcgctgctggggctgctcccgggcgcagtggccgcccccgcccagccccgagccgccagctttcaggcctgggggccgccgtccccggagctgctggcgcccacccgcttcgcgctggagatgttcaaccgcggccgggctgcggggacgcgggccgtgctgggccttgtgcgcggccgcgtccgccgggtgaggacgcgccgggggcgggggcgccaggcccgggtccaagggataggagctttgacctaacattgggatggggcctgcccgctggacgaaccgatctctggtgatggggaatgggcagcgccgcacgggcggggccttgggcgccgtcaagggccgactgtgcccgc

SEQ ID NO: 5811 - DNA, 1721 bp, Homo sapiens
  source 1..1721: mol_type = unassigned DNA
cgtgagcctccgaaaggcgaagggcaggcagcagccgctggcttctgcgcccactaggagcttcggatgcccgagttagggctgcgccaaggcggccggagcagagagggagacggggacggggacaggcagggacaaagtgcaagaggcaaaactggctgaaaagcagaagtgtaggagccgccaaggggcgggacgaacaggtccgtgggccgggcggagccaagggtgggggccggggtccctccaggtggcactcgcggcgctagtccccagcctcctcccttcccccggccctgattggcaggcggcctgcgaccagccgcgaacgccacagcgccccgggcgcccaggagaacgcgaacggccccccgcgggagcgggcgagtaggagggggcgccgggctatatatatagcggctcggcctcgggcgggcctggcgctcagggaggcgcgcactgctcctcagagtcccagctccagccgcgcgctttccgcccggctcgccgctccatgcagccggggtagagcccggcgcccgggggccccgtcgcttgcctcccgcacctcctcggttgcgcactcctgcccgaggtcggccgtgcgctcccgcgggacgccacaggcgcagctctgccccccagcttcccgggcgcactgaccgcctgaccgacgcacggccctcgggccgggatgtcggggcccgggacggccgcggtagcgctgctcccggcggtcctgctggccttgctggcgccctgggcgggccgagggggcgccgccgcacccactgcacccaacggcacgctggaggccgagctggagcgccgctgggagagcctggtggcgctctcgttggcgcgcctgccggtggcagcgcagcccaaggaggcggccgtccagagcggcgccggcgactacctgctgggcatcaagcggctgcggcggctctactgcaacgtgggcatcggcttccacctccaggcgctccccgacggccgcatcggcggcgcgcacgcggacacccgcgacagtgagtggcgcggccaggcgcgaaggggcgggggcggggggcaacggccgccgggccaacccgctcagtcacactctgagaccctcggcgggcacctgctcgggggccccgggaaccggggcggactcgggctccggtcccttctgacgcggggctggggacgcagacactcttggctccggcagcccagcgcaacccctgaggtcgggcgccgcctcccgccttcagaaactcgggctccgagcgccgaattccagcgccttcgcccgtgggcacagggcgcgcggtgcagccacagggggcccgagacacgcgccccggcctggcccaggctggggaaccgctggggtcgggctcgcgtctgaaggtccgggactgggtgcggccgccgggggtcccctacacaggcaagctaatctgagctagcgcaggcttgggctccggaggccctagagggcagcttgggctctggaggcccttgggggcggctgcgccgggaaccctggccctttatccccaaccccaccccagaaatagggtccccggaggcgaacaagccgaggggcggagtgggccagggatcacctgccccgcaatgacctgcgccccgcccccaggcctgctggagctctcgcccgtggagcggggcgtggtgagcatcttcggcgtggccagccggttcttcgt

SEQ ID NO: 5812 - DNA, 1721 bp, Homo sapiens; identical to SEQ ID NO: 5811
  source 1..1721: mol_type = unassigned DNA

SEQ ID NO: 5813 - DNA, 615 bp, Homo sapiens
  source 1..615: mol_type = unassigned DNA
cggagttccgggcacgcaccgccgagcgccttaccctgagccttcccggtacccgcagccccgacagctcagccttccccacctgaaagttccacctgaggtctccctcaactctgccctcctgcattcttggcgtcgcggggagtcaggggttaaaccccgtggcccgcgtggccccttccccctccgcagccccctcgcctccactcggcgccgcgcctggagcgtccgtcccggagacccgcacaagagaggaggggaaaaagtgggcctgtttctcgggtggccaatccaccgagcccgcggtgccccagaggaggcgccagcgctaggccagcgccaggccgggctgcctgcttcccgcggcaaagtacaaatgcgcccgagcgcggcgcctgaagcccttggcgagcacagccggcccgcgctcagcctccctccgcggccgccgcgccgccgccgctgctgggaccgccgccccgccgggccccaggcccccgcggcccgaccccgagcccaccgagcagggggcgccggccgcctctagcccgcgcgcccgcaacacccgctggtcccgcgcgcctcgcccggcgctgcgcgctcggcagacgccgg

SEQ ID NO: 5814 - DNA, 1542 bp, Homo sapiens
  source 1..1542: mol_type = unassigned DNA
cgggacggtcgccgcgcgctccctccctccgccccttgcttacaagacctaatgagctcccccgggaggcagcgcagcgagccaggcccggaactagtaggctgcgccgcgcgcgccgcgccggggcgggagctgggtctgggcggcgggcaggagctggcgggggcgcacgggcagcgctgcggacagcccgggagccgcggcgatggcggtgcaggcggcgctcctcagcacgcaccctttcgtgcccttcggcttcgggggctccccggacgggctagggggcgccttcggagccctggacaagggctgctgtttcgaggacgatgagaccggggctccggcgggtgcgctgctgtcgggagccgaaggaggggacgtgcgcgaggccacccgcgatctactcagcttcattgactcggcgtccagcaacatcaagctggcgctggacaagccgggcaagtcgaagcggaaggtgaaccaccgcaagtacctgcagaagcagatcaagcgctgcagcggcctcatgggcgccgcgccccccggcccgccctccccgagcgccgccgacacgccagccaaacggccgctggccgcccctagcgccccgacagtcgcggccccggcccacggcaaggctgccccccggcgggaggcgtcgcaggccgccgcggccgccagcttgcaaagccgaagtctggccgcgctcttcgactcgctgcgccacgtccccgggggtgccgagccggcggggggtgaggtggctgcgccggcggccgggctaggaggtgcgggcactgggggcgcgggaggggacgtggcaggccccgcgggggccacggcgatcccaggggccaggaaggtcccgctgcgggcacgcaatctgcctccgtccttcttcacggagccgtcccgggcaggcggcggcgggtgtggcccgtcggggccggacgtgagcttgggcgacctggagaagggcgcggaggccgtggagttctttgagctgctggggcccgactacggcgccggcacggaggcggcagtcttgcttgccgccgagcctctcgacgtgttccccgccggagcctccgtactgcggggacccccggagctggagcccggcctctttgagccgccgccggcagtggtgggaaacctactgtaccccgagccctggagcgtcccgggctgctccccgaccaaaaagagccccctgactgccccccgcggcggcttgaccttgaacgagcccttgagccccctgtaccccgccgctgcggattctcccggcggggaggacgggcggggccatttggcctctttcgcccccttctttccagactgcgccctgcccccgccgccgccgccccatcaggtgtcctacgattacagcgcgggctacagccgcaccgcctattccagcctttggagatccgacggggtttgggaaggggcgccgggggaggagggggcgcaccgggactgacttcgaggcacgcttcccttcattagagacggctgtggagagcgccgcgcctccgt

SEQ ID NO: 5815 - DNA, 1542 bp, Homo sapiens; identical to SEQ ID NO: 5814
  source 1..1542: mol_type = unassigned DNA

SEQ ID NO: 5816 - DNA, 1768 bp, Homo sapiens
  source 1..1768: mol_type = unassigned DNA
cgcgtctggagtgggctctcgacacccagggcaagtgggggcggcagagccctctcctcggtcggcacagcagcctctgccgcggtcccggcctgcgacgcgcccagtcttagcctcccggcctccggcgtctgctgagtgtccggcgggagaggcgcagggagcgcgctaccgggaggcgcgggcagcggggactggttttctctcgggccagggcctccggggcaaccgtctccagcgcgcattcttggtgcaggtggaacagctttctgctccggtagggcttcacctatcgcgggagaggttaatctcggatctaaacctcgcagccgcagagcgggctaaaaccgctactccacctcttcccatttctcccctccccacctcaagacaaaaagtcccaggccgggcaggacctgatcacctctgcctcctcccactgcgctaatcctgcgagcgagaggccccgcaccgaggcggaggctggcaaaggggagtggaaagggaggatggatggggccggggggtggggtggtgatgagggcgacgaaggagggggtgtcattttctttttctttctttttttaaaaaaagtatttctctcgcgagaaaccgctgcgcggacgatacttgaagaggtggggaaaggagggggctgcgggagccgcggcagagactgtgggtgccacaagcggacaggagccacagctgggacagctgcgagcggagccgagcagtggctgtagcggccacgactgggagcagccgccgccgcctcctcgggagtcggagccgccgcttctccagtgggtgcagccggggtcccgacgggggtcgggcggccaccggggctggagctgcggccacggaggcttttgcgtttgcgccgcgccgagggcagggacagggactggggtgaggggctgtcccggaacgtccacagctggcgctggccctcccctgcctgacagcttcctggcccggggctcttggtgccgggctccgcgtcagatgttcggggggcggtggcatcgcccggagtcggcggggacggcgcggctggcttccagcctggcggagagggcaggctgaggagtggggcgttcagagcgcgcatcgcgcgcaattcgtgccgctaaaaaaaataaacccagagagctcgcccggggcttaggaccgctggggatatgggtactttgcgccgcgctcttctggcggggcccgggaggccgagggatcggccggggctgctgccgccgggggcctgggctttccagccagctgtggaccaaacggtcttcccttacccaaattaactgcgccacgcgcaggcggcgcacgggttgggcttgggaatggggaccgcgaggcttcagcatcccgatgccctgaaagtctccccgcctcggggatttgtctctgtgttgcagctggcaggggccgcctgaagtgggagcagcgcctggagaaggcgggaggagcccggcccgggggacgggcggcgggatagcgggaccccggcggcgcggtgcgcttcagggcgcagcggcggccgcagaccgagccccgggcgcggcaagaggcggcgggagccggtggcggctcggcatcatgcgtcgagggcgtctgctggagatcgccctgggatttaccgtgcttttagcgtcctacacgagccatggggcggacgccaatttggaggctgggaacgtgaaggaaaccagagccagtcgggccaagagaagaggcggtggaggacacgacgcgc

SEQ ID NO: 5817 - DNA, 2656 bp, Homo sapiens
  source 1..2656: mol_type = unassigned DNA
cgcacaggaaccccagccgctcaagccccgggtgggcgcgtcgcacctccccaggcactgcccagacagctcgccccctccccctgggcgccctccctagtctggctggggccggggcgggttgggggaggttctcgcgggtttgtctgacacttgtaaatggaagtgggatccaacttggaaaacaaacgcgccagagtctgggggcggagaggagcgggaggaggggagaggggggaaaaagacttcaatcattaccgcggtcccagcgtccctccctcccgccgcggctgctgcaggttcgcccaaacccgaagctgagtcccattgggcgcgcggcggcggcgggatggagctggagctcccggccgaggcgctaggagtccaccagattccgcgtgccagagccaccggccgcccacgctccgggccgcaggcgccactccctcccgggagcccctcctagtccttcacggagacctcgcagggtctccgcagcctccccgcccccgacgtccattccggggacccctctccaccgcctggtttgagcccattattccagcgagctgcagcctcaggatgtcaccgccagcacacccacaccccgggagcacccctgttcctctcatcccgagcaacccaagcggctctcttagctcgcagccaaactccggccacccctgcatccttgccccaagcacgcccccgccaccccccgcccacaagaggagaacggtggaaagtgaataaaagttgctttccgcaaagcccaatcatgttcaatgttaaaccatctcggaaagcacatgtgacaaaagtcaacgagagaggagaggagggaattcagatcacagcacagctaaaaatatccgggctcgccatcatgcaagccggggggccagatgcactttagctcagcgactcccactggcggaatcctcgcgctcaccgcgcgccgcgccaagatggtccaggccacctctactgcctccccgccagcgcccctcagccccctacacttgccctgcacacacactggcctgtagaggggattcgtcccgaaccgcccgggagtggggcctgagctcggagctggtgcccctggcgttctcgcccccaatccggagacagctcctccgcactcctggggatggtcagacccgcgctgctttcttttcaaagacaagcagccttcccacacgcccgccaaaaatcatgcactctcgcaaagcattccggttccctctccttgtcaagatagcagggacagtctctgtccccaaccactccgtaaaggatgtcgtccccagtcgaagagccgccgccgccgttcactacatctcaccctgaccacaagccccgcaagcccgagtcaggcgtggggaacggacccgcagactggtaaccctttccctttcctagcgaaagtggaggctgggctccctctctgcgccgcgcctcgcctagcgatgacccaacttgcacctcggggtcccctaagtgcatcatccatcggcatctgaacatcccccactgcgcccgagaggcaccggctgccaagcaggctcgccacctgaaccttctcatccacctgcaggggcggctgggagccggggatgggtgcactgatccgcaacccccctcgcaacccctccccagatcctcagccccaaacttggccaactctccgtgtaaacctcccggctcccgccgcggggccaagccaccctcttctcctgtttgcagcggtagcaacggcggctcggggctgcgcggaggttggaactttacaaggtgaaaagtttcccccacgcgcttcgtcggctctcgcctccccagcccacctcgcagcccatttgcacccagcagctgaggctgtgctccggcaggcgcgctccagtcggtgcaccaggcagccaaatcatcacgctacaaatccccacgcacccttgcctccgctggcgatccacggctctacgaggcgcctcccccgtggtcttcttcacccggtgctcggcgctcttgctccgggcgagccggtcccccggctgctgccgccgcagcgcccaccgcgcgctagccgggactgaggccgcgagcagaagcgctctgcgctcgggacgccgccgccgccgccgccgggggttcgcaagcggaggaggggagccgagatgaagagaacagcagcgggaggagagggacgggaggcgcgagatcccaatccgcaggccagttcacagcgcagcctgcggggaggagcgccggctctcctgtctgctccgagctgcagccgccgccgctactgctcgccgcctggctgctccgggctccccatcacagccgacgccgacgcacggccaagcccctctccagtctccccctcgcgcttgtctctcgcagtctcctcctcccaaaccgcgagcgaaaagggcgagggggagaggagcctcggcggcggggatgactagcgatctaggagcgtggcgcaggggagagggggcgcgcgggagggggcggcggaggaggcgcggcgaactggagggcattcccggcgccgggcctggaagcggctaattttagagctcgagtcttccctcagccctctggggctctaggatgacaccaacgtactttcctgccgcggggagagcgt

SEQ ID NO: 5818 - DNA, 623 bp, Homo sapiens
  source 1..623: mol_type = unassigned DNA
cgacaccacgcgagtgtgtacgcgctggggactgagcccccgaagcgaagccctgtcggaggagtttcaggcgggagtgggaacggctgggcgtggggtcagcaacggcgccacccggtagggtggggggagccaggcttgtcagagccagagcgcgtcaccgtcgccgcgagagacgccgcgctgcccaataggcagaggcgctccctagcagcctggtgggagcagagatataaaagtgctccaacaaacccggagctggcgtgccgaccgcgggctggtggcgggcggcgcggtgctccgcgcgtccgggctccctggctcctcgggacggccttgtatgctgtgcgccccgcaccccggctgcgcgctccgatcccagcgggaggggacgcccggcccgcaggctcccaggggaggggtggctcctgcaaaatggtccctcacctcttgctgctctgtctcctccccttggtgcgagccaccgagccccacgagggccgggccgacgagcagagcgcggaggcggccctggccgtgcccaatgcctcgcacttcttctcttggaacaactacaccttctccgactggcagaactttgtgggcaggaggcgctacggcgc

SEQ ID NO: 5819 - DNA, 1967 bp, Homo sapiens
  source 1..1967: mol_type = unassigned DNA
cgatgatggaaaggaccgccaggcgatcccccaaaaggcccaccaaatatccgggctccattgtcacgctcccacccgggggcgaggatgtctcaaaaacaccccccttcccccgccccatgtggacaggtcgcgtcgcggcacccacgggcaccgcggaaaggggcataaccggggtggcccccgcccaggtggcagcggagacccagggccaggcggactaggcttggtccccacccctcctctccgggccctgccacggccccgccccgccgtcagtagagcccccggcccgcggtcggccggtcagcgcacgcgcgtaggtgtgcctgccaggatgccctccccggcgacgcgctcaggcccggattccgcggcgcgagagtgagcgctggcgggggcggtgggatgctccaagtcggcgtgaaagaggcgagagtgggcgagcacgggcggccggaccaggagcactcccggtgaccacctagtctccattttatttcctcggaaactgccgggcaggcgggggaccggccgcagggcggggtttctcttggcggtgagtgagcgagaccgttaggctgaagcaccgggagactgtcctggcagctcctggccgccacccgcgccgcaataaaagcctctcgcggcttcccgcccagccagcttcgcactgattggtcgccgtgggagggacccgagttggctggaggcggcggccgagcgctgctcttgtgccgcccgcggagggggcgcactgggtgctccctggcccgccccgtgcgctccccaaccgggggtcggccgtccagggcaggtacaacggtacctggagctgcgaccgcgacacacagcccctccgcccggctttcctcgatcgcttcccagcacacgccccccgcccagaatgtccgcccaacccacccagctctctgcggcccctgcttttcttccttccctcccgtccatcagagccaaagcgcaaatccttgggtggaggtggggggatgacagctggaggggagggtgggcacgcacagaagaattttccagggaggccgggatggaaatagccaaaatgaaatgcacctccctgcacactgccgaggttctctgggcggcggcgcaacccccgccacccgcggcagcatcactactgtcttcctcccagctccctattgttcacactttgccaggatcgggaacctcgcccaaagaaaggagacagggcgaggtgtttcgggcggctacctgccattcttctcccgccccgtgcaacactgggcacgcggcgcgtgtaaagacacacgcgcgcacacgcgcgcgcacacaccaggcagccccaatcacgccctcctcgccctccgcccctccgcacttcctcctgtcaaaacgcggcgctcgaccctcccatccttcagtgctcgcggccgagggtaggctttgcaactaaccagcaatttggcaaatgaaaaactaacgtcatgtcgactggggtgcaacaacggtcacaccaacaacaacggccgtgcgattctgcccattttgccccattttgcaaaccgttattcttctggggcgggggaagcaaagcagcgatcctgactttattagacccaggaatataacgatctggggcggctgccctagccttattgttcactcttcccggagccggggctgacaagccacttccccctcggaatccgagcccgtgcggcggcaccacccgagccgcgacctcccccgccccgccgcccgcctttggggaaggagcgctgcccatcaccagcgcggccgctgagtccccaggagccggccggctctgctcccaccgccgcgggcgcacaaagtgggaagggcggacgcgccggaggggcgccgggcgctggcggctcggggaggcagccccgtgcagcgcagccctggagggagcggggttcggctgggcagcaagggcgacgcgc

SEQ ID NO: 5820 - DNA, 2558 bp, Homo sapiens
  source 1..2558: mol_type = unassigned DNA
cgccccggggtggggacggaggccgtcaaggttgggatgagcattcagccgagccgagccaccgcgtgctttcccgcagacatcggggtttctgagaactaggagggaacagccaaaagaatggaagcttggcgccctgaaacaagccttttgggtcctgagggaaatctgggcgcccacgggcagccgtctcccccacccgccgctcggcgcccgcgatccggctggcgctggctgcagcgtccagccaggcggcgcggggaagagccggcgataacccgcccgagctccggggatcgaccgcgctctcacacccccccagttcccagcgacccccaccgagacttggagacgacttcagcaaacttggggaagcaacttttcccgaggagctagactcctgaaagaaggagagctgagctagggacgagggaaagcgaaagagacggggaggaacggcgacagtccgggcgggctggactccgcggcgagagcggcaggggaggcggacccgccccgcggcgaaggggaagcacaaaagccccgcagcgagttgtgggaggaaaggcgagaaggggtctgcccgccctccctctccgacccagggccgtgaccccctgggagcgaccggctgggtcccaggcctctggccagcggcgccagcggccagcgcgcccggcccaagcacggtgcgagcgtctcggggaggcggcgagcgagtcggtgcggagcgctccgtgcgtccgggtggttccgcgggccggcgggaccgtgcgcatttcaagcgcgtgcgggagtgtgcgaggcgctgtgcgagctagcggcgggcgcgccagggtgggaaaggcatcccgaacgcatcaggtgcagagaccggcacccaccgagagcggccgggagcgcacggcgagctccggtgtcaccgccggtcccgccgagagccgaggagggcccgcagcgctgcagaccctctggagcttccctccctcccctgcaaaaggggggtggggatcaagtccaatcaagaaaaagcccaccacgttttctcaaagagaaacaaaacgtaagcagtcccagtcctgctcccctccgcccccagatctactcgtcagctcctccgattctagcttcccagccggccggcgaataaacacacaaataaataaaccacaaccttatcttgcgcccgcgcaccggtccgcatacataagagcacccacgggctctgttgctccgccagcccctggcggtacaaagcctccggatccccgacccctctgctcacgccctcagcccccgcacaccgctacgccccccacctctcaccccgaccgtgccctgaagaggaagggctggggaggcagctgcgcccaggctgacagccggggctcccccttctagccgacccccaaccggtggcggcgacggctgcagcggcaggaagggaacacgccaaataaaaaaggcacaagcccagcggccgagtggccgaagcgagcgcgcgccccccagacctctccagccccgggaagccccggcgcgcggcgctcgctgggcggtgcgcctcttcccggcccctcactcaccgcagccgagccgggcactgtggggtgggtgtgcgtgcctgtcggggggtgtgtgcctgtgtcggggaggggtgttgctggggaactgttgctctccgtatcacggcggcagcgacagcatcgcccggcagttcgcagtacccgctctcatcgccctcaactcctctctgctgcgaggttagcaaatcaccaccggctgctgcgcctccgccgcgtcccacgtcaacgccgagccccctcccctgcaaggccccggcgcctctccatctttagtgctggcggccgagcccggctccctgcccacagctgccccccttccctcccccctcccgcgccgtccccgggctcagcccgcccaccaccccgcactggccgagcccgcgcgcgctccccgccccacccctcctttcccctcccctcccttcccctcccttccccgcgctccgcgctccgggcttcgcctgacatctagctgctgctggggcgccggcggccgcctctcaccggccgagcggagaggaaggaaggagccagaggacaggagtgcatggggactcagaatccttaataggggaactgagggtgaagggcgcgcagcagcccccacctactcccaagattttaatttgcactggatacgggttttgtccccccctccccgcaccccggtgctcaagcacgcagttttgtctcctcttccaatgtttgccccaattcagtgcgtgtcatctcgcctttaacttttttctcatggctcggggctgcagtccccctgacatctgttttaaaaggccgctttcctagcccaaacccggccctctcatcctcctggttactgcgcgcctcccggcttgagcatccggatttcaataagtctcccgaggcagagttcgcgggcgctagtgaaccaggtgccagaaggtccgcggggatctattgtcgaagcgagacacccgtttttagctgtcgcga

SEQ ID NO: 5821 - DNA, 2558 bp, Homo sapiens; identical to SEQ ID NO: 5820
  source 1..2558: mol_type = unassigned DNA

SEQ ID NO: 5822 - DNA, 1508 bp, Homo sapiens
  source 1..1508: mol_type = unassigned DNA
cgcctctcagacagcggagccgggtcggggcggtctggcccgggccgccgctcctgttcctgggcttgtggggctggggtccgtctgggctccgggctcgcgcggcgctcaccacccggggtgccgcgggggggcggggagagcggccgcctagcccagccccgcggatgacaggagccggggagccgaggagggaggagccgccgccgcagccgagcgctgggctgaggagcagagagagcggggcgccgagtgcgggcggctgggagcgcgctgagcgggggagaggcgctgccgcacggccggccacaggaccacctccccggagaatagggcctctttatggcatgtggctggtaactttcctcctgctcctggactctttacacaaaggtgagacctgcgcgggcggctgggcggcggaggcggcggggccagggtggcgcggctggcggcgaggcggggtgcccggcgggctccaggtgcgtgggggaaccgaccggggtgcaaggccccgggtggggcgcagcggggaggggcaggcaccctgacaggggccgagtgagagtcagcccccgaccgctccgccagccacccgcgtctgccgttttggggcgcgcccgtaggggtggtggcaaaggagcccctcatctccctgctccctgcacggcggcagttctgccctggacccctcccccagccccttgccctcttcctgcggcttggtggcactgggaccccggagtgccctccgagtcgaggggtcctcaggccgtgactcttgacctaggagtccttgcttattcaggcctcggactcggcggctgattcctccgctatgtccgtgcgtccctctcccgccgcggaccccagccctggcgcgaatgttggcgcaccgcatggcgcttatccgcgcattggctggaggcagggtggggatagtgagagtcccgagagctggaggtccctcggatagcaagtttgttctccaaacccagaggtcaccctcccccggccctaccccacccctctgccccggctttagccccggcttggtgcgccaccgtggccacctcgggcagcgcgccccaagatgcgagattctccgcttccgcgcctggccagttggacctggggacaagtcttcaggctggggggcgtgtccctcttcccggagagagggggttgctaggggtgggtccaggtgtccggcatgtccagacctgcggctggggcgctgcgtacctgatccgcgaggcagccgggatcgggaggttggaagagggcagacatttccgactgaagccacctgggcactgagtcgggaccaggcaggcgcaggtagtctgggttccaggctatcgcagaggacgtgcccccgggcgcgcagatggcgggagatgaggcggccgaactccgcgcccttgcgtggtggagcacacacgctccaacaagctcagcgtcacctgttcagccctctaacttttctccttctcgccccggggcgg

SEQ ID NO: 5823 - DNA, 1119 bp, Homo sapiens
  source 1..1119: mol_type = unassigned DNA
cggtggcgacatggcaggcagtcccgcgtggcggcggccgggacagctgggcgcgctggcaggagagcaggcacagcgctccccacaggcaggatgacgcgggctccgcagcccgtcctcccacgctgccccgcatcactgcctcggccctgacgtgcgtgcgacagactcaccgcaaacagtccccagcgggagcacgaggccgggacaggaggtgggcggctacacaggacaccccaccccccccacccccccgcagccggcggagccgatcgccggaaaagggaggcggtgggcgaaaggaaagcggggagctgggagaggagctgtaaacaaagagctgcccttgtgcgaagtcctgagccgggtccagtcagcccgcttcctgtggcccacgcactgcccgccggcccacgcgggagcctcgaggggcgaggcggaggctgggcgcagtccttgcagccagcagccacctccgcgcgctccgccgcggtccagctaattacctgctgcggcggcggccgtgccctttagggtgcattagtattcccgccgcgggcgctgccctcgcggcgtcggcaccgatgcccggccacctccaggcccgaacgactgcggctgcgggaaggcgggtcgaggggggctacggcaccccagggagaggccgggagccgcccggacctcggaggggatggggtcctctctgggaggcacccgtctccttcctgggtcctaagacccttcccagccctgcgctccgaccccactcctcccgaaacgtcggggaatcgggaaaggagggccacgggcaaagcgggggcgggcgccccctgattagcatgcggcgccggttgcccgggcccggattcccgagccccctccccgcgagcgcacactaataagtttacaaatggaatccggtggcgccgcttgcaataaaaggcagaagctgcgctccggcgcttcaatgagagcattttcccccgtaacaaggggctggattcagctgcctggtgccgtctgagcggggcgagttgccagagtaaccaaggcctagcgcgcacgtggggagagggagctggctggggctccagcgctagccgccgcctgcgcgcccgg

SEQ ID NO: 5824 - DNA, 1119 bp, Homo sapiens; identical to SEQ ID NO: 5823
  source 1..1119: mol_type = unassigned DNA

SEQ ID NO: 5825 - DNA, 653 bp, Homo sapiens
  source 1..653: mol_type = unassigned DNA
cggaagtaaggcgggccagccaccgcctcgagccaaagtttctgcagccctggcaatcccccgcgcgtttctgctcaggagccccacacctcagagaaacttcccggcgtccccagcctcgctgtctcccctaggctttgggacacagctttaagggactgagcggcccggacgggatctgaaacctttggaggaccagccacgtccgcacagcccgcccatgcgcgctggcaccaggacccgcaggctgccagcggcgagtccccgccgcggttcctcagggcacccccggagaagggggcggccctgaggaatctcctgcactccggatgccctattttccccgcccttagcgccccagggccctgctcgggtcctggccgcgcgtggtgttcttttcagccgcggagctttgtttcccagtgtcgctgaaaggaaagagaaagaaaacgccttcggtcctggaggtcctgccccttcctgaagcgatgccatttcctccctccatctctcttttcttagattcctcctggggccccggcagaggcggggcggctgcgccccgagtccctctccggcggcagcgcgggagcggggctggaaaagagggcgccgggagccgccccgcccctcatcgctcctggcttctccgc

SEQ ID NO: 5826 - DNA, 1768 bp, Homo sapiens; identical to SEQ ID NO: 5816
  source 1..1768: mol_type = unassigned DNA

SEQ ID NO: 5827 - DNA, 1101 bp, Homo sapiens
  source 1..1101: mol_type = unassigned DNA
cgctgcgaggatcaagggagatggaatgcagcgtaaagccccacgtaaacgtgtcgtgcaacatgaagcccctcaccctgagttggggagcgggtggcacgcgtggaagctgaatgccaccatccctgggaccaggcgcagcgccctccagaagcgcctctggtgacgggctcctgttctcccccaggacgtttcccccagaatgccccggggccctggacggctctggagaggacgggagggaagggaaggagacgggcggaacggggacgtacctgctttcactgcactccttccgctccctcaccctcagccacttgcggaggaggaagcgttttcggcgcggggacgcgctgggtgtggagcagttggaccacggggtgtcctcgtcgctggagggcgtgatctcgatggacggcagctgcaggaactccttgccgggggccaagacggcgggcaggtcccgggccagcccggcctccaggctctgctcctgtacgttcttcatgcggcgcatcttgaagcgccggcggcgaagcgtgggggtcgacgaactggaccagaccgggctgccctcgggcgcaccctgcggctcgggcacctgcagggcgggcagcggccggttctccatcatgttggccgccggcatgggggccgtcgcctctgcgctccccctgagccctccgccagcggcctggttcgcgtctccctctggctgttccccaccctcggccccgcggcacactccccaatcctggggccgaaggaacaagttcctttcccggagcgcagcgaggaagggacgcgaggggacgcggcgtagcgcgccgccgcccggagtctaacttttcggagcgcgcgtcctccgggccgtcagccgccggcgaggccacccgggaggggcgggagccgcctgccagccactcggcagccctcctggggctcccctcgcgcgcccgcttgtttttcttccgctgcgcttcctcgcttgctggcgtctttgccttagcgggactcggcagccaggggccccagggggcggtgcagcaaactctcagcggtttgcgttcagcagaccaggttggggagccggcttggcgc

SEQ ID NO: 5828 - DNA, 1101 bp, Homo sapiens; identical to SEQ ID NO: 5827
  source 1..1101: mol_type = unassigned DNA

SEQ ID NO: 5829 - DNA, 2341 bp, Homo sapiens
  source 1..2341: mol_type = unassigned DNA
cggcccctgcaacggaggcggctccgaaggacgcaggaccctttcggaggcgacagctccaggagccctggtcctggagccggcgcacgcctaggcgcgaagggcgggggctcggggcgctagggatctgtgcggacgggggctggggaaggttccccgccggagaggcggcgaggccggcccaggagtcccgcggagccggcggctctccagcgcctagagccgggcgactgagtgccgagaggaagggaaagcgctgacatgtaaacaggggcttccatctggaggagcccgctcagatagatcccccgacacactcacttgcacccctaccctcgtgcaacgaggccacttacccaccccagggcccaccaggcagggacccgagcccgggcgactgcagcccccgcccccgccgtgttccgcctctgcggagaggaagcccagtgcctagcgctggggccacgggagccccgggtgtcggtgggagtggtggaccccgaggtctctcgcccttgactccgttccgtaccctggggtcccccggtttcccgccgtcccctcctgcagccccggcgggcagcgaggtgggaggggggccggggctccactttgggggctgggatttcgggggagggtcgccctcaatgcgggcgcctggccggctggcccgcgagtaggactcgccacccgagcgccggaggagccggcgcgaagccggggcgcggagggaagggagagaggccacgtcttccgggacgcgggccccgcacctacccgcccgccgcttcgcctccccggccggtccccgccgcccgcgtccgttgccccgccgcttaccttaatagtcccgtccatttggccaagtctgcagccgagccccccaatattccacacattgacccggttacagcctgacctcgcagccccttcggattagcccggcgcggcctccctggcgccctgggccctccctgcgtgccccctgcgagcgccctgccctcactcccctgtgcacgtttgttgttgtagcggagcgaaagagacagttaaccggatgaaacttttttttcagctaattttgggaagtgacttcactttgcgaatcggggaggaagtcctatctctctctctctctctctctctctctctctctctctctctctctctctctcgcctcgagctctcctctctcttctctcccctctgctctccctcgtcttccctccccccccacaccccctcttcctcccctgctggtcctgcttttcgcatcacacactatataaatatacgcggagatgcccagacacattcatgcgctgcgcacacaggatacttgctcctgggagataagagctagccgggaacaatgacggggtccacgcccagcgtccgcgccctgattcccgaagtctgaacctccccccatcaccttcccccaaaatccaaagccaaagacctttggcttctttgcttttcctgaggcggttggccgaaggtggccctcctgactcattcactttccgtttcttcccacagatacgttcattaatgctttttccagccggagacaaactttttgggggtggggtagggggggtatggagggagagttggctagggctgcgggtaacccagcgcctactgccggggaagactcggacgaaaaccgaggcaaaccaaccattaaaaagtgcatccaataagaatttttccactcaggccctccgctgccgagacgcggcagactcccagagcggctcacccactcatcgaagcggattctgggcggtttcgggctgacccgcgctgtcagggcgcggactccattccgggcgcattgttaggagaaggggcccctcggggcggcgcgcctcgaccctgggctcccggtgcccgcagagggcggagatccgcggcgccctaggccacctatccgcatcttctcgagccaaacccccagcgcttacccggacccgacggcccaagcactgactcccaggcaagagtcgcccttcctggtccccagggaactgacactaccgcgggacgttccctctaggacagtcagcaggtcccaggagcgcagcacgcaacagcgcagagcagacccagacttttcccggggtgagacccggaggcccgcgctctggaccgtcctccctacccagcctggaggccggcgttccccggcccaacccggagacctccccgcctccctcctgggccgccgcgcgccccagttggagcagcctcgaggggctgggccctttcggccggactcccttctcccggacatccaaaacaggttaccttgtccacgctctccggaccacgc

SEQ ID NO: 5830 - DNA, 3857 bp, Homo sapiens
  source 1..3857: mol_type = unassigned DNA
cgagcagaaaccatcgtgtttctgggggctcttcgggcgccgtggggcgacgcggtgcagcgtctagggccgccgcaggccgggggcagggctcccagcggttcccccgcggccagcggccacgcaggaaaaacccgcttcctcgcccctgcatctgctgacaagccgcccgaggtgtctgcgctgagcgtggccacaccgatgcagctttctaggaaatggcccgggagggggagggggcgagtgagggattaggtccggctccccctcgctccccctgcgcaaacaccaccaccccttcctttccccggaggcatgaggcctccacgctcggtccttcgcccgcatcctcgccgacccctccggtttcgcgcctcactcgccaggctttctccctgggagccgactgcggtgaagtcgccgccagcacggtcggccctgacacgtgctctaacgcatgcttgagtcaaggctgtctttacaggagatacgatctggtggcgtttcttcacctccttcctcccgtcaccccccacccccaccgcgccctttggtgtatttcactccaggaggaaggggagagaccagcgccctgatgtgctggccaagctggcacgtgcagcgggcatggcgtggctcgagctctctgggcacaccgaggccgactgagtgcctccctcaccgagagagggggcccgggcaggggcgcggagagccagcaaggcggggtggggcgcgggctgggtgagccgtacactaggttccctgcaaggcggaggaggggagcgaataaactagaggtgcaagcgattaactcaggccccggagccagcctctttaaacgagggtggggcggaaggggtggtgggggggaaaggaggggatatcgctttaaaagggtgaggaagagtttggggcgccgtctcccctccctctatttgcatagccaatagctctggggctcctgctactgcgcgctgattgttaccgggcagattactttttttttttttttttttttttttttttagtaggacgcgttccccactacatcaaaaggaagccaagggagggcggagggagagcgggcgctggggcgggcgaaagctggggagaggcccggccgcctccgaccttatcaatagcagcgggaatgagtatcccatctcctatatgtaaagaaaggggagggaaggggcgggcgaggaaaatgtctaattgctgtggaagccattagctttcaggaagaaaaaaagctcgctgaaaaacccaagttgcaaactcaaaatgaaacagtccagcgccgcggatgacacccgggccgaataccgtgtacacccgcacacagtcggccccgaacaatcacctattggttttagtcacgttgggcttcccgacttaagcttttgagtcaccccggataaggacattcacttacattttaagacccccataagggaattactccaatttcacctaagccacctttgagcggatcaaagaaagttgcagcggggagaggcgagagaaggagggagggcgggaggtatttttaaagtataaatctaacccgacaggcaagggacagaggccgccggggctcccagcctctggacatcacttgatatagctctgcgagcaaggtctcttccaccccgactccgcacacccccccttctccggggaaaggcatccagagctctgggtctcccgaagtgggggcagcgggggcgaggaagaagcgggtggtcgtcccggggcccagcccaccccgaggagaatgcctgggtggcgagtcctcacgtctcgggagtgagccgagggccctctcgccccttccctctccccctccccctactccgtcttgctttacagagaaattccagcggggaggggggcagcgaatgggaggggcagagagggtcgcggccggatgcccccccttcccggcgccctctgcattcatggagacccgcaagttcgggcgcttcccgcgtggcaggctcgcctcttgaagttcccctgtccacttccccttccgattactgactgttcccgagcgtgaagctcgccatcgaatccaatccccggtggttttgcagactctcacacgtggggtggggcgtgagagggtgcggaggttggcaggaatgtctctaggaggcttggactggaaactgagttttcccttttggtcgccactccagccatgtgttaaaaccctaatgtcttgttaaaatgcactccacctagcacgcgggaaaacgcatgttgccttctaggcaaaagtgcacactttctttcagtgtagacttcggtttcaagaaaaagcgcaagagcctgtgctctggctttgaagtccaaactgatcaccgtggcgcgggggtggggggcggcgggagggggtagattgttggttcttccttatctccttttcacccttcacggaaaaaaaaatacatatatatatatcccatgtaggactggtgataaactttagcgaacgccagttttattggacttttattctttttccggccggctccccaccctctacgctagcgttttggagtttcggttggaaagtgtacaaagcctggaggtggagggtgcagcagggtgttgggtgtttataggcacttttctgcaggagcctgcagcactaagcacacatactcccaagcttacctggaggatgcctcccagccaggtgattccgcggtcggctcaaggcccgggagcagcgcgagttcgagtcccgccttctccgcgcaggggcgcctaggccaggtggggagcgggtagtgactgagttcaggctcagaaatgggagccactgccttcccctcggctcccccaaagagtggagctgtgtttgtgtttctccgtggagggatggacggtcaatcaaaaccgaaaacccgactggcaaaatgcgaggggacacataaatccgaggggacacataggaggcacatcaagaggaaggagggagtgcaggcaaagtagaaaaatgcggacaaggagaagaggaaaacgtcgggaagcggagagcacgggggagcagggtgggtggggacgggcagtgcgattgcaggtgttcactcgcttccgggaccctctggtcgcagccgcgcccgccggggcgctgggccgctgcgttctggaggggggcagagtccgccaggcctgtgcatccgcactcccttcggcgaatttcggcttggacggggctggattactgaggcggcagatgcgacaggcgtgagttaagaaggcgagcgcctgccgtctgtcacccacctagcatctcactcccctcccttcggaaaaaaaaaaaattaaaagacccgaacttccccctcttcctgtctgattcagcttaggacacgcctcacgcggccgaaaatagctctggaaatacatttgctttacaaaagtgaattttccaataagctttggggcggggggcgtccggcggtcggcgtcggggggtcctgcctcccgggaggagaaggaaccggccgcctccgcccttctccccctccaggcgcccccgggagggggccgctgggcggcggaatcgcgcctccgctcggggagccaccacgcggctttttcgcggaattttgacgtcatccacacgtgggggaaggggctgggagagcaagaggaagcggcgggggagggggccgcggctgggagagcgcggcggcggcgcggcgggtctggcaccctcgcggtgggcgcagcgccgggcagggtccgggccctgggcagcgcggcagaggaggccgtgccgcggaccccggagccagcgccgcgacccgcctccctccccgccccccgcccctcgc

SEQ ID NO: 5831 - DNA, 1439 bp, Homo sapiens
  source 1..1439: mol_type = unassigned DNA
cgcgggttcctccgccaagcgggacgccgcgccgggcgggtgagagaaagcccgggcaggagagcacagagccggcgactggacgcgagcgcggggcgggtggagagcgtctctccgggcgccgctgctgttgtcccgggtgctgaaaagccgggaacttcccgggaagcagcggcacttttctccctggaaggtgggtgtgggggttccagactgcgcacctgctaaaccctcctgggtcccccgggaggggtccgccagatgtgccccttcccagccccattcgggggagaaggatgggggcgggggcgtgggggtgagcacagccggacaccgcaagtgggaacctggggtgtccttccccgcagctcccgggcagccgcgcgccgcgaaccccggtccacctgcaagcaaggcgggccgggggcagagggcgccgggctgtgcgggggaaccggcccgcgtcccgggattggggggcggtggaagagagagcgagcgggcatgcgcagtggggcggaggaggtggcgatggccgggggaggcggggggactgctgtttatttgcagctgggccaactccgcggcgcaggcggcggcggagcgcggggagctcgcggcgggtccagctgccgcagcaccatgcccgagcccccctccgggcagacgccgcgcgccgccggggccccggtaggggaggatgccagacgcccgggagaggccagggcagcagcggcggcggcggcgcgatggtggtgaccacctctgcccgaggcggcggcggggaccgcacaccctcccggcggcggggctgcgggctagcgccggccggggccgcggcgctgctggccggggcaagctgcctgtgctacggccgctccctgcagggcgagttcgtgcacgacgacgtgtgggcgatcgtgaacaaccccgacgtgcggcccggcgccccgctccgctggggcatcttcaccaacgacttctggggcaagggcatggccgagaacaccagccacaagtcctaccggccgctctgcgtcctcaccttcaagtgagtccctcacctcgcgctagccgccgctgcctcctctaccctccgcccgtccctcggaccgggagaagttgcgggactgacttgggggcatttcatttttgccgccctttccctccacgcctccctcctctccaggatgtgcatggcactttgctccgggatccactgcccggctaatctgggctctcggggcggttcgggaggcgccggctggggagttgggatcgagtttctcaactgtctgccctctcagcgggcttctctctcgaggcagggctgggagcgggctggtgaaaccgcctccgcaccccttcgcctgccggatcgtgaccaagtgggactagcgcggacccagagggttccggaggggtggcggtggtggcga

SEQ ID NO: 5832 - DNA, 1288 bp, Homo sapiens
  source 1..1288: mol_type = unassigned DNA
cggagagggctcctcgggccaactctgggcaacgatgagcatccccggcctcggcaggggcgccgggccgcccgccctccctccctccctccctcgcgagtcccttcttcagaggacgcggggagccgggtctgcgcgctccgccgcctgtcacctagcgcccgcgccgggctgcgattggacgcgtcgccgccaggcacccgccagaaacaccagtgcgctggggagaggaggggggcgtgcttgcgagtcgagggcttgctttggcttttttacggctcccccctcccctcagcactccatgccgggtctctagttccagcgcgcctcggctcgctcgcgcggcgggagagttggcgcaaacctcgcggcagccgcagcctcctcgcgcgcctctccttcccctacgccctccgctcccgccatggggccaacgtggggctcctaagagttgccggctctcagcggcgcaatctccagccaaagtcaccgcgggcggactatggcttagggcgccagaggggttagaggtacgggaagaggaaaagacggctaactgggaaaaaaagagaaaacgaaagaaaagccaaacgatgagtttccacaaggaggacggagtgaacagtctgtgccagaaggctctgcacatcgtcaccgagctgtgcttcgccggccaggtggagtgggagaagtgctcgggcatcttccctcgggacaggggcagccagggcggaagcagcacaggtaaccgggagggctccgctcgcgtcctcgcgctccgctgggaccccgcgcgctaggctgcaagctccggggttctgcgcctcccgcgccgctcccgcggcatatttggggcgccacgctttcctacctcgctccttccttcgctcagctcctgacgacttcgagggtggggcgtttgggttttgtttcctcctgtccacctgccgggcttctcccattctctggtccgcttcccgcctcccggcgccgtctcccgctcccagcctcgccgcgcctctccgcgttctcccacgcctcccatctccctcccggagtggagaagtgagtgcgggcggtgacggcgccgggacggctcgcggcttggctgcttgtgggggcggctcacctgtgggactagggctgctctcgctcgttccaccggccgctggtcccggccttgttgatgggggccaggcgggacggacaagccatgcttggacgcagaactcccttgcagaggtggctgccttggcctccgaggtaacccgcggctgcaacctgtcgg

SEQ ID NO: 5833 - DNA, 1006 bp, Homo sapiens
  source 1..1006: mol_type = unassigned DNA
cgagtccgggtctccacgctttatttggcagggggcgcgcgggttccggagctgtccagcacctcctggccaagttctctgcgctctccgcgcccgggaagctctccgcgccggggaagctctccagcgccccgcccccggcagggaacctctccaccaggacacccggggcttcccaggctcgccatccgtccccaccagtctctacctactttgcccagctccacctcggcagtgcagcgtgttttggtggccttcctccgcacgccctggagggggagtgccctgcaccccggggctgctccggagcccagtgcacgagtgcacatgggcttccctcctttgcttaaagggcaggcgagcgctactcgctccagccttgcctcctgcagctgggtggtcttttttctctcctgtctttcaagacacgcgcccgaaatcgaggggtgagagcaaagaccgcccatcaacttagcaccttggatttagagctttcaatcccgaaaggaggttggcattgcccgggtcatcgagagagggagggagaagagctgaggctgcaacggctcctgggctccctagaccgggtttggcatccaggagaccgtgcgggagaccgacgctgagcgccggcctcgccctcggcggcccctccctcctccttaccccgcctcccccggcccgcccctccctccccggaggagcagtctctccgcgcgtctcccggagctttctccattgtctctgcctttacaacaggttcgggcggcggggaagacgggggggtgcggggccgccccagcccgggctttcttggggccgccccccttctaccgggtgtgcgagtctttggctgcttttattcggctcgggagctaattccccgacggagccgcgccggggcgagtccgacccctccctccgggccccctccgggccgcgctgccgcctcggccctgcgtgtgggaatgatgtgcgcattggagggtctaagttcttcacgcgc

SEQ ID NO: 5834 - DNA, 1185 bp, Homo sapiens
  source 1..1185: mol_type = unassigned DNA
cggagagccagggttcgcccaacaggagtacgcggagacaccccagacgacagcgcgtcccccccacccccaccccgccctccgggcgctccaggccagcgtccaccagaccccacgcctgggggactgcttgggctctagcgagagtgccacggctctgcacggcagcggggaggtggcgagcgcgcccgattcacgtcgcctccacgcccacctcctcccactacgagtcccctccccttgccacagcactacccttattgttggccgcgtctgtcactttgtggggctggtgacatgaatggatgggctggacacaccttccgtccgtccagaaaaaaacaaaaaacaaaaaaaaaacccgtccagatctgcatagagagggggaaagactcccccctgcgctcccagagcctacgctgtcggccagagaaactcacagcttccccctcccacactcactcctcccatcccttaaaaaaacgcccaacgcaaataaataatatcgttccaagtccgccgccgtcccgggtggcctttcctccctgcctggctccgcgcgctccagccctgcgggaggcggcggcgagaagctgcggctctgggtgcggtgcggggcgcccgggcgacaggcgggcgcaaggcgggcgcgcagcagaccggttggcgccgcactatgctccccagcgcggtcgcagcccacgccggtgcgtactgggacgttgtggcttcctccgcgctcctcaacctccccgctgcgcccggctttggcaacctgggcaagagtttcctgatcgagaatttgctgcgggtcgggggcgccccaacgcccaggctgcagccgcccgcgccccacgacccggcgaccgccctggccaccgcgggcgcgcagctccggcccctgcctgctagcccagttcccctaaagctgtgccccgcagccgaacaagttagccccgccggggcgccctacggaacgcggtgggcttttcaagtgctcagtccctctgcggacagtgcgaggctgccgggccgggctccgggggaccgagactgtaccttccagccttcagcgccaggtgagccagctctcccctccctccccagccgcgcccgcgcccccaggccgggtggtccagggatctgggagcgccggcggtgcgcactgcgcccagggagagccgg

SEQ ID NO: 5835 - DNA, 409 bp, Homo sapiens
  source 1..409: mol_type = unassigned DNA
cggctctggtttcacgcgggcagcgtcagctggtcggtgtcacggagttcccgcgtcctccgcccgctcagcccccgcggacccatccactggggttgctccgcagcgcgactctctctcatcccgggggagggctaagggcggcggtggggggcggggtgggggggaagcggcgggagggggcggtgcgccgccgccttaccccgggctcgcgaatccgcagcgtcctccgcagcatcttcccaggcccggccctctcctccccccgcgccgatggtacgcgccggctcgcctggcccggctgcagtggatgttgctagaacccacgcggaggaaggaagagacgcaggcaggctgcggttacccaagcggccacccgggcctcagggaccccttccccgagagacgg

SEQ ID NO: 5836 - DNA, 1813 bp, Homo sapiens
  source 1..1813: mol_type = unassigned DNA
cggggtcgctgcgtcttcctgaccactgacggccaggacggccccagccccgctttacctgcaagccccactccaggctcgagcccccgagggcagggatagcttcccgggtcccgaggcttgaccagagcctgaaagctcctgccgggggttgctccgactcagcgaggcgccaggctgcccggcgcggctgggggcgctcagcgccgggaccccagccctgccccggccgcccgctggcccagtgcgcacgctccggcagctcagctccccctcccacggcggcaggagagctcccggcatctgcccggggcgggggcgggggcggggcggggcgggcgccgcgccctcctgcctgactggcaggaagacagaccaatcggaggggctccccggggggaggggcggtgccgtgcctgagccgggcgcgggcgaccgagggagctgcagccacccgcgtgcggcacgcgccggccgcctgcccggatcgcggccaccagtgccgcggcctctcgactcccgccccgccgagccgcgcgcgcgactgccatcctcctcaattgctttttacgattttttttgtgcatgcattcattttctgttccgttttgtcctttttaaggcggtggcggcggcgacagcggcgtaagctcgcagcggggagggggcggccggaggatgcggcgcggggctgcgctcgctacgtccgctgctgctgcccggctcgggcctgagcgccgagcaggtgggtacaggtgcgccggggggcgggaggcgagcgctggccagagggaacccgtggacccggcgaccgaggggcggacctggcggcaagggacgcggcgaccggtgccgccccgccccatcgtccatctccccctcctccggccatcgcgccccctctgggtcccccttccactctcgcatcccacctcagtggtcccccacccttccatacccatcccccactcctcttcagacccccttgcaaaatctcccagccgctgcgtcgcttcccccaacaccccctcccggtcccgcccccagcccccagctctccttcacgccacccctatttccactcttctccggattccgccctcaagccaaggagcgggagggggacccacccggtgcctgccggagtggcgcggggggtgtggccggcccgtcccctccgtgtcttccgcagggtaggtcacagtcccccagatctccgcccaggtggcaaagaagatggagctgggggccgcgccccggcggcgcggggcccgaaggcgaggccgcccagcccgcaccccaccccacgcacggcacacgccgccgcggcccctgccacgcacaccctcgcgctgctccgcccacgtgggcgccggggaggaggctcgagagatgggaagaaaggctggcacccaccctcctgccgggccggcgcgccctgggcgcactggcctccggagatggcgcgcaaggattgactctcgtggtgccagacaccttgccgggcgccctgcgtcggggccagcggcctcgctggcctgcgtcagtgcgctgcggcctcgcctcccagcccctcggtccttcgctccatcccccctgctgtgggctcctgagcatccggcctgggcagcccagatagaggccgcttacgaggctggcgcttcttttcgccttagaagcatcccgctcccacacaccccagctcgccggtctcctgaaggctgggccagcctcggctctccgccagcctctgcccggctctctgagctccagcgatactgtatctaaccgccagccctcctccgccgcccgc

SEQ ID NO: 5837 - DNA, 1294 bp, Homo sapiens
  source 1..1294: mol_type = unassigned DNA
cggctggagaagctctcgctagcgctgcctgtggccagacccgcctcttgtcccctttcgggcgcacacacacgtccacccagacactccgcgcgctccctcgcgcttttgcttgcccgcccgccgccgcctgctttttccctcctgctttcgccggtcgccttctccttctttttttttttttttttttttttttttttttttttttttttttggtaccatagagttgctctgaaaacagaagatagagggagtctcggagctcgccatctccagcgatctctacattgggaaaaaacatggagtcagctccggcagcccccgaccccgccgccagcgagccaggcagcagcggcgcggacgcggccgccggctccagggagaccccgctgaaccaggaatccgcccgcaagagcgagccgcctgccccggtgcgcagacagagctattccagcaccagcagaggtaggaggctggagaggggctggggagggggcggcgggagcccgggcgcggagcggggggcggccgggagcgggcgcccggggcgcggggtccggcggccgcgcgcgagcctgcggcggcgccccgagcccggaggacccccctcccctcccccctccgccccccagaaatgttgcaaacttttgcagcccgttctcggcttgcgggagcagagtggggcgggggaggcggcgggaaggttgacagccggcgggctcacccccctggctttgatttttctgcaaacactggaggaaagctgcgttgcctcaattaaatacgctcccccaaaatacggagatgcggggagtgggggcccgggaaagaaacttttaaagcggcagtgtccttttaagaaggggcaaaaaaatctgtttatggccaccctccttccgctttaccttttctcctcttgacagtttcggccctggctgcccgagtcgggggtgtgttttcggtccctctcagatctgggcggggggcgggaggagtgagcgacctgggaagtcccgggggtggagagggggcgctccggggtctgggggcgacgtggacaccttctttggagcacggcggtgcgtttgggatttgaaggaagggccgaaggaagcggggtgcgggcgggcgagctgttcgccaagttgtctggcgggcgcggcgaggggagatgcgcaagtttgcagaccgggggttcggagcccggcgcccaggctggcggggggcgtgtgcgcgccaacgcgcagagggcggcggtcctgtggggcgctccacgcgcatccggagggagcgt

SEQ ID NO: 5838 - DNA, 939 bp, Homo sapiens
  source 1..939: mol_type = unassigned DNA
cgccgcaaggttatgggccgaagtggtgcaggggcggcgcccggggaagcgactggcagagctgtgcgcactgggggtgctgcaggcgctggggagagtgtggagaggctgcgtggagctgcgcgctcggggtgggggctgcactcccaatgaagcgcgtgaagggcaagcggtgatgggttctgcgccagtggggctgggagcccgtccggggctgtacatggggctgcgcgcaaggtgaggactgcgcatgtgggcttggggcctgcgcgcaccggaggctgcaggcgctggggagggtgtggggggctgtgcgtggggctgccctcaccggaagctgcacgctctgggaagcgcagaggcgggggtgctgctcgcgctggggagcacgtgaggggacactcagggactgcccgcgcgaatggcttccaacgcatgcgccccaccccacatttcacagtcgccatgacgaccgggaggtccgcaacggctgcggggacaagtccgttgaggctgccaggcgagtcaggtctctctggacctcgcctgactcggctgggctgtgcctgaaattgacccagctccaccatactccttgattatgagaaaacaaggagtaagctcaaagcggctgcaatcttccggccgcagccagtctaaggggcggcgcggggcctccctcgcccgggagccggaggtagaggaggagatggaaaagtcggccctaggcggcgggaaactgccaaggggctcctggaggtcctccccggggaggatccaaagtctgaaagagcgaaaaggcttggagctagaggtggtggccaagacctttcttctcggccccttccagttcgtccgtaattccctggcgcagctccgggaaaaggtgcaggaactgcaggcgcggcggttctccagcagaaccactctcggcatcgg

SEQ ID NO: 5839 - DNA, 939 bp, Homo sapiens; identical to SEQ ID NO: 5838
  source 1..939: mol_type = unassigned DNA

SEQ ID NO: 5840 - DNA, 899 bp, Homo sapiens
  source 1..899: mol_type = unassigned DNA
cggcctctgagggcccgggcagccacccgcacttccccgccacgcggagaaagccgagcacacaggccgcagggtgggggtccgcggggagagggtggaagcagcgggttctccgcgcctggggtggccgctgccccacccaggcccccgtctgccctctacccttccagaccaatcgctccctgcaggtgccaacgcggtgccccgcaccaggtggcacgcggactttccccagagctccccggcctagacggagtcaggctaaggcagaagcgcgggcagccccggcgctactttacagcgccccatctgcagccctggggtcctcacccggctccagggtgcacagcagccggggcgcggtccgggaaatgcagctgcgcttcttgagcacattgctcaggatggtgcccacgccgccgccctgccgcttcaggcatctccccccgcgcctcagagacccggtcagcttgtcctgccgcatccgagagcgccccgggctctggcacggctaccgtccgtctcggtccccgctaccccactcgctgagcggctgagctcgcggagctgggtgagtgtctgcggctgaccggcccgtgggagcagggagcgcacagccggctggtgctggagggtcacggggacttacggggcaccgcgggagccgccgagcgcagggaagccagcaggcatctgcagtgcggagcctgcaaggctgaggcaggagatcgctcgaggcggggagggcgggagcgagcgagcgagcgagcgcgtgggagacggaggcggcgtgcccgcccccaatcccggcaccgccgtgcgcaggcggggccgccccagctcccccgtgcccagaagcgccagagacagggagccagtgggcgcgtaactgcgttcgg

SEQ ID NO: 5841 - DNA, 899 bp, Homo sapiens; identical to SEQ ID NO: 5840
  source 1..899: mol_type = unassigned DNA

SEQ ID NO: 5842 - DNA, 547 bp, Homo sapiens
  source 1..547: mol_type = unassigned DNA
cggcgccttggcgaactcggccactccagttcctcacgtggtgagcactcagggcagcgggtcgattttccgaggtcccatacctgggtttgaggggcgcggctcgcagcggcgggtgcaggggcgactgccagccctcaccccgcctcggggtgcgttcggaggccgacacctggaggacgcctccagtccccgcgggacgccacgcctgcgcgccagggatccgggataagaagtgcgcgccgggctccggctgcgcgccgcggggccaccagtttgcgcgcagggctcaggcgaccgtgcggccatggacacgccacggggcatcggcaccttcgtggtgtgggactacgtggtgttcgcgggcatgctggtcatctcggccgccatcggcatctactacgccttcgctgggggcggccagcagacctccaaggacttcctgatgggcggccgcagaatgaccgcagtgcccgtggcgctgtccctcaccgctagcttcatgtcagccgtcactgtcctgggcaccccctccgaggtctaccgt

SEQ ID NO: 5843 - DNA, 2505 bp, Homo sapiens
  source 1..2505: mol_type = unassigned DNA
cgccccgccccgcaccgggggcggaacctcgcgctcccggacctgggacagcaccagcagcgtgaaatacgcgcacccgagtgcaggagcaaacaggcaacctcttgttctggctacctccagcccggccgcctcctcagcggcttgggacagcagcgcgtggctgggaagacgcgggagggggacgcgaggcaaacttgcgccaagagttggccaggttaggtgagagggagtggcacccgcgcagacacttaccgctggcgttcttcccgcagatcaggtgctggtagggctgcaggagaccccagatctccgagtcgttgttgaccgtgtgctccagggtctccacggtgaacttgggcgcctcgtggagcgcatggtggtggtgatggtggtggttggcggcggctgccggcgggactgcggcggccgcggcggccggcggggcgcaacagctgctgcccccgctggcgctgctggctgcgctgcaggcgccgccgctcgccgctcctcccccgggcgcctcccgctctttatccgccgcgggggccgcaccagggcccgagctcgggcctgggccggagcccgagcctgacccagggccactgcagctccggggcaccccggaggccacgacccgcgagtagatgtcccggaagaggctctccatgcaggctgtcaggtagatggcggcgtgctcgtggatgcgcagcgccacgcggctgtccaccatccagcgatacacgcggcccacggagaaggtgaggccgcagcgggccgacttgccgcggcccaggcggtcgccgccggcgctgctcatgttgtagagggacagtgcggccagcgcagccgccgtacagtgcgcggccaggccccaggacagcacgatctccatggcgctctggatctcgtacttggtgcacttggcgaagcgcaggctcaggcgctgcgcctctttggctatgcgcaccagcgcccggctcaccagcgtcgacagcttggccagcgcgtccttgggcaggccgccggggaccgccgggcctgcccggggatcccgcgaacgcagcagcagcgcctccagctcctggagagtccaggggacctcgtctaggtccggcagcagccgcgagcagtgctggccggcgcagtccagcccctcggagtcttccaccagggcagtgttgacagtgtcaaagctgttgtgccggctgtgcatggagtcagctagaggcggccagcagctcccgccatacggggacgccgggtgcgagtcggaacagcacaaagacaagttggaggagcgcaccgagtccgccgcgccaccataacccgagtccagcgtcagatcctccagcgttctcaccacgggcttcttacctctcctggccatcgctgcgccacttcatgctgcagccgcctgggagccaaagggaaggagcggcgaggagcagcgagtgccgcggggcgcggggagagccgagtccgcgccgccttggctcacttttccactagccgctgctaccaactgttagtactttcggctgcctcccggaactgccgccgctggaatatacagagcagaccctggagtcatcttccagagtccgggccggagctgggcgcaatggggagcgagccaggccgggaaggaagctcccgccggggcttgcccctttcttccaaaataaaaagtgtctagaccgctcttccctgagccccgctgggcgcagtagccaccgggcgccggccacggtgttcgtgggactgagaccaccccagatgccgccgccgccgcagctccgcgggcagctggctcccggctcccggctcccagttcccggccctggttcgctcggcgccagcctgccctgcaccggagcgcagcagcggccgtggcggctgcaaaccttgccgaaccccagcaaaccccgggcagccagtgggacgggcgtatgcaaagcaggggcggcggagagccagtggaatcggagaatgctaattacctcgctttttttttttttttttaaatccctcctccccatgcggccccgcccctcacacacgcccccggcggacaccgaggctgcaggaagtggggagcagtggccagggacttggggaacccttgcaagcgtagagacgtggatgctgccccctgctgctgtccctgcccgcattctcccggagggtggtgggttgggccggtgacctccccacctaggtgtgctctccaccgcggttcacaaggtgtctgcctgacggtcgctctctcccctgcggttcgcatttcacttttttccccccgtaacacctgaaacatggttttcctccctctctattcccacttcgggtacgcaaaccaattagtgcggccctctttcagccggggtttgctccagcatggagggaaataagcctgtcgagcggaggcccgtggcggtggacaccactgggaggccggatctccggccattcgccacctgccactagggcgcgttaactcga

SEQ ID NO: 5844 - DNA, 1587 bp, Homo sapiens
  source 1..1587: mol_type = unassigned DNA
cgaggagtggggcgttcggaaggacggggactgggaagcggccaggacggggagaaggcgcgggtgctggaaccacttatcagaagaaacttaacgagatttgccggcggattaaaaaaaaaaaaaaaagtgggtccctttttatctccagactgatgatctcgcgtcttccgcgaatgtcacggtcaaggcaggatgctctaaccgccctgttatccgcaccattttcccgcccctgatccccgccgcacccgccgagactttgcgagactccaaggctggggggccttgccaggcgcgtccggggcactccgggaaagaacagaggccggagccgcgcctccacggtgcgttctctgagattccacctcccagccccggctcctacggggtccgcagagaacacctccaaatctaggggaggcacacagactcccacaaagggaggatggggagaaagtgatggggtttcgaagagtcgccctagggaaggagagagaaagagcagggaagagaggaaagaaacagaagaaaagcagagacgggagagaggagacgaggggagcagcggggagaaacgcaggaggcagaacaagcaaggaaatctctcatttaaaagttcccttgggcccgagggctgggagtcacctgctctgcgccgctcccggctctccaccgccctggaggcaggagcgcaaacttgcgagcgcccgggcccacctccaccgcccgtctgcatctagacttgggaaggggatggaaggggcgggggggtaaaggcaagaagcaagacgaaccccaagaccccggcccgaggagaagaggtctgccggcgcttgcggccagtccggcggcggcggctctggcggcggcggcggcggcccccgggtggcggcgcgtccgggctgcgcagccaggcgggcggcgaaggctgaggtgccggcgagcggcggggcgcggagccgcctcctcgccaaccccggctccctcctcctctctcctcctcctcctcctctcctcctcctcctccctgcccgccagctccctccctccctcgccggagccccagccgggtgcggactggcaagcggcgcgctccgcggcctccccgggcgccgcgaagttgggaggcgcgcaaagtgcggctcaggggggaccgccgggggttcccgccagcagccccctgcccgaggccgtagcccctgccttccccgctcctcgcccggccgcctggccgctcggccgctccgccgaccgagggctcactagcgcttctccatggtcgcggcagctaatcgatgactgaaccgaacaaagagcagcggcgagatcaattcctaatacctatcgatgggcagcgggcggccgagccccggcgagccccggcagccgccgcccgccgccccagggcgtccgcctgcccgcccggggacctccccaatgcgcccagggcgcgcccgggggctcctcacggccgcgcggccggcgctgcccgcactaacctggagtcgccgtagatcaaatcgcttccaatattgaaacatcgatcccacattggcggccatcttgggggctatcgagacgcgc

SEQ ID NO: 5845 - DNA, 5693 bp, Homo sapiens
  source 1..5693: mol_type = unassigned DNA
cgcgcggagagggcttaagagcgcccctccaaaggcccagccccgcctggagagagtgggcgggcaccgggtccctgggggaggggctgtcgcaggtttgggagggaatccagcggggctggccgtagcctgggcaggccgtagcttgggccggcgggaacccgccactggactgaagaggcgtctggccgtcgctgacgccgctgtccccttcccgatccgtccgcccgcagtgtcatcctgtacggaccgcagtttgtccccggacctccaggacgcactgcaggacgaccccaaagagacggacaactcgacctcgtcggacaaggagacggccaacaacgagaacgaggagcagaactcgggcaccaagcggcgcggcccccgcaccaccatcaaggccaagcagctggagacgctcaaggctgccttcgccgccacgcccaagcccacgcgccacatccgcgagcagctggcgcaggagaccggcctcaacatgcgcgtcatccaggtgcggcccggggcgggcacagctccttagccccgctggcctgggagccgggagcctcggaggagtctcccgccaagcttccttggctacgagcgcgcctggttctggtctgggagcagaccgtgcgcccgagtggggcacttgcccgaggtcggggactgtgaaccgaaagattccatctagccctgctgtcctcctggtattgcgatttgggggcgggtcactttacctctctgaattccgccccccgccttgcttatggaaggttgtaagcctctctggggtccgggatccctctttacctccacctttcgagcagagaaacaggcgatgccccctccctccctgcgccgaagcgcgggcagacaaacggccagaggctggctccggagccgaggggccgaggcgagagccgtgccgggagggaggcctttatagagccgtcaggccgcgggcgagccggggaccaggaagcccaagtctttatgagtcgccccacgggtccgcgaaatccttcacccttggctggttcgccgaagcctctctccacccctcccggcctaatccggcccggccccgcctcgggggagtcctggtgcggaagaggcgcaaggacccagcaggggcagcccagtcagggaagggagaagagggggggagaggacactcctgatcctgggttcacagccccctcctctgtcccaggtgtggtttcagaaccgacggtccaaagaacgccggatgaaacagctgagcgccctaggcgcccggaggcacgccttcttccggagtccgcggcgcatgcgtccgctgggcggccgcttggacgagtctgagatgttggggtccaccccgtacacctactacggaggtaaggggcgccccgggattcgctgttccgcacctgtcctattccgggagctgagggcgaagggtcccggccagcacgctttccgccgctccagaacatcgcccactcgctggacacacgatcacagacacatgtacactcacccacatgtcctggacacaaaatcagatacatggtctcacccatacagtgatgcacacagaagcacacacgagatacagtgacacattcacccacgcagggcacaaggtgcactcacacttgcgttcagagactccagggacacacgtctagacacgatcgcacgatcacgtataggtaaattccaccctctcacacacaggtacactcacggagacacaactccacagacgcgcacactcccaccagtcacactgaggccagtactggcaaatccacatgcatgcggcccccacggacagacgcacagccttcctgccgccctgtgcctggtgtacttggcatgaggtggattccgagcgctggagggtagtgtgaggggaggggatgggggtctggattcattccaagccgcctgctcactagcatcgaaggcagcaactcctgttccatgtggcggggtgtgtgcgcacagcatctggcagtgttagcccaaatgccggcagttgctctgggcaggactgtagtccaccctccagccccgagacccctggggttcctacagactgggggcacaagtgttgggccaaccccagatttccaccgtctttggggctgcagagagcgaggagccccagtttacaaagggcttcagatggtggtaccaggcttgggcctggggtgagctgtccccttgccacctcagcttttcctcctctcacttccctcacactggattggtgagccatcccaactccccctatccgattttttcagctccttaccctgagccgcattgcttgagctcaccaagctcactgtcctgttcttcccagggctgagggctcaagaaagcacctctcctcttctattctgaagcttctgaatttggagagaccccaggactgtctatgtctgagaggcatctgcacttctgagttgtaacgcaggttaggaagaggcaatttctcttagaaagtgggttcagtggcagtgttagcaaggcaggagctaggcacccaggtagacgcagaagggaagggaagataaccccatcactaacctcagcacatccggaagcctgaggggggattagaccttgagaccggaccggggcccctagaaattgtgggcaaaatgccaggctgtgcttttcagggcagagaccccaggcagtggcagggctcaggctggagcgccccagccgcccaaccctggacagccccccaaccctggacagacccccaaccccggacagacccccaaccctggagagcccggatggtgggcgtgtcttccggagtctccactcaccgactctctccacctaaatttgcctctttccctacaaaatctgggcccggagcagcgaggtagtgggggcggtaccggcccggaatttttccccgcctggataattaaccaaggtttccccgaggaccacttcgcccccgccccgacctatcccaccgcctcctctccctgcgcgctggatgaggtggggagctggatactgggggcccctcgttccccgtaatggtggggaagactccccagcccccagcgaggcagccccgcctaatccgcgctgggagatcccggcggtggcgaccggcagcgggcgagaaaggggccgggcggcggggccggcggctccccgtgggagcgcggacaaagccccagctgcggcttttgtgcccttttcagacggcgtttgttccaattacctccggcccggccgccatatgggcggaggcggcgcgcacggcgcgggggcagcggccttcgctggttttccggctcgccgcgggccgcggccgtctcccatccctgtccctttggggctccaaatttgccgctccccatcttccccttcactttcggggagaattaaattaatggttttaaaaagtaattggcaaccgttttagctgttgcttaaactgcctccaagccacgcctccagacaccccccatttggacagatttcagggtttggagagggaagagggtggcagggggcatcaggaattcgccccttgactgagatcccaggactcagcagggggagtggatttgcagaagagactcaggcttctggactcgctggttttcccgccgtacaaagcgggtgcctggtacaaggtggtcctttcgtgacgtcccccacgtcagtccttcagggccccacctggtgggggaaggcaggatatcccgaaggttctggaaaaggggctatgtggggcggtcagagagttgatacagatttgttgaggcagaatgggtttgcaatccggagtccctacacctcctgaatttatgggcaaaattctcatccttgcattttccttgagagagagcccatagctatcaccagcttctcaaaagatctcaatgtcctcagatgcttcagaacctgggggtgctggcaaaaccaacccggggcaaggctggaggaccgagcttctaccccaaggagcccgcggagctctggccatgacccagagaatcttcgtgtcctcctccccctctcccaagtcgctggagctcagttttctctttctcaggctaggctaggccggtacaaatggtctcaccgggatcgacgcggcggccgtacttggcgaggcgaaggacttggactgggttggtagggcgcagggaccgagtttagggcgccaaggccgccccgcccggcccaacccaccagtcgctcctgccgcggcccggatccagtttcccccggccaggtcgcttcccggtctcaaccatttcgcgctctgctctgtccgctggtttgtccctgcccggttcctctccccgggcctgtcagcctccgcttctctggaggttcctgggactcatctctgatccaccgtcttgcgttctctgggcgcatcgacttctctccatcttcgggctcactcctgactccctcgctgccgcccccgggggtttccacgcgtgtctctaaccgcggccgtctttcctctctctgcgtctcctcgactcctccgcgaccctccgatgtctcgggctttcgggtctcagccgcggactccgcgtctctgggtctcttttccgcctttctctctgcccctctgccgatctctccgtctgtctctcgctgtcccgcatctctgtgtctctcaccgaccctaagacacttaggaatcattgtctgtctctgcgtctctggccgcctctgtctctctccatctctaggtgtcagggaacctgtgactgaagtctccgagtttttgccgcgtgtgtcccccacggtctcggagtctctcccgtctctgtgtgtggtctctggcagtctgagtctcttgccctttcgagatctctcattgtctctctccccaaccctccccgtgagcctgcgacgtccaccgtctcaaggggcgccggcctccgcaggtctctctaaccttgggtcggtgtcgcgcgctcccctctctcgcccgcccgggtcccctccccgggtcccgggtcccccgcctacttcgccttctctcaccgcgccctgtctccttcccgctccccctccgcagactaccaaggcgactactacgcgccgggaagcaactacgacttcttcgcgcacggcccgccttcgcaggcgcagtccccggccgactccagcttcctggcggcctctggccccggctcgacgccgctgggagcgctggaaccgccgctcgccggcccgcacgccgcggacaaccccaggttcaccgacatgatctcgcacccggacacaccgagccccgagccaggcctgccgggcacgctgcaccccatgcccggcgaggtattcagcggcgggcccagcccgcccttcccaatgagcggcaccagcggctacagcggacccctgtcgcatcccaaccccgagctcaacgaagccgccgtgtggtaaggccgccgggccgccccccgcgctcggcccccgggggccccgccccgaagcagcctcctgaaaccaaaacgcccgacgcagacgcggtgggagacgtgggtgtccctcgggggttctctctcgggtccgcactcaactggcagctgctcctcggctgggcgccgagggggggccgacccccatctccaccccgcgggctctccaggagcctcagcccaccgccagtactctcccagcaaccgcga

SEQ ID NO: 5846 - DNA, 589 bp, Homo sapiens
  source 1..589: mol_type = unassigned DNA
cgccgcggaggctccagcggtaggtgcgccctagtaggcagcagtagccgctattctgggtaagcagtaaaccccgcataaaccccggagccaccatgcctgctcccccgcctcaccgccggcttccctgctaggagcagcagaggatgtggtgaatgcaccggcttcaccgaacgaggtaaccgtcccggcagatggcccgggaggctcaggagggagctcgtcggccgagtcggctggggcggcgggaatggcggattccagcccggctttgcattctgcagagcacagcttgcagagattttgcgcggctcggagctccccggcaaatggagtctgggaggccgccgcggctggcggagcggcattgaggtttgcagaagcacggcctggttctgtcaaaccgcatcttgttcgcctccgccagcccagagctccccgggaccctggcgagggcgcggggtaggattctccccgcggccggcagtgaatgggagcgcgtgtaggggcgccagccctgctttcttttgttgtgagtaggcagcggggctccagtcgccgcctccctgaagccccgagaacgaggcga

SEQ ID NO: 5847 - DNA, 1294 bp, Homo sapiens; identical to SEQ ID NO: 5837
  source 1..1294: mol_type = unassigned DNA

SEQ ID NO: 5848 - DNA, 1373 bp, Homo sapiens
  source 1..1373: mol_type = unassigned DNA
cgaccctcgctgagctcacggctcagtccctacatatttatgccgcgtttccagccgctgggtgaggagctacttagcgccgcggctcctccgaggggcggccgggcagcgagcagcggccgagcggacggggtgagccaggggcgcgcgcggggcgcccagcactgcgccggggaagcccgcagcctccgtcccgaacttgggttcgctgaggctgagggaggggacgcaaggggagggaagaagagaagggaggagtgggggctaggggagagggggtggggagggatcttggaggcacaaagcggaggggaaggggagggacgcgcgcggctcctaccaggaggcgagtgggtgcaaccggcgccctccagccgcgcggggcggcggactcggaggattcagaacccggagcgcggcggccgcgggcgcccgggaggaagaggaggagtacgaggcgggcgggcgggtgcgcagcgcgaagaggcagcctcggcgctgcccggctcggcgtcaggtgagttcctgatccaggcgtcccgcgccccttctccgtccccagggctccccgctcccgcccgagcccctggtgtgcgcggaaggctcgggctttgctgcgcgtcccaacttggttcgggcggcctcattttcctcctagcgggcggcctcaggccgggggctccggtccgggggtctacgcgcccaggctccaactttgcaagaccctagtcgttcctcagccgcgcgcttggctccgagctgtgcgctggcggtaatggcggagcccttggcacagctcgctaccctcccgcgggcagcccgggctgggggatgccagtccctggggaccgttgtacctgcccaagctcaactttacgccttcctcggtgcccgactctgcggccgaatcgcaactgcgagccgcaggtaatggcggagtctttggcactgccagctgtccgcggctgggggcccgaggctgggagggctccgctcccggaacatcgctccggcctggcctccaactttgcgaggagcctccttgcgctctcctcccgcggtcatggcggggccgcccgcacctctcacttcttccgtctgggcgagattggggtgtaagagcgccgtctccaaaacctgggaaagttgtgcttctcccgcaaaggaggctctagggaggccgaggggcgcgttccgccacggttcggggctgggcagtggaaggagcgctcgatgaggttgcttccaggtggccagggttcggagcagggtccccgggggatccaacttccagggccactcaggggccttgcgtccgaggtcccggaaggggctctctcgggactgcgccccagaggacgccagacgctcgc

SEQ ID NO: 5849 - DNA, 1524 bp, Homo sapiens
  source 1..1524: mol_type = unassigned DNA
cggggaaaggcgtggaggggggctgagcgggctcggggttcgcccggaatctggggggctgaggggccgggcgctgggcggtggagggaggaggcagggggatgcggggagtggtgggggagtctccttaggaagtgagtgtgcgcgcgcgcttgtggggagatgaggcagctgctggtgcgttttggggtctccgatccgagctttgtggcgggccgtctgcctctcccccttccaagccccgattctcctccccccacctcctcttcttgcactggcgggcgggcggcgggggcggctggggtctcagcccttccatttcagctttccagcttccccggtagctcgggggcggctccagctttagaaatgccgccggcccccggttccggcttcccggctctgccgccgcggccgctggggctgctgttaccgccgagccgggcgccgcagcggctcctcctggggcctacatttgccccgccagcccgtgtccggagcccccttcgcgggttacataaccaggctcccggccgagtgggcgaagcccagcacatttcgggggcggggggcaggggagggtccccagatgtcccttcagtgcttccgaagacaccggaggggagtaccccgcgtagagcgcagctggaccctcggggtgcgggcccctctccttgtcctgcttttcagcatctttggcaattgcgcaaagttgcttgggttgcaatggtggggtgcagggggcgctcggctgctgcacctgttagtgctgggcccaggttgagaggcgacctccagcccccacaataatgtcccgggctctctggtttgggtcctcgcagcgcccgattgaccgccagcgatacgacgagaacgaggacttgtcggacgtggaggagatcgtcagcgtccgcggcttcagcctggaggagaagcttcgcagccagctgtaccagggggacttcgtgcacgccatggagggcaaaggtgaggcgcccccaccccgggccgccctctgcgctgcgggccgagcgcacgtggggagggagctgccggtggctgggttcgtatttcgcgcccgcgtcccccattccaggggatccggtgacgaaacgaggccgagcactgggggggtggggtggggtggtgagggaggagggcaggcagtaaggggggccgggcatgggcctaggcccggcccgcgcccaccaccagccccagggtgggcagagccagggggccggcggacagagggacctggagatggacaggcggaccgagggagggcgggagcgccgcgtcctccccctccccgagccggtcgcgctccctgcgctgcctgaggtgccgccgcctggctggaactgggttcagggcgcccctggggcatcggggtaaggccccccaggcccgaagccttcccaatcccgttcccgcttggggcctgccagtgaggaactggtgatgggggcgcgtcgggtgtttgggacgatgcccccttaggcctggggtccgcagagccgc

SEQ ID NO: 5850 - DNA, 1009 bp, Homo sapiens
  source 1..1009: mol_type = unassigned DNA
cgaagtggcgggccgtggctattctctttacctgctgtacttcttggagtcccggggcgcaaacagccgctgcatttcccttcattcccgacgggatgacaccacagtcttctccccagacagcgcgggcctctgctccgtccttcctcagcgaccgcagcgacgactctgctccagggcgggggagcagcttcccaagccgcgggcgcccacttccccgcccggactccgggcggtgctggccggggcgcgcggggaggcggggaccagggaccccccaggaactagcctgggctgctgcaccgctgccagggccgtcctgcgcctagccgagcccagggcgccgccggctggacgcccgtcaactcccactgcgcccggcccccgagcgcgcccggctggatccggcgcgcccctccgccccaggcgccgccaagtcccagcactatgcgcccctccagatgtccgaaagcgcctctccagggcagcctatgtccctctgtgtccttcccgcgacgggccgggcccaccactccacacctcccgggtccttccatgtccatcaccgtgtgcctctccagcatcccccctcccctccaagttccaacatagcactccttcacatattccccgcgtcgcttcagaggttcctccagccactgccccgcccctccacttttccagtttctccagttctatcgaggcgcgcccctccagcacgtccccacccctccactccctccccgcgtccctgcactccctccccgcacccctgcactcccactccgagcccctctgtgaccaaacaccgcgcctttccaagcgctcctccttcgcgccgccccaagattcccctccataccctgcactccttccgcacccacccacgcacccctgcgcgcctccacccggcggcctctccaccctcagactcgcccccgcgatccagcgcgcggggcactgggcagggacatttctcgctcccacgcgagtccttcgctgcagacgc

SEQ ID NO: 5851 - DNA, 961 bp, Homo sapiens
  source 1..961: mol_type = unassigned DNA
cgtcgccgctgtgagcgcgcgaggacccggggctccaagtggtgagaatcactcgagggacccttcggatgcctttttccccctctgcttttgagctctgcagcacagcggtgccggccgccggcagggaaggctgcatcttctctgcgccgccaaaccgtgcccaccatcgcggtgactgccgcctaggtcgcatccctgagccgcatccgcgcgtaggggcgcacgggcacgcgcacagggaggccgcacacacacacacacatctgtacagggacgagccgggggtctctgacgcccgccgctcacctcgccccggcctggagccttttggccccgcaggtgcagcgacgcccagcccccgtgcggccagcgcgccgcgtcggcggatcctgcagcccagagagcccagggagcccagggaggggagcggggcgcgggcggggcagtgtcgcataaccgcaggcgcgccccgcgccgcccccgccccgggcccaccctccctcgccgcgcccctcccagctcacccacggacgagcggatcctcgacctccgcggcagggacatcttaagagctttgtccaggcctgcgccgttcagcatctcgcccgtgtcgggggctcggcggccccgggcgagagacggaggctacgcgcagggctgggcgcaggggccgccgcccgaggaccatgggtgggccagcgcctcgccgggctgctagctggcggggaccgccggcgcctgtgccgggccgcgcccgaggctgcgccgtccgtgccgcagcggccaatgcggcagcatccgcgaacgccaccgcggcgggccccgctggcccgggctgcggcgtgggggcgggggaccggccctgagcggagccccgcgggaggaggagcggacgggaggctgggagggatccgcaatattacgcaggaccggggcttttaggtgtcggggaaggcga

SEQ ID NO: 5852 - DNA, 961 bp, Homo sapiens; identical to SEQ ID NO: 5851
  source 1..961: mol_type = unassigned DNA

SEQ ID NO: 5853 - DNA, 980 bp, Homo sapiens
  source 1..980: mol_type = unassigned DNA
cgctcccctgccccgcccggtgcaagcccggggccgccggctggggtggggcgcgcagcgcggcaggcaggcagggctaccatgcagttctcagcctcctggctccttcgcccctcgccccgcgcccctgggccgccctcgcctgcccgcaccctagagcagccctgacccgtgggggcgcgcggcctcgcggggatcccgcgggcgggcgggcggccgggcgcgcgcggggcgggggcggcgcgcgcgcggggagcgtgtgggccgggcgggcgcggcggggaaagctgggcgcgcgagccgaggctgctgctcacctgcagccgcgccgctcacctgccgcggagtgcgcgccccgcgccctcccggcccgctccggagcccggccgccccccccttgccacagcgggcaactgcgccgacatgcgacacgagtagcccacgcgcttcggaagcaccggaggagccccctcggcctgggcgagccaaggtgaccccctcgatgacccccccgcccccgcgggccgcctgtccccgcaccctgtctgtccccctcgcgtccgactcccgtccccgccgccagggaatcggcagcagtgcatgggcatctgtctgtctgtctgtctcggtacttccattgcacacacctccctctcgtggccctcccgactgccccgtgcgcacggggggagtctggagcccctctttgttccggtcgggggtgcgtttgaggatgtgcacgcgcgcgggggatgcgtttggagggtgggagttcgatggaaataggcgatttaaatattccatcgaggatggcggcccctggctcgagacctgccgctgccgcgtggttttctcggcagcagcccagatgtcaaacagttgttcgttttcagcatgcaagatgtgattttccaatgtgcattcccagcgctgttgcaaacagaccgccgcgagtccgtgtgtgcctgcctcgctcacgc

SEQ ID NO: 5854 - DNA, 408 bp, Homo sapiens
  source 1..408: mol_type = unassigned DNA
cgcggcgcctcttccgaaacacctgagcataagcagccgcaagggcgagcgcaggacgcggggcgtggacgccgggctgggaagagccccgaccaaacccgcgggtggctctgactctccccttcgggaggagctctgcgcagaggccgtggctcgcgcgggcaagtcacctgtggcagcctggcagggcagttctctccggcaaatagcgacatgctctcggtttctgtcggccttggcctggcagagccgctttccgctttctggcctctggtgcgcccgaggcgggagaggagccccggccgcgtggaccctagcttgcgcggcaatcatcgcgccttgactctaggcccggctgctcagggaaggacagcccagggcgcgcccagcgagcttcagggggtacgg

SEQ ID NO: 5855 - DNA, 2190 bp, Homo sapiens
  source 1..2190: mol_type = unassigned DNA
cgggtgcatcaatgcggccgaaaaagacacggacacgctcccctgggacctgagctggttcgcagtcttcccaaaggtgccaagcaagcgtcagttcccctcaggcgctccaggttcagtgccttgtgccgagggtctccggtgccttcctagacttctcgggacagtctgaaggggtcaggagcggcgggacagcgcgggaagagcaggcaaggggagacagccggactgcgcctcagtcctccgtgccaagaacaccgtcgcggaggcgcggccagcttcccttggatcggactttccgcccctagggccaggcggcggagcttcagccttgtcccttccccagtttcgggcggcccccagagctgagtaagccgggtggagggagtctgcaaggatttcctgagcgcgatgggcaggaggaggggcaagggcaagagggcgcggagcaaagaccctgaacctgccggggccgcgctcccgggcccgcgtcgccagcacctccccacgcgcgctcggccccgggccacccgccctcgtcggcccccgcccctctccgtagccgcagggaagcgagcctgggaggaagaagagggtaggtggggaggcggatgaggggtgggggaccccttgacgtcaccagaaggaggtgccggggtaggaagtgggctggggaaaggttataaatcgcccccgccctcggctgctcttcatcgaggtccgcgggaggctcggagcgcgccaggcggacactcctctcggctcctccccggcagcggcggcggctcggagcgggctccggggctcgggtgcagcggccagcgggcgcctggcggcgaggattacccggggaagtggttgtctcctggctggagccgcgagacgggcgctcagggcgcggggccggcggcggcgaacgagaggacggactctggcggccgggtcgttggccgcggggagcgcgggcaccgggcgagcaggccgcgtcgcgctcaccatggtcagctactgggacaccggggtcctgctgtgcgcgctgctcagctgtctgcttctcacaggtgaggcgcggctgggggccggggcctgaggcgggctgcgatggggcggccggagggcagagcctccgaggccagggcggggtgcacgcggggagacgaggctgtagcccggagaagctggctacggcgagaacctgggacactagttgcagcgggcacgcttggggccgctgcgccctttctccgagggagcgcctcgaggagtggctggcctggacccgcgagcatcagcgctcagaccgggtccgcgctggggctgtccgtttgcgacaggatcgctgatcccttatccagctgtcgggttggggtctcactgccgaggccctgggcactaggagcagcacgcaccgggacctgcctggcacccagagcccattcccagaggacctggggcaggtacgcagggtcccccggagccgggagcagaggctcctgaaagcctgccaggctgcccggggctgggctgaggccgggactttggtgatattgggcactggccgcgacctcgcgtcacgagagtgtaggaggggagccgatttggaggggactcgtgcctgcgggggagcaggaggatctcaggagagggccagcgccggcatcccatgacccgcttgagtccccaagccggactgtcccggggaacgctcggcgagcgcccgctcctccccgccgctctcggaccgcggggccccagtgcgctgcgctcagccacccgggtggggcctctgccgggagcaggcgtggtgcgcggtccagtccgtgtcgcggacatcagtgaccctgacccacaagggcagcccagggcccaaataccgttaacttactgacttacaagcctagcctttaaaatccgagcgaagagagggcgggcgattttgaccaaacgatgtggtttgaggaatcgatgaggtccgcccgccacctaagtcagccttcgctgggcgtttgggagacgggcggtggaacagtcaggggccgggggttttaccagcagttagaccgccgccattgaggggtcaaagccccgaggaacttgagggttcggactcgcagtctctgctcagtggggctgagtggcggagatttgtgcctcgttcccctgggcgcagagagccagatttcggagcgc

SEQ ID NO: 5856 - DNA, 2190 bp, Homo sapiens; identical to SEQ ID NO: 5855
  source 1..2190: mol_type = unassigned DNA

SEQ ID NO: 5857 - DNA, 679 bp, Homo sapiens
  source 1..679: mol_type = unassigned DNA
cgccggcccaggctccgtgcggcaattcttcggttctgttgtttacttcgccccaccgccccccacctcctagtttttgttcagcccggggaagccgcgccgcagcgcctcagatgttatttatcttttcctgcgaggggcttgtgacagtccagggtgttgtgtatcctgtgcgattgtttatcgcccggcccatgcggtggcctgagcagcctcgcgccggcacttcacgtaccgaaccccgggactacgtgagccggcggagggcggggaggtggcgctcgggcgccggcgtgaacccgcgtcccccggagcccagcgccgtgtcctcaggccccggccctgacctcagggcgctcaggtggaatggccccgcagctgcgcgctgctcccgcgcccccgccttgccccgcggaaatcgcccccgacagtcaacccgaccgggcgcgcggcgcccccggccggtccccgcccgaccccgcgcagggcacagatcggggcgcacgcgttactcgtatccggtcacccgcgggtcaggccggccgagcggctgggctcagggggtactcctacgtgcgcagccgccacccggcctggccgcccagacgcccccgggggttcgcgccggccagcccagcccgagcctggcgccgcgctgcggccgctgctctccactcgg

SEQ ID NO: 5858 - DNA, 2013 bp, Homo sapiens
  source 1..2013: mol_type = unassigned DNA
cgccacgcagtccagggcgctcagcctacaccgccgcacacccattgtcggcccagaggcttggccgctgagcgccccctggatggcgtggtctgaccgtccttctccttgactcacctccagccccgagggccgggctccacggcggcggagagggcgtcgcccgcacggccccggctgtgccaccgccccggactgttcccgcgcagcgaggtcccttccccggggcccccgggtggggccggtcgagccgggtgcgctatccctttaagcccgggcgagatgagagctgtcagcggcagccgaggctagcgcgggacgtcgccaccctagcgccaggccggagctagcagccgcggagccgcggagagcggagggggcggcggggccgggcgtggcgggtcccctcgccgcccactgcgcgctcgaaccctgggccccgcgagcggcgggcggcacccgctgtaatgcggagaatgtgagaggcagcgcagggcggtggggaggaaggggcgcgggagagggcggcggcgagacagacggagagcagcggggagaacgaggaccgggctgggcaggtgggacaaggcagggaggcgccggagaggccggactggaagggggggagaagggcggcggcgccgcggagggggccggcgcttcccgcgggagtgcgagaagcccgagtcggcacctgggcccaggttcgggctgggagcgcggccgcggcccggccaggcagggtgcgggagccgggccgcccgcggggtccctacggggagcagcggggcacctaaggccggcgggtcccggaggggcccagggccgcgctccgcaggctccggccgtcccggcagggggtctttgtgagcgctccaggagggcgagtcgggagtgcggagccgggtgtgcgcgcctgggtgtgcgcgtgtgtgcgcgagtgtgggcgccgggcagtgggggcgcgcggtagagattctgccggcatcgcatcgtggcgagcaggaggcaggagcgggacgcgcaggggagccgggaccctcccgcgcacacgcacatgcacacgctgcgcgctctcacgcgcatacacacgccctccctgccgcgctcgccgccgcggccaccatcgcggagccgagccctgcggagcgggaaccgaggccggagcggggaccggaggcagccgagccgggggatgccggcccggagcggagccgcgcgcggacggcgcgcccgggacggtgagtgtggccgggccgggacgctgcagcggggccagggccgcaggggcgcaggccggggagccggtgtgtctgcccgccggcggcgcggcgcgcgcggcctctgattgggcgggagcctcgggggcagcggcgggggtggggtgctgggtgcgcgtccgtggggggcgtgcacgcttggggctgggagggggcgtgctcggcagcccaggccgcggccccgcctcacccttacctgcagctgcagccccgacgacttgcagcaagtttgtggagcccctggggcgcggcgggccgggaggggtggggacggaggcgctttgagggtgcaactccggccttcctttccagagaagagaacgcgaggggagtggggcgggggcgcgggccgggccgtctggcgggcggaggggtgcgcctccagctcctcagtcgcgcagccgcccgctctctgggacacccacctaggcccgcggcgccgcgctggagccgctccgggcgccagactactatgaccccgctagggtcaggcaggaccgcgcggggacagctcccaggcccagggcctgggatgtctttgcaggcaggaggaagacaccaaggttcagttgggggagtgcggcgacgtgcccgggcgtgtatgtgtgtgtccccgcgccttctgctcctcaggacggtggctggaagaagggaacttgccgcaaggcgcgccccacccgacctggaccctcaggagctcccaagaggccgggggcgtctccaggtctgccgg

SEQ ID NO: 5859 - DNA, 1501 bp, Homo sapiens
  source 1..1501: mol_type = unassigned DNA
cgtggccctccgcctggcccctcgcactcaccaggaggaggttgtgcgccaccaggtacccgagccgcgggctgccccggatgccgggggccaggcgcccggtggcgtagccgtgccaggccaccacgtaggggttgtcgatggtgatccagtacttgacctgaccgccgaagtggcggaagcagagctccgcgtaatccctgaagtggtcggccagggcgcggttggcccagccgccgtaggcgtcctgcaggcgctggggcaggtcccagtggtacagggtgaccacgggctgcacgcccagctcccgcagccgctccagcaggcgccggtagtagcgcagcccctcgcggttggggacgcccgcgctgccattggggagcactcgcgcccacgagatggagaagcggtagtgagtgaccccgagctcgcgcagcgcctccgtgtcgcggaagacgttgttgtagctgtcgctggctacgtccccggtggcgggctgcagcggcgacggggcgcccaacggcagactggcgttccgggagtctcccgggggtgccagggggtggtgggtgaacgtatcccagatggacgcacccttgccgtgctgctgccagccgccctcggtctggtaggcggcgctgcccacggcccagaggaagccgtcggggaaggtgccctggaagaggcccgcggcctcgggggcaggaggccgcgagaaacgggcccaggtctgcgcgccgtcgcccggctccgcacgcaggcggcggccgcccaggcccagcagcaccagcagcagcgacagcgacggcggcggcggccgcgggcggcgcggcggggcgctggcgggcatgctgcgcgggagccaggctccggggccccgcgccgcgcccctttatgcccgcgccccgccgcgcccgcccgcccaccgccggcgcgcccacccccgctccccggcgggctccgctggcaataattacctgcgagccgggactgcctccgccctggcactgggggcgggggcaggggcgccgagggcgaggggtgcccgggaggggcgcggcagcgggcaaggtgcggcaggcgtcgcccgcggacgtcggagaaaggcacctgtttctcccagctcccgggagccgtgcaggacgtttcgtggacgctcaggttcattctctttgcctgccgcgcgtcctctgagagcagccctggagcggcttcgtcggggagaaaaggcgccgaccaactttccccgacttgggggcgggatcctgccgggccctagcggagcgcgccgctggggaagcacctgctctcacttttctcccactcggaggcccaaagaagctccggctggacattgctggagccaattagggactggccgaaatcctagagggactgccaggtgggacagccgagggggaacttcgccgtgcgctgaaagggattcccccttaggtgagatgctcgcggggagacgcgcccacccgcgcccctctttcga

SEQ ID NO: 5860 - DNA, 668 bp, Homo sapiens
  source 1..668: mol_type = unassigned DNA
cgaggttgctgcggtgggaagagggcgctgggagggaggaggacctggggcgcagccgtggtgggtgcgccctgccaagaagggcgggggcgacggggcgcgcacgcggaggaggaggaggaggagggagacgggagggcgtgtgagcgagtgagacaagaaaagggagcgcgcccgccgccgccgccgccgccgccctcctctggagagagaggctggagtgaggctgtgcgaagcgccgcatttcaatgaggacgggccgaggcacatccctgcactagtggccgcaaccgaggcgccgcgctccagcagctgctgccgcccagcccggccccgccgccgccccccagccctgcagccccgcagccccggccgcgcccagcccggcgaggacagcaccaggaggcggcccccagcgcggccacaaagacccccggcggcgtctctccgcggaccggtgcgtggtttgccttccctggggacgggagctgcggggagggcggccgggggactccgcagagcccgctccgcccgcagccgcggggcgccgagggcagggcgggcgctcagcttggccccgccgccccgcccgcagttcctcgaaaggcggccgccctgccctggccagcctggcccgacccgggggcgttgcgtgcgggcggccccgg

SEQ ID NO: 5861 - DNA, 1006 bp, Homo sapiens
  source 1..1006: mol_type = unassigned DNA
cgccacagccgcagagcccccatcccgagcccgcgcctctctggtcgcgccgtgtcattctgcccacccattgggcgacctgggcacgagcaccgcgacctcccgctccgcgcagccctccagcaccgtggccccagcacacctgcagagcagccaggcgcaggaaccgaaacccgccgggtggtgggcgggaagggaaaggtagatgcccaagtgaaggcgctcatcttttttcctacgtgaacagaagttgattcttaacttcaagtgagaaatgacagggagaaaaagtatgcaatcactaccagaaaaggtgagaggccagtgttgtttcccagcgaagggacggggtgagattcaaacccatcgtccggccaggggagtccgcccccagagcaccgagaagctggggtgcgtgggcggagagagagcagggtgcgcccgacagccctgcgccaggttgtccccaaactcaacacttcctctctcccttctggagtcactttcccttccggaatatgcaagctctgggtggcccagccctgccgccagactcagtttccaagtgcgggggaaggagatgggcgctctcagccgcgatcccctgggaaggtggccactcacctgcgctctgaaatagaagaacagggcgacgctgcagacaacctggcccagccccagccccaggagggccacgaacatggagcgggaggcggcagggggctggtgcggcgcaggcggcggcggggcgtgcagggggccctcgtgcggggctccggggccgccgcccatctcctccgagccacgcaggtacttggtgtagtctctgctggcgcggcgcatggcgctcggccctctcgcttcggagctctcctccctctcccgctccctccccttcttgtctgcggccaactccggaggctgcggcggagcctcgacgtggggcgccgacttggagcccggctttgggtcctggggcgcgcgggcgagcgggcagggcgcccgg

SEQ ID NO: 5862 - DNA, 867 bp, Homo sapiens
  source 1..867: mol_type = unassigned DNA
cggaagcaaagttcgcagtgaggtgggctggaagcgggttttgcagcagccgcgagtccgggctcaggtttccaggcgcggctggagcagaagtgcagggaccgccacgatccaccgccgcggccggtcccgctccgctagaggagacttcgcacgcgcagccgactggcccgggctgaccgaggggacccagacgctgccactttctctttccaaggcagtttccgtggctctgcatgtaggaagtgctccgattaattttctttccggtctccgcagagattccaaattctgcggtccccacctttcgctgtactccctctccgcccttctttccaatgtccctgccagcaaaagcctctatttgcagcaccgggcatgttgtccgtttaacgcgctccggggatctgctggctcgtgctcccaacccaggggtggctatacgtctcgcgcctctgttcctgggtagactcccccatctgtgcattttggccccttcacttagcaaagagatgtgcgaagtgtgcgcctggagacgagccgcctcggtgacccccatccgcccgcagcggtggccctggttccccggatccgcgcccgcgccctgcgggtctcccgcgccgcccttgcccgccggaccacccgggctcagagggtcgctcgctttcagcgcctgcgagcgccgcttccgcccgggcctggggagcgccagcgcgtccctcccacgccggaccctgcagagcatgctcagtgcacctcatggaacccggctctcctggggccaggatcagatttccgggttttcgctgctgccgagggggcgcggaggaggggaggctgggagacagtcagcgccttgttccgcgc

SEQ ID NO: 5863 - DNA, 1072 bp, Homo sapiens
  source 1..1072: mol_type = unassigned DNA
cgcggagaagactgcctggccccgccggccccgccaacgtgacggtcagccccgccgagcgctcgcacccgctcacactcatgatcactcgcacactcgctccaatacgtgttaaggcgcgatcgcggggtccctggcagccttcgctgcaccctcccccccacaggggtactcacagttgccatctgcatagggggcaactttctccgacccagctgtggccgccgccccctccagcctcctctggctcctcgcaccctccggcctgggttcgcgccggccggccctcccctcccccctcggctctcctcctcgccgtcttcaccacattcccccctggtcagtggcgcacgccgggggacgagccagagggagcgggtcgcgggggtgtgcatgcatctcccgccttcttcttgcagcgcacactgtacatggtagtgagggggcgagcaaaggtggcaccggcccctcggctgctccagcgaaggcggcggctgcagctcctgcgctgtcctccgccccccagcgcagcggcgaccaccgcgctgggatcccgccgacgctgtctccgcgccgagcccgccgccgccgcggcccctaattagtatttgagaggctcttgcatccctttggcagtttcatcctcacggtgtttgcagggtttttttctgtatcccttccccagatgcggcgcacaatcgtcattagttggaactctctatcaccgacatcctttggggtttctgggggaaggggggggcgggcagcaaccgcgtcgttctatgcctgtggcttgtcctggcagcccggtggctctaaaaaaaactccgagaaagttgcgtcttcctcccgggcgccgaggaggtggcaacgcggtaagcaacaccgggtctctgagacagctgctccggagcgggtgcagggcccagtccagtgcacttgtttattgtcgcgcctctggtgcgagccaagctgcagcagacatgatgggcccggggcgaagcgggcgctcggtggccgatagatggcagccgagggcgaaggcgtccctgggctagggcggcgcaaccgg

SEQ ID NO: 5864 - DNA, 1633 bp, Homo sapiens
  source 1..1633: mol_type = unassigned DNA
cgacacgtttcattcacagagccccagagaagctcggattcggttggagctaagagccggaaaacaagcacccagactgccgcgcaagttgtcggagaccaagtgctacacacactggcgccgagagaaagggtgggcgctctcaagctcttggtggagcaatgccagtggccgggcatgcgggggacacggggcccccgaacccggacccgaatccccagctgagccacccgctaaagttggctgttcgctggcagacgaggccggctccagaccgggtggcagggtgtccccgggccctgagtggccaacagcaactggggaagcactgaggaaccctaacgggaaagcccgccccacatctgaaacaggcagcccgtgaagtccccaaaccagccttgaaacgccggcgtccagaggccaggtccccggcgagggtccctcccagccttgcccgcccccggcccgagcgccgggcgctctgtcgcccgaaggacggataggggagagaggggctgggggagccctccgcgtctctccaccgcccctgccggcgcaagggcgggagtggagaaggcgccactcagactgtggcgctgggcaaactgcggtcgcagttcttccaagtttgcccgaaccagaacgcggagtgagcgcccggctcggctctccgtctgcgccttgcagccgccccggagtgacccgggctccctggccagccgggcctgagccatcaactaaggggtagaagggcgcgagagcagcgggaggcgggagccagggtgctcccgcgtgtgcacacaatgaggcggcggagacgcacaccttcccccgccgaagaagccgcaggagcatccgccgcccaacacggagacgcggagtcccatagcggtggcagaaagtgagcaccaactcagcaacagggggaaggaaggggacgccgggcggccagtgggacgtgcggcagccgagggctgcagcctgcccctgcagcgcgcccgcgcttacctgcgatctcctggtaggggatgtccgccaggctgaatcccttggcaccgtacgcctggcggacctctccgcagctccgagccttcacatccgccccggcggggagggagagcagcagccccaagaggggaagaatcacagccccgatccaagaaggcatggtgcaacatacaaatccagctcggtaaaccccacggccggtgcgctcttcaccttgcccctcaagccgaaagcccgccagaggcagcggcgcgctcctcgccgctgcccagcgtcacccccttctgccagccgaggggacgagcagcgcagccctctggactgcgctcagcaaacttttataagccagatggacgatggcaagccaacaagggctggctgggaaggctgctgccttgctcctctagcccccagatggaaacggtgcaatcaaaacgaggaagagaaggaaaagaagtgtttaaaaaaccaccatgggggttcagagctgcaatccgagttccgagccgcagaatcctggagcgctgcgggctcggctcgccggagtgtgcggcaaaggtgggagcgcgcgccggctcccccgggagggagatggacaagcgagagcgagtgtgtatgcgcgcgt

SEQ ID NO: 5865 - DNA, 1143 bp, Homo sapiens
  source 1..1143: mol_type = unassigned DNA
cggtaccgtgcacagtctgacctcacgctcgcacgctgggctcccggcctcctggcagtgcacttaagtgtaccccgcgtgtgcccggcggactcccgtgcacaccgccgccgtgctgttgagtacgaaagacccccgagaggagctcgcagatgagagcctagctgttgctgtgagactgactgcgggtggcagccggcaagaaggaactgccagtaccgaccctggcgctccccaccaactgcggcgcagcctcctctgcggtgcccgcccttcggcatcactgcagtccctgtagcaaagctaactttaaaaatttaaataaaataataattttttaaaggcccgaaaactccggctcccacccctcccccagcctgcccggcggcggcggcgctcagtgagtgacacggcgagcgtgagccgcggccccagccgggccgagcgcgctgcctgagctgagccgccgtaggtgaggggcccgcgtccccgcccgccctgggcgccgcgcctggcactgatcctgccggtcgcccactgtcgccgccgccgccgcccgcgggcaccatgacagctctgagcgctggggttacaggttggtcaccgccgccggtgcccgggaggctgcggcgcggccggctccgtgccctgcgcccgaggcccgcgatgcgcgctcgttagttccttggccggtccgggccaggacggctcaggggcgctggggctgcgagaggggctgctagaggggctgcgggcgggggccccgcgcgggggaggggtggggaggggcgcctccacccgagagcggggcggtggggtccttgccggcctggccggggcgcgggagccgcgatgcgccctccctattcctgcgcgtgggtgtcgggggcgcctgccgcgggatgcccctgggctggcttgggaagcccagggccggcgacacctcgggcctgccccgcctgggcatctagcaggtgttggggggcaggtggctgaggacgaggccactgggcatcactacagcgctgcacctgccccctcggcaccagggccgctgcctgggtaaacctctgggccaacgcgcgggtggggaggtgggggtgggcagcctggctccagcaggtctccgcgggggctccgcgg

SEQ ID NO: 5866 - DNA, 1143 bp, Homo sapiens; identical to SEQ ID NO: 5865
  source 1..1143: mol_type = unassigned DNA

SEQ ID NO: 5867 - DNA, 1371 bp, Homo sapiens
  source 1..1371: mol_type = unassigned DNA
cgtctctcctacggcgcccgcctagcccggtggtcccaaccccctgcgggagctgcacacgccccggaaacctgggacagaaactgagtccctctccttcctggtggtggtgacagcacctgctcagatctggtcggacgccgccggccggagcacccagcccggcggagaaggagctcgcccggcgctggggactgggacctggagccccttcccctaccgcacgtacgccccgccccgcgcacgcccgcccgcccgcccgcgcctggcgcagcttcactccggatggttcctgtcctcccgcgggtccgagggcgctggaaacccagcggcggcgaagcggagaggagccccgcgcgtctccgcccgcacggctccaggtctggggtctgcgctggagccgcgcggggagaggccgtctctgcgaccgccgcgcccgctcccgaccgtccgggtccgcggccagcccggccaccagccatgggctctggcccgctctcgctgcccctggcgctgtcgccgccgcggctgctgctgctgctgctgctgtctctgctgccaggtacgcgcacaggcgttagggctccggagggacgggcgcccgagaaggggcgcggggtccggaggggctgccggcgagaacaccgcgcgggcgagcggagagggctggcgccgtcgccggggactcggaacccgcgcagactggctccagcccggcggcgacttgggtggggtggctttttccctttcggctcacctcccacccctagccaccaccaaacctgggagtcactgagcgggcgctggtacgcgccgggtgatggggaggtcgagaccgggtccttcgtcttgggcgcaggagttggggattcgcgtccccgcgctgcccgtcgccctgccccgcgcactggctcccaaactggcgcgcccaagcctcccgctccaccgtctgcatcccgcccacctcctcatttgacggagatggctgaagacttggccaaggccacctcgggaagaggggagtcgcttcgggactggggctggagctggagcgccagcctctcctccggttgtagcctcctagcgctcctggctgcgtcgctgagggaccctccaccgggagagcgcctcctgtcttcctcccgctctccagaggagcctgctgggggaagccggccctggcccgccgctgggaggctcttgggtgcctgggagggctggtgggtagcgagagtcggggaccgggcaaggctgcagggaattcctggagggcccaggccggcggtctgtcgtgcggctgtgagctcagagcgctttccgccctcggtgccgaggcctgcactactcagaacgccatacgctctcaaccga

SEQ ID NO: 5868 - DNA, 1545 bp, Homo sapiens
  source 1..1545: mol_type = unassigned DNA
cgcgctgtgagagttaggctactcaaatgttacgctccccgcaccgccggcgaggggacaaatgactactctgatggattcggtagcccaaggaaattatcgctttcggagggatggcggcagagcaggtcgggcatgctgcatttgcctgagttggaccgcgtgtgagcgagcttacgctccccgcgggccaggcccagctcccgtgctttctgacaggtgaagttgagcatccttatcaaaccctcgggaagaacaacgatcccattccacatcaacgtgactggaaatctcaatttaagaattggatgcaccggtcggtccacctggggcttgtccagctttccatcttacttcgcgcctctgatgtgtcaggctttttgcacagatagctcacatatttaaccctcaaaacaccgtttcctgaagcgatgctcaaccaggaaaacttgccccaaactgcatgatcatcttccgtggcttctcttcccgaatccctgctctgtccaccaggtgcggccccgccccgcatccgcacacaccttttccgccgctgccctgagcgcagcgacaagggcccccacacctccgcggcccgcaatgctccggggccaagccgaggcagggaggcgctcccgcagctcctgactttacaacccgcgcgcgtgtgcaccgagccgcgggcacaccgcgaacacacacacacacacacacactcgtgcgctcccgccctccgcccggcccgggctctccgaacttacctccgaggcgccccgggcgcagggcccgcccttctctgcgggtctccagcggctgttcggcagtggtccgcacggcctccgatgccgcgcctccggtaggctccagagtcagctggtcactgtcacccggcagcccggattccgcgcccagggttgcaccccgcggatggagcgactttcgcctccgccgcccgagtccaggtctgcgctcacacgcgcggcgctcacacgcgcggcgcccacctggctgcagtcccggccagggccagcgcgccgcggctgaagggggcgctcggactcctctggggcggcgcgcagccgggacagtctcgcatgacgcccgcgctccagcggccccgggacgcggcctcaccctcaacccctggcggtctcagcctcggtctttgtgtctcggtcggcgtcgccacgtcatgggcttgcaggctgggagcagcgcgggccgggaacgcggctggggagagctgggctgggcttctccaccgccgcccgcccggggcgctcaagctggcggggcgcacgggcagcaactgagcgcaccctgggggaccgagggggcggtcccggggaggggcgcggcgtcgcgccaagggggtgccctgccagaggctgcggcggaggaaagtgggagtcagagcgccgccggagccccgggaaggcggtgtccgttcggtcccaggtcgcggctgcagcgccgaggggaaagcgagcggaagctgcgcgctggagggagcccaccacccggagccacccgcggggttcgcgt

SEQ ID NO: 5869 - DNA, 1545 bp, Homo sapiens; identical to SEQ ID NO: 5868
  source 1..1545: mol_type = unassigned DNA

SEQ ID NO: 5870 - DNA, 1027 bp, Homo sapiens
  source 1..1027: mol_type = unassigned DNA
cggtgcgtgtataggggcgctccgggaggggtggtgaccggcagccggccttccacccttcgcgttcaccctctcgtctttgttctttccccagctggtggcgggcagtgtggtgatggcctttgaggaggtctgcccggagcgcatcgacctgattcacaaaaactaccggaaactctgtaacctgctgatcgacgtggaggagtggggccaggtggtcatcatcagcatgctcacccgctacgcccgcacgcagttcctgagccccacccagaacgtaagtgggcccagcccaggcagagcgggccgaagtgtgtcccggggaggcgcccacagacccgtcggtctccccgtccaggaatccctactagaggagaacgcggaaaaagccttctacggctcagaggaggacgaggccaagggcgcggggtctgaggagacggccgccgcggccgccccctcccgaaagccctatgtcatggaccccgaccaccggctgctgctgcgcaacaccaaacccctgctgcagagccgcagcgccgcggtggtgatggcggtggcgcagctctacttccacctggcgcccaaggcggaagtgggcgtcatcgccaaggcgctggtgcgcctgctgcgcagccacaggtgcgctccgcccccagccccgccccctccctcgcctcctgccccgccccacgggctgcccggctccgccccctcacgcccaccagccgcttccacctctgcccacccgctccacactgaccgtagtcctgccctccgcactggtcctctccccgcaacgacttgccccaccttttcccctcatccgctgacccttgccccaaccgaggggcccggggtgctctgacccgtcctctccgcagtgaggtgcagtacgttgtgctccagaacgtggccaccatgtccatcaagcgccgggtgagcctgcgacggcgggctgtcctcgctgtccgagggccgcttctgcgggcactggaggcgttgtcggggctgggaccggggccgg

SEQ ID NO: 5871 - DNA, 693 bp, Homo sapiens
  source 1..693: mol_type = unassigned DNA
cggattcgttctatttgaggatcccgggtctacacaggcgaccgcctcggccccagactggaagcgacactccagggaccaaagcttccagcccgcgctcggccccagcccctgtttccgcctcagagccgcagcgagcagggtcctgcggcaccgcccagagactggcctaggaggttccagcccccagcgccagcacacactcaccggctgcagcagccccaccagccctgctccttctcccgggtcccggccacaccaagagcttcggaaacgccgagaactctgcgggtccagaacgcccgcgcggacgcttctcttacggcgccggaagccggcgccgagtctgtcaccgggcatccctctgttgccttgacgacggcgggcgctgtaagagtggagaagctgcaggtgctgaggcgcggtgaaagaaaccctgggagccaagagcacgaggagctggtgtctgtgtcacatttgtacttgcgggtaagaaaccgctggtgtagcggcgggccagggcttgggagccgacctagggcctaggtgcacggagcgggctcctcgggaaccctgagagtggccgtcccccggagatgaagggacgagggcgcagcgacttccgcacttatcccgccccacgaatactcgctccgcacccgccggctacccggggataaaacgtttgttcgt

SEQ ID NO: 5872 - DNA, 1496 bp, Homo sapiens
  source 1..1496: mol_type = unassigned DNA
cgcccccgaatccggagaaagcagcccgcccgccccctcacccggcagccagctcagctcacccgagagctgagcccgagaagccggcctctgacggtgctggcgtggcgcttgccaaaatatgccccttgcatctcaatttcccccggccatttctcttgcacgcacagctcgcccggggccacctcggctctccagcgcagccctttcgacccctgtttcttccttccccgatccatgcctgctcaaggccgaatgcaaaacccacctccaagaaagcgcagcgggcacggggggcacctagcgtgccatgtcccgcagtcccctcccagccaagaccagagccccagactctagattacggaaatgagtgtcattcagaccaaggactgcgcgtctgcggtcccggtccccggctctgggtgcttctctggggtgtctgtgcgctccggcaccccccgtcgccgtccgtgagcctgcgccccccacccacccaggcttgggagcgccccccacccaaggcttgggagcactccccaatcacctccgccacgttcatttcacttcctaccgcggtccggattgcagcaaaaccgggtagcgcgagggccaaaaagtggaaaggagagcgcctttccgtgtcgtgcagccagctcgccaactctccctccccagccccgaccctcgcaatctcaaatgcaactttttcccttcggtctcggtttcccccgggctgcggctagcgggcgccgcgctgcgaggcgtggagcgggcgggctgccgcgaggctgcgggtggcggtgccggctacagccgcgagccggcgagtgggtgggtgggtgggtggggaggagggagaggacaggcggggagagagacgggtgtggggaggggagggagggggagattccgctctcctgccgctcccagcccgggcggggggcggggggaggaggccgcgacgagggaggggaggagggagggaggaagggagggagggagccgaggaagacgctccgataacccgtgcgtttcgtaaggctcggagcacttgtacatttctgcagccgcgcggcgagccattcgcggcggctgctgcagctcctactgcatcttccttctcttcctttcctcgggctccgggtgtgtgtatgtgtgagagtgagtgtgtgtgttttgcaggtgcgtggtgtgtccgttttaattctgcccagtaggtgggacttggtgactttagcaccattttttccttttccttttttttttttgcctccccaccgtctgttgcaaccctgcaaagtctcggagtcggagagcgcgcctcgcttccagagcccccggacccggcgagtcagcgatcgccgagccggccaccatgcccggcagaccgcgccactaggcgctcctcgcggctcccacccggcggcggcggcggcggcggcggcgtccgcgatggtttcagacgctgaaggattttgcatctgatcgctcggcgt

SEQ ID NO: 5873 - DNA, 5820 bp, Homo sapiens; identical to SEQ ID NO: 5626
  source 1..5820: mol_type = unassigned DNA

SEQ ID NO: 5874 - DNA, 699 bp, Homo sapiens
  source 1..699: mol_type = unassigned DNA
cgccgcggcctccaaaggccgctgctgtgggtgcgcatacccgggttggagaaatcccggcggttctgcaccgcgcggcctcgcctgggccctggagggcgcatccgtcccgcctgggctgtcccgcggctcatggccaagcgctccttgcccagcccggaaccgggcgcccgagccagcgaacaggccggctcgccccagctggccgagcccgacccgccgcgcgctcgggccaggcgagcgcggcgcggcggattagccctgagcccgcagcctcgagggcgcggggcgggcgcgtttggggtatgagggcggggcgggcggcggccgcgcctctaatcccggcgctgcgtgtgggagcggccggatcagggaattagcgctgtaacttcggattagtaacgctcgctaaatgagtgcctaattccgacccttcatgcttttcagcgtcgcggctgagtcctaggaggcctcctggccaggctccctccgcgctctggtcccatttcccgggaggtccggccgcggccggcagagaactctccggcctgtggagatccggcctcaggccgcgccgcagcctcctctcggcagcgcatttcattggcccgggcagaggcccatgcagtcccacagcgttcggagttgggagttcgtggaccagagaaaaggaagccccggatgcctcgcccaccacgg

SEQ ID NO: 5875 - DNA, 1845 bp, Homo sapiens
  source 1..1845: mol_type = unassigned DNA
cgcacgcggcgcgggactcgagaagagcgcctggcagagcacaaatcccacagaagaagagaccttctgccctctttgagacctcaccttccccttgcccagggccaggaagctctcctcgggcctcctcagaaccccggctgcctccccacctgtcgtctaccgccctttggaggttccggagaggggcccggcccggcgagccgaaggctgcggggcggggcgcgagtctcagcccctgggacacacagccggtgcgtcccgcgcctcaagtgcgcactccaggaagtccggagccgggaggatccgggctcgcggtcccaccctacctctggcgaggtcgggagaaaaaaagcgccagatcgcccgcctgagggcccagaagcccaccgggcggcggtacagactttcccgaaatgtctccgtctccgcgctgcgagcgcacaggaacccagggtcgccggggttgccgtggcttggctgaacgtccaaagccaggcgagggcggggggtctcagtccagctatgcgagcccttctctagtggtgccagctcctacgccgggctcccgggccggcgggaggcgcgtgtgcctgtctgtgtgtgcaggggacattccgcttcccagtagcccatgcagaaccccgccctccgctccggccccaggaacccctcccccagctcagagatccctgcgcgccccctgcccactttgccaaggcgagaaagcggccgtgctggagacaaagaaactcctgcctccctccactctcggcccctccgcccgcccgagacactccccggcgccctccctcgaccccggcgacactgcgcttggacacgccaggcaggggggcagggtgggcgagtccgcttcccgacgcgggccagctgggggcttcccgtgaaccccgcccggggacaccccacagcagccgcgcccccaccctcctctccccaaaccgtcccgggcccctgtcgccgccaccttctgccaaaccgtccccatctctccagcggagctacagcggggcgcggcgcacacaaagggggtcggagggtggagagtacagaaggagggagagatcccgccagggctcgtggcacgggcctgggagcagctatttacccgatttcttcttcgatctctgagatgtctgcgaagatgaggaagaccacgagcagcgtgagcgcggccagcatccagctccggaactgcagctgcatggtgggttcgcgcccgccgggacccacgcgggccggcgcgaggagcaggggccggagggcgcagcggcggacgccggagcctccgcgcgccgcgcgcagctgggcagacaccctgcgctccggacgagtccgggccggcggcggcagcggcagcggcagcggcagcgacaggcaggggttgctcaggcgcggcgagcccgctcgctccctcccggctcccgcctgcccctccctccctcctctcccttcccccgccccgcgcccggctccgcgcgcagtttgacagctttgctccgcgcctctgctcgcctcctcccaccaactccagcgtccaggcgctagcctttgcttctcccgcctggctttattcagctcccgagggcgcggggatgcagccggacgccactcctggcctagagagactgggctctggccaccgcgagcgaccgggtacggagctgagcccagggaagtgcgcgcaccgcccggcgcacccctcaggctggcaaacgccctccctcgcccgctctttgtccagctccctcgcctcctcgcaaagttttctcgacacaaagaccaacacctggggacagcccccagcgcgcggcgagaaggcgg

SEQ ID NO: 5876 - DNA, 1844 bp, Homo sapiens
  source 1..1844: mol_type = unassigned DNA
cgatcagagacccggcgcacggagcggagctcctggtccttacctgtaccaatccagcccgcggccgtagttcctgtcaaagaagtggggttccgtgcccaaggcccgcacgtccgggtgtactcggataaactccagcacggcccgggtgccccccttcttcacgcccacaatgagggcttggggcaaccgcttggtacccagcttgggtgagccggagtggttggaaccggagaggcgaggggcgggcacggcggcggcgggcgcgctgggagcgctgggctcgctgggcgtcggcccggagggatcacaggggcgggacttctggagaagtttctggccgcccgcgctggggccgcggaggcagcgaggcgcgccgaggaggcggctccgacccaggtcgtcgcagcagcacaggaagctgtaacacaggtaagtgcaggagagcgagagcgtgaaggcgaagagcagcctgcgcgccctccgcggctgaggtggccccgcgcggcccaggaccctataggccatggctccatgggcccgcgccgggggtcatggtttccgagggggcaccggcggctgagctgctgtggccctgcggtcgcctagagggctcgcgtggcgctgccacggccacgcgggtcgggcgttgggggcgccgtcttctccgggggctgctgaccagggtgcgcacagtgccagggggtcccgggggcagcggctcctcggggaacaggcggttgcatttccagcatctcccggtcctaggcgatggggctccgggcagccgggcggctcgggcgctcccaggctcttacgtgcgccgggttcggagcgcgcccagcgcccgaagccccattcctgatcctcggagcgccgctcacgaaacgctcggcggcggcgcggctgtgcgggctggcgggtggaccggacggtggcgctggcgccggccgcgatctggctcttcgggaaatgccgagcggagcgcgctgccggctctatttaaggagtggcctgacgtcagccgcgcgggtcccccgagcccgcgccgcgcccagggacctggcccgccccctgcgcccccactctcttacccctcccagaaacacagcacgcgggccctccccatgcaggccactccctacggagccccaggccagctttggggcggtgaaacgaaggtgtcaaggcatagtactcctccgggaggctggacacccccaccacgctggcctctcgacatccagggacacgaatccaggtcgagatcgcgccgacatgcagaccagacagacccagacgcagacgcaggcaccctgccctgatgcgcggtcccaccaccctgacccgcacacgcacgcacaggcacagaagcacacgcgccctagcccggacacacccccacacccacgcgggggtggggaggagaagtcccctaacctgggcccagatacaccgacaaggacactccccccgctctcgacatctcgccaaatggacacacacagcccggaatcggacaccgagcgcacgcacgccctggactgggacacgcgctgtagacgggatgggtggaggagccgagcgtgagtgagattccgtgactattcacccagcttcttagcccccagcgcgctgactcacaccccggcggctcgctctgtctcgcacctatgaggcacgcgcgcaccccaacccattgtcaccccacctctccccgggcctgccggagagcgagccccggagcggcagactccgcgtcaggagggttcctctcttagcagccgccgcctagcggtagactgctccccggggagctgtccagggtaccagagggtcgccga

SEQ ID NO: 5877 - DNA, 1480 bp, Homo sapiens
  source 1..1480: mol_type = unassigned DNA
cgctcccggcgggttttgttgccccacgtccgccgtggggatcttttctcaggagcgccttgcctgggattctccttgcgtctcagaccctcaccctggctcggatttctttcgggggcgtccctccactcccaggcccccgcccgcgcccggcgtggcggccccctctccccgtgcgggcgggctccggaacagtgtcgccggccgcctgcaggtgtctccccacggaggggcgcgcgtccctgcgccgtggccgctgccaggcgccagcggctcctagccgaggtgcactcgcgctccgggctccgggcgcgccgtagccgctcctccaccgccgcccgccccgccagcccgccccgcacgccccccgcgccgcgcccccaccccggggttggggggggcatgggcccgcgccgcgtccgccgccgccgatctcaggcacccgagccccggggcgcggcgggcagcggccgctgacgcggggcgccagctgccaacttcgcgcgcggagctccccggcggtgcagtcccgtcccggcggcgcgggcggcatgaagactagccgccgcggccgagcgctcctggccgtggccctgaacctgctggcgctgctgttcgccaccaccgctttcctcaccacgcactggtgccagggcacgcagcgggtccccaagccgggctgcggccagggcgggcgcgccaactgccccaactcgggcgccaacgccacggccaacggcaccgccgcccccgccgccgccgccgccgccgccaccgcctcggggaacggcccccctggcggcgcgctctacagctgggagaccggcgacgaccgcttcctcttcaggaatttccacaccggcatctggtactcgtgcgaggaggagctcagcgggcttggtgagtgcgcgcgggcggcggccagctcggctccggctcccccggggcggcgcggccatcgaggcccgagccccggacccgttcgccctcctcccgccgcctgggcccagctcccagcgctccgcctggctaggggcgacgttccggggcagggggcgcgcgccgttccggggccggggaccagcatggggggacgtgcgggacgccccgccgtggagaggtgcaaggcagagctcctacccgctgcggacgccccgcggctttggggacgctcccgcgccccgggaaggcgcccacccccgctgccggtcggaggggcgcgcgctgctttccgctcctgaactcatctccacgctcgccccctcctcctcttcctttcgcggggcactagatgcccccacccaccccggaacgcccctgggggtgggggtgatgcagggactcctgctaccagccgcccctcctgccgcagatccacagacccgggagccttccacccccatcgccaacccacgccgaacctcccagacgggagtggggagtgggggagtcccgcgggctcccggaaagccgcacccgc

SEQ ID NO: 5878 - DNA, 5065 bp, Homo sapiens
  source 1..5065: mol_type = unassigned DNA
cgccaagcgcctcccccgggtgcggttcctctccgccagtgaggtcgcgaccccggcgcagctgccgcctcacttcgggctatccccattcgctattgcggatcagcccctaagtaccaggccctctggcggaacctgcaagtccaaacttcgctacccggattccccagtagtcccccccccaccccacctccacccagagttaggagggtgctaccgcacgtagagcgcgcaggtctctggggtgagcagggcgcgtggagggactccaggagtggcacctcactcccgctcgccgcctactttcgacccgcacaaaaataaagaataacccccactctgcttctgtttttattgatgtatttctttgcatcgcggcacgcggagcctcgccagcgccctgacactgcagcgcccgcaccagcgaaccacggaacttgggaccgagacaatggcccgtaattgatgtattgccatcaacaataaagaccaattctcctctccccgccattccgaccatccccctcctcccatccccccctcctccacctcccatctcctttcccggggccaccgagggaaagaaaacaaacaagaaattagcgggggacgccaagcgcagatcgaaacgcccgcctctacgccgtcgaggacgcaaaaaaacgaaaaaagttattaaagtttggatcccccaatttattcgtctctgctcgcccatttttaattaagcatcgcgtagctgcttttcgcatgttcatttcgtttggttgtttgttgtggtgtttttttggggggggggaatttttttttttcctacacttaatcttaaatcacacgtagaccaagtaacaaacacgtgtgaagttattcccgggagcttcctgctgcgcacgcggcgcgcaccaggagaaaagctttgcgggaccgccagctccgctaggttcctggctgcatgcggtgcccgggaggcccggactttcaagaagccaagattgttagagaaggatgcgggcggctccaaacacgggcacattccgggaaaggagtgtgcaagtgcacacaaacgcgttcgtgtacctgggacagtgtggattggtgggtgtgcgaggacccctgtttgtgagatggaggcgggtgcgggatttacacgtgctcccgtacacgttccccggggtctgggagatgcgagccgctcacaccccaggagtgcgcagatccatctttgccgagggatctctttaaatattcagtgagaaataatggcatttgaagcaccacctatggaaacattattatcttcattcttcaacatcagccccactgatagcttcgtttgtctttttatcaaaatctactgtacccatcaggacctggcgagaacgggagagcgaggcggagagggtgtgaatgtgtgtgttagggagtgagcgagggcagaagataagtaagagaaaaggtggaaaacggacgagcagggagagagaagggagaagttataccaataaaaaaaaataaagtcagcagatgaaaaacagaaacattcatcggcacacacacacatttacaccttaaaagaaaagatttaagaagctaagagaaagggaagggtcctctaccggagcgcagtacaggtccggagtacacgaagtcggctcgggagaccggtgcccacttcgcgcgaaccgaccgtggcaccggccagactcaagggcgctcgcgaattggggcgtccttatgagccctctcctttcctgatcgtgagatagggcagggattgtgtatctgcacccccctcctcccccattactcagccgaagtttagtttagtttagtccttcgggcgcaagacttcgagaaccttggagcgaggagaccccgaggcgcgaggggaaagagctaggctgagccgcgtaccgagtctcaggttcgcgggcgcctgagcccggcagagggatcgggctcctggctctgggctctggggcgagggtagggaggttgcatctcagcttgagggagatggtgatagagcgaaaagttcgggcgccgcgctcggcaagtgcccaaaaagtggaggcgagcttcggcgccgccaggcagcctcggacagaacacctccccaccgccctccccccaccccgctttccggctctgcgccgccacctcgtcccggaaggctggggcgcggccccctccccagggcggggtgcccaggggtcccagggactggcccagtccagtgccgggtccgcccgggctgtgtctccctaggccggtgctcgctgctgcgctcagtgtgagccgcagcccctcccctccccccggccggagctgaactcggagcccaggccggtccccgctctccgcccgcccggggctctgcggcgccaccgctgccgccgcctccccgcggagtgacgcgccctgcagccaaccggggcagccgggggggaggtccgggaggggtcctgggcggagccgggccgcccccttatcccacgggctcggggctgcttctcccgaaaacttcagccctaattgtcctgggaatgtccgaggtagagaaagggagcgagggagcaagcaagaagctggaggatcagtgcccctggcggggaggggatggggtggcgggagaactgcccctccccccagccacaaacccatcaggttcccaaacctttcctggatcctcttctccgcgcccccgcgagcccgggatccaggggatggagaactcggggcggaggagcgccgagccaggcgggagggaggccgagccgtgggcgggaggcggaccggcgtggggctggctcttccccactcgcttatttttttttttaatgggggtgggggtgggctgctttctggtagctcttaaagaaacgaagaaacactcacgaaacgggacgccctcccccctgatcccgccgcgggactccctccccccgcgggccggcgcgcctcgcccccgagttgggaagttcgcagcgcgccggcagcccgggtccccagccctcgccgcccggccccaccccccacccggggcggctcaattccggggagggcatgctaatttgggtcggcccagcccgggattgtgggggggggcgaaggagggagggaagagggaggggagagggagagagcggggggcgcctgccggggcgccgggcccgcagtggagaggaggccggcccccggcggccgggccgcggagtcccgggcggtcgcaaagagggttaacccagtgtcgggcggcgcggcgcgcagagccagccccgcggccggcttattgggccagcgcgcggagagacaggggtctgcagcaaatcacgaactaattgattaaggcgagcgggtttgaatagcgctggcccggtgccaatcgcctttcaaagagcccctctatgattaatcgcaatgcattattgataatcataattatagcaggacacatgcgcgctgcgcccggggccggggagccggggagggggcgggcgggccggcgggcggggggagccgccgccgccgccgccgctcgatttccgtaattttgagaagatttttttttagtaattttttattctgccccagctgatgtttgagccagcatgtcgcggaggaagcaagcgaagcctcaacatttccaatccgaccccgaagtggcctcgctcccccggcgagatggtgagtgctccggcccgcgccgtggacacacacacacgcactcacactcacgcacactcggacccactcacacgcggctggcccccgcgccccctacctcaccgccgccgcggccccgattgcttcttccactcggcgtaattttttttttctttttaattttcaatgtgcctttgctgggctttcccccgctgccccggggaaagcgagcacatctcccggcaggatctttccggagttgttgggtcctcccgggggaaggagggcgggcatgccggcctggcttctccgtccctgcttttccggggatcccagccgcggccaagacccgggagccccatgaggcgtgggtgcgggtggaggtcgccccggcctgaccgcacggggcccctagcgctcccggcgccggccccagggcacccggcccggcctccgccgcccggccttgctgccagcggtaaggaagtttacttcgggcgctgggctgaactccgagcgtgggggagttcgctgcgcccccctgcccccacgcacactccccctcggcctgcgaggcagaaccgggtgtctttggaggttcagagctgcaagaagatggggactggtgtcggggcgccagcgcctgacccgctggggttgcggccggggtggagagtgctgctggccgccagttgttccggagacggtgcaaacggacggggaaagtgtcggggtctggctcgcaaaatttatctccgcatctcttcccacaacacttgcaccctctgccccccaaaatctttctggtcggtatgcgccctctgcggatcgtggtgctccctacttccaggggggtcagggaagaagtcatagaatagttttccaggtttgcgggtggccagccagagtggaatcccccctgaaacaggggcacttgttttctccgatggaggcgacaactgtgggtcccgaaggggctgaacaagtccagaacaaagtttgtgtgtgggggctatggcagagagtggaagagatccgggcagggagttggggtacaaagggaggacacctggaatccctccttgctcctaaaggtgtttcacggtaccggcctcaaagctcccaggcctagcgcccgaggcggtgtagcggcgcccggactcgggtccccgggtcgtcccggcacgatgctggcctctcggctgtgggaggacgcacaaggagcaatctcggcggggtctcagcggctccggatgccactcgggatgcccacgccctaggcggcattttggggtgtgaaggagggagctgggccccgacagagctccgaagcgtgaccctgatcggcacctcagcccactaagctgcggccgcccgggcccccaggtccccggctcgt

SEQ ID NO: 5879 - DNA, 2372 bp, Homo sapiens
  source 1..2372: mol_type = unassigned DNA
cgagggacgcaggatgaaagaagccaagagtgtcgccagggcttgcgccagcgccgtcagactcccgggatgggggagctccagggcacggcgtcagcggattcacggagaaggagaaaagccccactgccgtgcagaagcctaggcccgggtgagacgcctgcgaaggctgccagcagcggaagagaaggggcgtcctccgtgctgcgcagcactcgcccgcggtaggtgggcgcggagctcagagctgggagccaaacgcaaacgctggcgagaagccccagccccctccggcagcccactcgctgcggggaggggtttctcacgcccccagctcctgggagactgcaccggaggtcggaagtaagccgggcgaggatgaatcatcccgcctaactcctccttcccggtcccctagcctccgcacgccggcccccttcagagatcttgcagccgcgagcgaagactgccctatcctcagactctaccgaaccccctgtggcctgcggagacgaggagacggacgggtctggtggccaatgagagcttcgatctcttgccccccgcccaatgggccgctgctcatgggccggggcgggactaggagggcaggtaggggcggtccgggctggcgcgcggcgcggcggctacgcggctgcggctcacagagctagcgcctctctgggtgtccgtgccagtgctgcgcgggaaggcaccaccaccacagccgccgccgctggccagggtgctggacaagacgggcccgtcggccacctcgccagctcaggcacccgctgcagccgtcgctgtctcctcccagaccggtccccatggaggagatggaagaggagttgaaatgccccgtgtgcggctccttctatcgggagcccatcatcctgccctgctctcacaatttgtgtcaggcgtgcgcccgcaacatcctggtgcagaccccagagtctgaatccccccagagccatcgggccgcgggctccggggtctccgactatgactatctggacctggacaagatgagcctatacagcgaggcggacagcggctatggctcctacggggggttcgccagcgcccccactaccccgtgccagaagtcccccaacggcgtccgcgtgtttcccccggctatgccgccaccggccacccacttgtcaccggccctggccccggtgccccgcaactcctgtatcacctgcccccagtgtcaccgcagcctcatcctggatgaccgggggctccgcggcttccccaagaatcgcgtactggaaggggtaattgaccgctaccagcagagcaaagccgcggccctcaagtgccagctctgcgagaaggcgcccaaggaagccaccgtcatgtgcgaacagtgcgatgtcttctactgcgatccgtgccgcctgcgctgccacccgccccgggggcccctagccaagcaccgcctggtgcccccggcccagggtcgtgtgagccggaggctgagcccacgcaaggtctccacctgcacagaccacgagctggagaaccacagcatgtactgcgtgcaatgcaagatgcccgtgtgctaccagtgcttggaggagggcaaacactccagccacgaagtcaaggctctgggggccatgtggaaactacataaggtgagtcctaagaaaacccactcctaactccctgcgtctccgatcatccggttttgcagcagacggtccccgtctcttgcgcacagcgcatcccagtgggggcgcaatgcaggtgccttcgatgtttacctccctggtctggtgcattgcaggaggcatgggggaatcttaaccggcgcacgggggagttgaatgcccccacagagttgttgcggggatgccttagagcgggtctctcggggcgcgctgcctgcgagcgggactcagggcgccccctttccgcggcgggtctgcagccagtggccgcggccagtgtgtgggaaagcactgcatagctgggtagagccgcgccagtgcccagggccgctaggcacgctcgagggcagggcgggctgcgaaccctcggggagggactgggatgggggcggtggggtcgcgcggacggcgggagtctgtcgctgctggataggcggacctggtgaggcacggcggagggtcggggagacgccgcaggcggaatactgatgagcccggctctgggccagacctggctctcgagctggagagaacgcggggtcctggtgccacgtgctcaaaagacagagcggagagggcagccagcggtcgccatggcaacgcgacgtgcaggcttgggcctgaacccttccggagttgggacctgagactagagtgtcaggaccggagtttgcgcagtcgcgg

SEQ ID NO: 5880 - DNA, 2372 bp, Homo sapiens; identical to SEQ ID NO: 5879
  source 1..2372: mol_type = unassigned DNA

SEQ ID NO: 5881 - DNA, 2372 bp, Homo sapiens; identical to SEQ ID NO: 5879
  source 1..2372: mol_type = unassigned DNA

SEQ ID NO: 5882 - DNA, 2142 bp, Homo sapiens
  source 1..2142: mol_type = unassigned DNA
cgcagctggtttcgaggttgtgcggtttccagtcctgcggagcagctcaggttaccgcctccgtggccgcgggggagggcatctccgacggccgcagcaatgggcaagagatcagggtcttcccatccccgcgactcgcccctttctgcctggtaaccaagcgggatgcctcatcctactccccaaacggagcggatcacacacagtagtatttcatggtctttcctgctgcggttttcccgggggaaggtacttccagagggtggccaagtcttccctagcggccggccttcgggagggggacagaacttaggagtcagccctctgccttcgtacaaaggctcgcttctcctcagggcgtctctgggtggagcgaagcggccgaggggaccacgacaatgtccctttgcttttcggaccgatggccaggcctccagagccaggagcgcccgggaccccagggcagggagcaaagctcataccgcaaccccgccacccgcccgcgccctgccagcctgttggggccacagcgcgcaggccagcagccgcactcgccgctgcggggttccctttgcgctgagctcatctcctgcaacgccgctgccccaaaccttgcgggccatttggtcccgggggtggggctccttgggggccgcggggcagcccggatgagaggatgacccgggagctccctgggggcggagtggaaggggcagctccaggcagccctggccaggagcttttaccccgccagccccgctgctccagcggccgctgccttagaaaagttaacgagaaccagatgtggtggccactgccgaactttctcagagccggtgattggtccccagccgagggcctcagccaattagcttgctgggtgggcctggagtcccgccccgcccaggcgcccgcggagatccaggttcgaggctggcgcggcgcggagagtgggctggaggccggggcgggacgcgttgtgcagcgggtaagcgcacggccgagcgagcatggagggggaccgggtggccgggcggccggtgctgtcgtcgttaccagtgctactgctgctgccgttgctaatgttgcgggccgcggcgctgcacccagacgagctcttcccacacggggagtcgtggggggaccagctcctgcaggaaggcgacgacgaaagctcagccgtggtgaagctggcgaatcccctgcacttctacgaagcccgattcagcaacctctacgtaagttcagccccctcctggcacttttcccgcagcttcttccctggggtcggtctcacggaaaccctgcctccagaggggaggaaacagaccccactcctggagccccccagcacccttgcggtggtacccggccagagagcgatgccgctgcctgccccgctgctgtaggggagcaagaatgacctggaggggagagcaagaattgttcgcagccacgtacgcgtcccaggcagaaaaggtggcgttgctagggcggccagcgggctttgcagttaggaccgcgagaaggctgtgcccgtctgcggagctggggtgttccctcttcagacctggaggcttcctctccgaggacatggggctccggggttgtgaggggagtgagaagataggtgaacgagttttagggcccctggacctactgcagcgcggagctgggacagtcgcaaaagttgcgcttgtttccctgaatccagactccctggccagtggggaaggagagagaggctttttgcctaagtcagttcccttccctccctgcgcgaaagggtagcgtccttgggcttgagcgactgtcacctttttgtccctctcctctcccaggtgggcaccaacggcatcatctccactcaggacttccccagggaaacgcagtatgtggactatgatttccccaccgacttcccggccatcgccccttttctggcggacatcgacacgagccacggcagaggccgagtcctgtaccgagaggacacctcccccgcagtgctgggcctggccgcccgctatgtgcgcgctggcttcccgcgctctgcgcgctttacccccacccacgccttcctggccacctgggagcaggtaggcgcttacgaggaggtcaagcgcggggcgctgccctcgg

SEQ ID NO: 5883 - DNA, 544 bp, Homo sapiens
  source 1..544: mol_type = unassigned DNA
cggtctccagccggccttgtgctgcccgctgcgaatacagcccgtgggccaccgggcagccgagccatgcaagccaccctgatccccaaaaggcagacgcacaaacccgacccagaactcgaggcgaaccttgaactcacagcgccaaaaacgcgcagtgccttcgtttgcccggctcgctgaaggctggctctgggcctgggggcagtgcccgcgaagggctgcgatggcaggccccgctgccacacggcatcgagggtccctccgcctcggcgccaggcgcacgcccttctgccacatccctcgcggggcgcgccgccagggccacctgccctttcaagccccgccaggcagccaagggtgaggagcggagagggacccggccgctgctgccgcgagccagcacaaaggcagcgtctgaaatcgaacttcccaccctgggcaccgcggcctccccccacccctggcctccgcggccggagcgcactcactgtcagtcgccatggtcggacgagggggctgcccgacggccgcccaggttcgg

SEQ ID NO: 5884 - DNA, 2002 bp, Homo sapiens
  source 1..2002: mol_type = unassigned DNA
cgcccccgccccgtgccaagcgggcccaaggcccgaggctcccccgctcacaaccccggtgcccggaacacgtcttcgaggggccgtgctgtcggggttattactcgcgactggacctcgcgccgtgttgctctcctcgggccccgagcccgcccagcggtctgcacggcccaggcctgagctgcgggcttctcctgtggggcgcgctgggagtgagctctatccccaaagcccatttcaacgtcccaggtatgactacgacggcagaggccggccgcccaccctcgcccccttccccggccagagcgcctttgccgggagccgacgaccgcggcctgaccccgggccccaccgcctactcccggctcccgcccttcctccacggtcaggggtcacacacagcggacgccccgttctcagccgcccctctgatctctgaatttgggagccagcgtgtccgctggggcatgcactgccacgggcactgggacccctttgctgctgcggggaggagccccgacggcaggtgggaagacctagcctgcccgcgtccccgctccccagctcctgcgacccgggccgaggctctcagcccctgggcttccccgctccgggtttgagggaggggccgggccttcgggcctgcagacccgccaccgcgcgtgcgcatgcgtcggccgcgagcccccgggtgcaggcctgggcggctccggcccgcgcacttgtccaggcgctgcggctcagcgcgccccaacctccagctcgggcggagagcgggggcgggactgaagcaccgtgttcctcaaagtatcctctcgccgtcggcagccctggcctcgcaaatgctccagcgcgctcaggcgcacgcagagactggcgcggcagcctccgggccaacggcacgcgagcaaagctggttggcgacctgggacacgcagtagaagttgaggctgcaccgactcccgccgcttcgggggaggcatgggcccgggcaggcctaggaggaagctgcacagcccgaggcccgggcgggagtggcgggccgcgggcaagggaacgtatatttggaaggggtcaggacctcggctggagtctggctttttatggcgaggaagccgactgggaagggccctctggcgaggctttcctgttgtgccacttttccccggcagcgccgggcgcggggaacgcggggctgcaccggggcgggggagggggctttacccggcggctccgaggactcgactctggggtcgggcccggcgggtaggcctgcccaggagccagctggcaaatgcagcggactgtcacgttattccactgtcaccacttactgtaaatcactgtcctaagcctccgggagaatccgtcgaacctgagaggggggagggggatgggggtgggcgcgcaggaagccccacaggcaccagggactggtgacccaggacatcagcccctcgagttctctctgggaatttctagcacccagactgtccctgactgtagggaccacggtggggcgtcttccttctaagctctccccgggacaccgggcgcgcccccctcgcccctgggttagcgcacactcctccacgcgatgaccagcacagccactgtgaggcccggccttggccgcgtttgtcctttgcgagtgataataataaaaatcattggaattgcaaggaagcccctggccccggctccccagccgctgctgtcctgggtgtcccggctgcggaaagaccccgcagccgggcccgacccacgagtggaacaccgggctgcggacccagccgggcctacaggactggcgcggggctccggggacaggcctcgcagggccctcctgcgcaccgtctgggacgccgattttgccaacttggaggacaatttttgttttcactctaccagcagatttttaaaaatccagtcgccgctgaaacgtgcttcccacccgtccggtttgtttgtagcctttgacgagccccggcacagcctccgg

SEQ ID NO: 5885 - DNA, 983 bp, Homo sapiens
  source 1..983: mol_type = unassigned DNA
cggtgccgcgcgcccgcctgctgcctggagctcccaactcggcggaatccaggtcaggacgcgccgccgttttgacgtgctgccggccgggaggcgcgggcgccaggctccaacgactagggtgggtggccgcggggcaggggttggatctgaattcgtccctcgggggctctggatgcgggatgcgggatgcgggatgcgggctcgacttcctcgctgctggtcgaggagcgttctgagagtctcccctccgcgcgcgaggataaatatgcgcggcttgtcagtcagtgcggcgctgtctcccagctgatagggtgacgttccgtttggaggcttggagattggctttttgatttggcttcttccggcagcttaatgggcaaagctctccgctcgcccagaaaccagcctctccgcgcgtcccctctgcgcgcggcgaggccgagacgtctcccgcggtgacagcgtgcaaggcggagacccggcgcgctcccagcccagggaaagcccaggcgacgcgaccgcaagcccgagcccaggtccctcggagccgccagggcgcgccgggctgcttgccttcctgccccttcctgcaggaatcccccgccgcccgcggccgggactccgggcctctcccgggcgtagattccagtcaccgctctgggtcggggtttccctctttctgaaatccgtgcggaaggacccctcccggggcccctcgccctggccccagacaccctccctcccagaccccgcgctccagatgcgctgccccgcagctccctgacagctgcgagcccacgaaccccggcgggagggcggcggcggcggactgacatgccccggacgcggctgcggccggcgggcagcccgcgggggcgatgagccgctgcgaccggtgaggcgccgggcggcgggggcatcgcgtaccttcctcacccccctcccttgcccactccgctcgggaggccgagaggaaacgg

SEQ ID NO: 5886 - DNA, 947 bp, Homo sapiens
  source 1..947: mol_type = unassigned DNA
cgctcggtgctcatccccgggatcttgaacttcgcctccctcttactttctgccagacccgcgagggccaggaagggctctgggaggaagcgggagcgcagcggcggggcatggaagaagagggttgggggcgcgcgttacctgcaaaggttctcgaggtctccttccagccctggtggtaatcccgctcagcgccgcgccctcccccagatccaaacttttgctgggtcctccgggtggcggcggcggcgacggcggcggctgctggagccaagccctgtcgcccgcagcgtcggggcgcgggggtgcggaggccggagcctcagagcggcgcgcgcctccccgcagcgggccggggccggggcgcccagctcgcctcgcttgctctcgcctacgtcccctacggagctgcggcatcgtcttcccccgtcctccgccaccaccgcctccagggttcgggcatgccactttctcttggcttcggccgccgcgacccccgccttctctcctcctccgcctccccctctccgcttcgccaagccaacgaaccccaaaagaagtacagcgagcggggaaggcggcagaaagctgccccgcggcgccggagctcctcggatttggaggatcccgggactcggcgggagagctaggcgggctctcctccgacgcgtgtgtgcggacagctcggagccgggcgtgcggcgctgcgcgggggcgggcgcagggctcgctccaagtgctgcgcccgcccggcgtgggtctggaggctgctcagaccacactactgcctcaatccgacgcggccgggctaatgtaggcgccgcggcccccacccctacccctcctgacacccccggatatgtttacagtaatgaattcgcgggatcgcctccgcagctcccgcgctcctcctctccctccgtccctcgcgctctggcgcgctccgc

SEQ ID NO: 5887 - DNA, 1362 bp, Homo sapiens
  source 1..1362: mol_type = unassigned DNA
cggcctccgggccctgcgaagggagctttgttcgcgaggcggagggcctggcttaccgagaagcgcatccggaggcggttgaggggcgcgcggggcacgcagcagagccgcagcccggcccggacccggagcgccggagccgcaggaaggcgaggagaaggaaaaaaaggaggctgccgccggctcctgcctcattctcccgggcagcgttgacccgctggccgccgccggatagggctggccgccgggcgcgggaccccgtgcgcgctgctcatgtccccgtctgccgctggctaggtgtgcgcgcagcctgctggtctctgggcggcacccgggggctcctcatgccccgcgccggggctcggcgggaggacctcggagaggcagcgcggagggaaagagagagagacagcatgagaacgcgcagagctgcaccccgcgggggccgggcgccagcagcaccgcgctgccccacccacggcgcgtctgctccccgcgctgcgcgcccagcggggcgccgagccccagaaactttagcacatggccggtccggcggccacggtggccgtagctgccctgctcttcgagcgccccccactgcttcctgccccaagccccagagcgcagcttaccagcggcgaccgcgaccgcagcggcggggcgcccacccggccgcaagcacagcagtgcgcacctgcgggaaaggaggaaggggctggcggcgtcggggtccctacaggggaggggcacctcggcggcagcaatcggcgcaggttaaggcattctgggccggggctgcgcgcgagccaggtggtggcaggccgggattggggagggtctctgcgccccccgccccgcggcgccgctgctgatgacgcgcgcgggcttccccggccccgcgtctgcggagccagccccgttacctagcgactcgctccggggagcccccgctgacgcgcgctgcgagccgggctgcggcagccgaggggcggggagggaggggagggggagctccagtgcggggagggccggcggctgcgggccaagctcctccctccgcttccctctccgcgttggggagggggcccgggaaagacgtggcctccgcctggccctggaggatgggaggccttcgcggggcgggggggacggagggaggcactgagtgcccctgtccccgcagtggggatgcagcagcaggtggcggctatgtggcctgtggaggctcggcacccagaggcgcgcggtgagcccgccccggcgggagcgtggcgaatgtggctttgggcgcgcgggtgtgtgggacacgctcccacccacgtggcgtacatggggacctggggacgcgggtgaaagaggcgc

SEQ ID NO: 5888 - DNA, 1092 bp, Homo sapiens
  source 1..1092: mol_type = unassigned DNA
cgaccgcggcgcgtcgacgcttggcgggtcacggtcacaaagcgggtctcagagccttcctcaggcggcggcaaagggggcgcccgaggtcaccggcaagagacagattactggcgcctcgggaaaacagagtggggaagggcgagactgtgtgcccatccacgttcgcgcgggtctgagctggcccggccttggagggctccgggaccccagaagggggacagcagtgggggatgggcagaagggggcgactcgggctgcccaggctcctcgcagccttcctgccaacgagaggggcccgggcgggaacagctcgagccgcgggggtgcggggcgcgcagcccgccccaccccgggagagccgcgatcgccgcccccgacgcgtgcaccaagtgggggtgtccggctcgggacaaaggaccgggacgcggatcgcgggcgggcgccactgcccagccccagcgtggagggcgagaccgtggccccgaacctccccaaacttggcggcccggggcgcgtgggggggacgccccgttacctgcgcggccataaaggagagatccatggtgtcgctgcagccagcgctcgagtcctcgctgctgccgctgccgctgcgggtcagccgcctgcacagttggcggggatcgggctgagcagcgagcgtccggagaccgcacggcgcactcggctgtctctgggcttctggctccagatctctactaggcggagggccccgagcgcgggggcgggcggggcggggtggggcggggctcggcggacggggcgcccctccacgtgaccactccccgccccacccccggggcggggtccgtcagaaaccccaagcgctcgcaatcgcctcccttcgtgggcgggatggggaaactgaggcccgaggccgccccgctggttggtgcaagaaccagcctgcaacccaagtcctgagctgttggcgccccgccccgtgcagttgaacccaacccacccggggctgtgggcagcgctctcttggggctgacacgttatcccgagcctgaggaccaagatcggagtgacctggctttccacgccaacgctcctcccagagtccgg

SEQ ID NO: 5889 - DNA, 1092 bp, Homo sapiens; identical to SEQ ID NO: 5888
  source 1..1092: mol_type = unassigned DNA

SEQ ID NO: 5890 - DNA, 1092 bp, Homo sapiens; identical to SEQ ID NO: 5888
  source 1..1092: mol_type = unassigned DNA

SEQ ID NO: 5891 - DNA, 580 bp, Homo sapiens
  source 1..580: mol_type = unassigned DNA
cgtgtccaggggagcccgatagagcacgcgggaaaagccgggtgtctacgcttccgcgacttaggctgcagagataagagaaggtcaggctctgggaggacgcgaggccgtccaggaatggcagggaggcccgctggggcctgactttggtcctaatggaccaaagcttcgacggagcaaggccgggtgtccgtggtggcacctctcatcagtggacgctggcgaatgactatggaaacaacattcaacagcagtgttttctatgccaggtacacaaccgccttggcgtgggttgataaccatgcctatctcaccgcgtggcactgagccgaccgcacacccagggccccggtctccagggctcgcttactcgcttactgcgtgaagcatccatccccgcaggagccggagcaggaacagggctgggccctggggcgcgcgcatgcgcaggccgtgctccaggaagggcggggcactgagccgagggccggcgcggggcggagggcagggggtggtcgcactctccagggcacctgtgcggtgactgagaaccgacccggcaatccgcgggcccgggcgg

SEQ ID NO: 5892 - DNA, 888 bp, Homo sapiens
  source 1..888: mol_type = unassigned DNA
cgacccgctccctggtcgtctcctccgcggccaggcgcatcctgcagcgcccagaccgccgcgtccccacccgcgtccccaaccgcgagcgctcgcctgggccgggccgggcgcccgagattcgggagagattaggggcccgcaaagcagaagagcagattcagaaagaaaaaaaaaaaagcgagaagtgcgagaaaaatatactgaattcagctaaacacacggcagatgaaaaaaataccttgctcagaagccaaaaacgagctcccgagccgtgagacactgttgcgcccccgccaggcgtgcaggccggatgttaggggggcaacctcgaggcccgatggtggcttcgaccccagggcggacctgcgcctaccctcagcccctgcaactgcgggtcaggagaaagggacctgccatggcgaagaaaaccgaatcttctccaattaggcttctccttaaagagagaaaaagtaggtagttgggcaacttaatccaatctgggactcgggacgtgtgcttgggcgcttcccgggcagctggccggagcgtgtgggttcggagctcccagcgctggccccgcgctgcccctcgatgccaccagcaaacccgcagggcgccttggcgcaggctcgcgtttgcagagccggcctgggaagcggaactccctccggtcccgatgaccaggcctctttagggtcctggctcaggctgcctttgtgggacagagcctcatgaagggacacagaaacagagacagcctctgggcggcgcccccgggatgtggcgtttctgtgccccggggagggggcaccacccctgcctatgcggagcgatccggacgctgcaggggtgacgccgggcagcgcccgctctgacctcccacgg

SEQ ID NO: 5893 - DNA, 1483 bp, Homo sapiens
  source 1..1483: mol_type = unassigned DNA
cgcggctctgggcgctggcagggggaggcttcggcaacgcctgggggcttcaggccagcctcctccgggctggaaggcaccgcacaggggcttccgccaacttcggtcctcgcgcggtcgggacacggccacacctgcccgcgggggtctgcctcccaggccgccgcaggccccccggagcctaagaggaccccacaagcagccaaagccagcgccgcctgccccttgcagaacactgccccccacaagccctgcagaccctcccggctctccagacgcccccacggctctcgcgaagccattcccgcgctctgaatgcccccgaatctctgcagagcccccgcggttctctggaagcccccgcgcccgtggagcccccctcccgccctcgggggcaccgcgggcccccagcccagcccctccgacgctggccgctgccacctcccacgaggcgccggccccgactcacctcattgtcgctgccggggacgggcgcgccgggccaggggcgacccggcggcggcggcggcggcggcggggcgcgggacgcgggcgctagcgggggagccggccccgggcgcggcggctccgcgtctgactgggctgcggggggcagcgggggctcatcttctccgggtgggcgtcggggccgctagctgcggggaagggccgcggcggcggcgactgacagctgggccccggcccctgccatcttggcgggcgcgtgcccgggccggcgtgtgcgcgggcgcgtgcctgggggccgccgccgggggatgggggggcggggggcgagccggctggggtccgggcggcgggaacgcgtgcgcgtccgcctgagactcggggcggcggcccctggcgagtgcgcgggcggctccgagtcctcgagggagaggcgcgcgggcgcgcgggctagtctcagcacagcagccaagagctagggtacgcgcgttgctgttcgccccaccgccctccgaggggactgcgcgcgcgtgcgcccctccgcccgcggccgctgaggtgaatgagcgcgcgcggcggtcaaagcccgacacaaaaggcgcggggccccaccgtccgcgcctccgggagcgctgagcttgaggctgcgaggggcggggcggacgagagtggcggggctgaggggcggggctttgagggaagcgcgaggggcgtggccggggtgggggcggggcgccgggcgggcacgtggcgcggtgcgctccctcccggcgcggacgctcctccagtccccgcctgaccccagagctcacagaggccaccgggggagccagggtccgtgctcgatggccccatgattcccatcacctggccctgctgagcaccctgcccgctcggactcggggcatccctgatccgagggccgtcgaggtcaccggcgactgattccctctctttgtacataaggagccgtggcggggccggagagttgcagctttggggcgatatcagtattcga

SEQ ID NO: 5894 - DNA, 3714 bp, Homo sapiens
  source 1..3714: mol_type = unassigned DNA
cggcgtggccctgctcggaggggtcggcctaaggaagtgtcacttacccggagggtggtcccgggcccgctgaccagcttccacgcctgtcgcttgagctccaccagcttcgtgtggcagtggcggcaccagccgcctccgccggccgagtggccctgctctgggccggccccggcgccttcgggagcagggcggctgccgcatgggtcctggtcgggcccggcgggtagcctctttcggggggacacctccagcagcggcggcggctcgcgggccgggccgccctcggccacctgcagggtgtgggggcggaagcggacagtgagcctgggacgtccgtcggatccagacccctgcgcgccctgccccagcgtgacgctcttgccaaagttaggagccctgggcacgaccctggcgctcacccactccctccatccccggaggtcccgcctgcgggtccgctaccctcagcaggaggcccggcccccagggatccagcgcacaccgcgagtatcttcgccgtcccgggcccccgccgcccgcctccctctccaggccgggccgcgcgtaccgcgggctgcgcagcgcacagagggacgccgcggccgaccatggccggggcgcgggaagagcccggcaggcgctcccggccacgctggctctccgggggcgccgcggctacgtgatccggccccgaggcgcccccatggcccggcccagccgctcggaagttcgcagagcctgcgagtgtcgcgaggagcgcggtggctccggtgggcgcgctcgggaggcgagggcggggccggggaagggcggggctcgggctcccggggcgggcggcgaggggcgggagcccagagagtgccccgcccttgcccagtgctgggcggcgcgtggggggggtagggtccccgcttccccacgcggccccgcgcactccaaggaccccaacctgttaggtgagtccctgccccggggaggggcgctgggggcggcggcgaggatctagttgcgcgcgcgcatgcgcctcccgcccctctcccgggacaccagggctgcgcgtctcccaggaggcgccgacgcccctccctctacaggcgggaaaactgaggctgcggaggggacgctcttgcccaaggcccacggcgaggtgggccgaggaaggggcgggaccccggccccgagactcccaggcgcctttccagcaagcccagcgtactctgcgtgtcgcgggccactttaggtctaactgtcgcgcgtgggttagtgtcgccgcggtgtgcgcctcgagccgggcagcgaccgcgccggcgtatctgtgcctcggcgcgtctgcgaacggcacgtgtctttacagccgcgcgtgtgcccgcaagtgggtgtgcgcgccgtgccgcccgggaagcgggaggtcctgcgggcgtgcgccggacctgttgtcagcaggcctggcagatgggaactcagctccggaattaattgcttgtttgtctccggctgggaggccgcccccccgcccttccctggcgaccagttgctctgtgcctagccgggccccaaatgtcgccggcatccgcggccgcaggcagctccgggccaggctccgggtcagccccaaagcccgggtcaagccaggcgggcgcggcgggcgggctccccgtgacgcgagtgccccctgccggccgctgcgcacacggctccgagactggggagacagcgccgcgcgtcccaggcctgaggcgcactcggaaactccgaaggtcgtgacccggcggagaccaggacacgcggctgccggcacatacggtgaggccttcgcagagactcagtacgtcaaagtgaccctttccgttttgcccacccccttttacttggataagcctccccgcccacgcacgcactccccagaaagtggggtgggtgatcccctcccggctttccgggtcgttgatgaccttaggggttcgaaaacgcaagggggtatggaataaagtggcaggggctctccactctttctgagatccgtaagcctgcagtcgctttccacccagcctggggggccggaagcgcttcccctacccgtctcttcgcagcctggagaatgaaaacgggcgtcagcccacatctggatctgggtactgaggacaacacccaaaccccaccccgcactgccggcagacagcaccgcctcccgccgctccactgctccgggacacacactctctatatcccgtccccccacccacacacgcaacacagaagcacgcagcggtcgggagcaccggtcctgcgcccctggccagccacacccgcaacttcagcgcttctaccgccgcggcgcttcgggaagcacaagctcacatcccatatccgcagaacacggggtgcacaaggctggagtcacctcgggggctcacgatcagtcaggggccccgaccccctacttcgcccatcctagcaaggcgcaaggtgagcccgagaatccctgcgctgcgctctccgccctagccacagcctccgggtgggtccggttgggacacagccttgaaggcagagggagacttggacaacgctaatgggggaaagtgcggcagcgagtcccagcccgggctgcgggacgcggctccggacctgccgtctccttcccggcgcagcacccccggccgcgcgagccgcgcggcaaagtaacgggacggcgcctacgccgcccgcccccctcccgacagccctcaccttgcctcgtcgccgcaggaggtggctggtgaagcccaggatgatctccgagtccaggcagagcgcccccatctccagcaggctgggagccttgcggggcgcgccgcggggcggctcgggcggctggggcagcgccatggaagagggaagcgcggggagcggcccctagtgcctcccgccaccgccgccccgcccgcgcgttcactggccgcgcgcccgccgccgccgcgccccgcaccgcgcagggccgcccgtcaagcccccggtcctccgcgccccgcgcccccgagccctgcgctcgctccgcgccgcgcgcccccgcgctccggccccgcccgcctgcgccgacagcgccccttccgccccggcggcgagccagacaccagccacgcggactggaggtgtggggcgacggccccgcgcgccactgggcggaggttggaagccagaatcgggtcgcggtccgcgcccacctgcctcgctagcccccagacgtcggtgtctactgccgggtatccggcagggagagggcagcgcggctgctgtaaaacccttccgactggggcataatcgcagccccttccccctccaatctgtcctgaggacacggcgcgttggggtcctggcccatggaaacgctcagagcccagtgacctgtgcactccaccccgcccacgctccagagcccccgttcaaccttggcctatggacctccaaggcccaccccaaccggaccacggagcgtgcgcagcgggacccgcagtctgcgcctccactccaggatcccgattgtgccgccacccgtggccttccctgccccgaccccgactccctgagggctggaagattcgggctggctgccgggcacgacgactttactttcagggtccgaagctaggggcgggggtgggcgctctgcctgggtgcaaactcaagcccgggtcccgcgctcctcctgtgggctgccccagcctcgcgcgc

SEQ ID NO: 5895 - DNA, 1266 bp, Homo sapiens
  source 1..1266: mol_type = unassigned DNA
cggctcgggcgccaggtagaactccagctcgatgctgccgccgtcgggggagagggaatccgttgggagggacagtcgggggctggggaaggaagagcgggtgctgggagggttcaacactggcggagccccaggtggcgacgcgggcggcgagagctgctccgaggcgggggcctcgggcaggtcgctctccacgcagtacacggagcagaagacttgtctcttggcgagggacgggcgccgctgacccagcacgtccaggaccagtccgtcggcggcccccacgcgggtcctgggctccagctcttcgccggggggcgcctcctgctgttcatcccctccctcttttcgatccccagcttcctcctcttcctcctccagctccaactgcagtggcaaggtctggggattgagaggcccggtgagtgccagtcccgcaggctgcgccggtgctcggctcttactccagcccgggggccccaggctcctcgcgggctctggggcgctggtgtccgcgcagccccagtcgcttccgcagccaccgccgctcggctccgcggaggcggcgcgcagcgggggcgcccgggcgctgtccccctgaggcctcgggggctcagggtggcccgcagtgccactggccagggtctgcgactcctggggcccgccgccgccgctcaccgtgctctgctcctcgcccatcgccgcccgcggcccgcgccgccgctgcccatccagccgccgggacccccacccggcgcccgcgggcagcgggggcagtggctcggctcgactcgcggctccgcttctgcttccgggtccttcctcctgggctgggacgccccaagtcccctccggggagcccgtgctccgaggctgcggcgcgtggggagcctggcccggcccgccgctcctcctcgtactctggcgcggcggggcaccgcctcgggggcgccgagggccgctcgctctgggctcgggcgcgcccgccccacatgcagctcggggcggcgccgcagccccagcgagccccaggcgggacagaggggtctgggaggagacggccgtcagtcccgcgccatcaccggtcccggctgccggacgcgcggcccgagggcggtggtcaaagggtcgaggggcctgtggcgccgccgcggcgcgcaccaggaggtgcagccggagcgctggccagccgcagggcccctgggggagaggccggagcgggcgacctccctctccccgcgcttcacctacagccctcctcgccgc

SEQ ID NO: 5896 - DNA, 1316 bp, Homo sapiens; identical to SEQ ID NO: 5773
  source 1..1316: mol_type = unassigned DNA

SEQ ID NO: 5897 - DNA, 10783 bp, Homo sapiens
  source 1..10783: mol_type = unassigned DNA
cgagccgggacaaaggcttccaacgggagcgggacatttgtctacatttcgctcattgtccgcagcttagcaatcggtttgtatttgtgtttgcccgggtccgaccacccaggacgcgccgacgaggggcttgctctaacctgggccattgtcacccacgtcacatactgggggcgaggcagctagggctgcagaaagccgccgagcggctcggggagaggtgccctcacccagcgctggcaacccgggggcagctggggcgcggcggcgtccgctgcagctgcgcgcgaggaggacccggtgcccgcgcgctcagcttggcccgcgcggaggagcccaggttgtgggaagactagacctggaccccgcaggggtggccttctgtgcccctccccgcccccagacaaagctccttcctgacactcctctggggcgaacgagcatcaggtagccaatctacacccctgcaccccccccccaaaaaagttttaactagaagaaggggtggcaaatgcggcgtggtcttttccaaccccagcgccgaggaggaagtgcaagtcccgggaaagttcagttcccagagccgagagtggctggaaacttcacactaacctgacttaacctggaaacgtggagcgcgtactccgaacgcacccaaggcgtccaaaaagagaccacactaaagaactcgcgtgggagaagaaaactggggagaaaacgaggcatcgtcgggccacccagcgacccccctcccccgcagctttctgggtcttcacccaggctggagacacaacccccacccccacccccgcaatcccgccccgccgccttcccgctgctccacctctagccagaggctggagagggagggggccggagagggagggataatagagggcaggaaagagcagggccgtctgccctttcctccacccggggaaagaggcccgcagagcccagaggcagcagggccagggtccgaccccagacgaagttggagctcctcactcttaccccgccctccccgggaccgcccgcaaagcagaaagtgaactgcgcgtcctccttggccgcagagaggtggaggcggggggttgggggtgggaggtggggggaggcggagtgaaggaaataaatgagtctttagcaaataaagggcggctggaagggggcgggtcgcttggtggtggctctggccggcccggagcggagctctctcctgggttttgggctctctcgcggttaactggaatcaattacttgccttgtcatttctagcactcatccttaagcctcaaccaaaatattgacctaggaggcttacagaagttgggctcttgccatttgaaccggatcttgtttaggcaaccaccaacgatggaaaggagagatttccgcagctcggccttcgccccctcccccttttccaaaggcgccacaaatcgccaattttccggcttgccgggggtgggcgcgcgggggcggggaggtaggaaccggtgaatgttaaagaggattttttccctcctcctggtttctgttttgttttctcccctcctcctccccacccccaccttttttaagatgcaatttgttaaaacggccctttcaagtgtgtggactcgcgagcgacgcggtggccctttgtatgtaaatactgggtttaaaaaaaaaaaggctcgccccgtctttgcaattaattgacacgttacacctctcatcttgctctagagggccgttggctgggagcgcggagctccccaaaacccacaatttcacatctgcaaatactgtcttcatccacttgactcccaagacccgcccacacgtggccaacctttgcgtttttaatgtctcttcccccttttttccacccttctcccgctccctctctcgctccccctccctccctctttctttccctccctccctctctttctccccctctccccgcctccccaggttcgtgagtggagcccagccttatatggactgatcgctcgggcaatggcccattttttcctcgccaccagccgccaccgcgcgccgagcggccgccggagcccgagctgacgccgccttggcacccctcctggagttagaaactaaggccggggcccgcggcgctcggcgcgcaggccgcccggcttcctgcgtccatttccgcgtgctttcaaagaagacagagagaggcactgggttgggcttcatttttttcctccccatccccagtttctttctctttttaaaaataataattatcccaataattaaagccaattcccccctcccctcccccagtccctccccccaactcccccctcccccgcccgccggggcaggggagcgccacgaattgaccaagtgaagctacaactttgcgacataaattttggggtctcgaaccatgtcgctgaccaacacaaagacggggttttcggtcaaggacatcttagacctgccggacaccaacgatgaggagggctctgtggccgaaggtccggaggaagagaacgaggggcccgagccagccaagagggccgggccgctggggcagggcgccctggacgcggtgcagagcctgcccctgaagaaccccttctacgacagcagcgacaacccgtacacgcgctggctggccagcaccgagggccttcagtactcccgtaagtagcaaaacttggctgccgaggccgtggtcccctccattcctgcagccgcagcccgggttggacgctgggagtgaaaggggaaggggccatgtaagcccggaccccctcactcggatccgtagaaagatttttaacacctgtataggatgtcctctgccctcctcttcaagcctccttagttccgggaaagaacttggtctccaaaatttttttcaatgcgagaagttaaggagaaagagggagaagggctatacctcccaggggctggtatatgatgtcaacccggaccgatggctccagccgcagcccccggactccggccgctgggagggactggcctggcgccctggaggtagccagcgagcctcgtccgggtacgggtggagggtggggaggcttcgggtggcccgggtataaatagctcaccctgccccctgcgcgatcatagaggacgctttgtgcagtgcagggggtgtctagaaggcccgaaagcagaaacgaaagcccccaaaaacctgccttaaatggccgagccgatcaatgctgggattgtggggtatttcttttaaaaatctgcccacgtctcgccggagaggaaaccgcttaagggcgccggagcccttaacccgcgatgatcttcagtgccacttccccccccaaattctcacccacactatgtgagccccttgaaaggcgagcccctagcccccactcctacggatttccctctttaccctgggaggtcccgacgtcttcgtcaggcgtagaggaaggcaggggtcatggcaaaggcagcggggctgggctgccaggcgcggaggtccagggtcgcacggaggatccagggtgctccgagtctggtgcaggctgcgcgcggcctccagacgcctgacgcgcttctctctccccctccccccagtgcacggtctggctgccggggcgccccctcaggactcaagctccaagtccccggagccctcggccgacgagtcaccggacaatgacaaggagaccccgggcggcgggggggacgccggcaagaagcgaaagcggcgagtgcttttctccaaggcgcagacctacgagctggagcggcgctttcggcagcagcggtacctgtcggcgcccgagcgcgaacacctggccagcctcatccgcctcacgcccacgcaggtcaagatctggttccagaaccaccgctacaagatgaagcgcgcccgggccgagaaaggtatggaggtgacgcccctgccctcgccgcgccgggtggccgtgcccgtcttggtcagggacggcaaaccatgtcacgcgctcaaagcccaggacctggcagccgccaccttccaggcgggcattcccttttctgcctacagcgcgcagtcgctgcagcacatgcagtacaacgcccagtacagctcggccagcaccccccagtacccgacagcacaccccctggtccaggcccagcagtggacttggtgagcgccgccccaacgagactcgcggccccaggcccaggccccaccccggcggcggtggcggcgaggaggcctcggtccttatggtggttattattattattataattattattatggagtcgagttgactctcggctccactagggaggcgccgggaggttgcctgcgtctccttggagtggcagattccacccacccagctctgcccatgcctctccttctgaaccttgggagagggctgaactctacgccgtgtttacagaatgtttgcgcagcttcgcttctttgcctctccccggggggaccaaaccgtcccagcgttaatgtcgtcacttgaaaacgagaaaaagaccgaccccccacccctgctttcgtgcattttgtaaaatatgtttgtgtgagtagcgatattgtcagccgtcttctaaagcaagtggagaacactttaaaaatacagagaatttcttcctttttttaaaaaaaaataagaaaatgctaaatatttatggccatgtaaacgttctgacaactggtggcagatttcgcttttcgttgtaaatatcggtggtgattgttgccaaaatgaccttcaggaccggcctgtttcccgtctgggtccaactcctttctttgtggcttgtttgggtttgttttttgttttgtttttgtttttgcgttttcccctgctttcttcctttctctttttattttattgtgcaaacatttctcaaatatggaaaagaaaaccctgtaggcagggagccctctgccctgtcctccgggccttcagccccgaacttggagctcagctattcggcgcggttccccaacagcgccgggcgcagaaagctttcgattttttaaataagaattttaataaaaatcctgtgtttaaaaaagaaaaaaagaaaaaatccctgccctcccgtttgtcctactgcgccgggccggaggcctgggcctgggagccgggcccggccgcccgcggggctcccacaggcggttcctctcgggcggggaggccgggggtaccggggccctggggcgggcggggctcccggtgcaggcccctccgaccacaggctgcaccccgcgcctaggattggggcggggaggagaacgctcggcctccggcctgcgagcggtcggccggaagcccagggccgcccaccctcccccgcatctcccctggtctcgcgcgctgtctgaaccccgggcggcagcgtccggctacgggaggaaaagtgacttcgggagccgcaaaggcgaggagagcaaacccccctcgctggcccaaatctatgagtggctccttcagcctgagaagctgttgaagccactacactcgatgactttcactttgttacatttgacttacctcacgctaagaaagtgggtgggtgggggtctgaggttaagactggctgccttctccccactccccactccttttcaaaatctgcgggctggtgctgacctaggagaccgctaaggctgggggtgggaacggtcagggcgcgcgaggctttggcttagggggcttgggggaagtacgcggggttctgggctcgggggagggaggggatactgcagccctccctaggatctttggccccaggaagccagggagcgagaatctttggcaatcccagcaaaccatgcctctcccttcccttacgctcccatcctttccgggcttccaggcctctctccggggactggatcccgggcctccttccctccagcgttcggcggtccgaaccagggtgtgcggtccccccaggtcagcccttgagcgtggaactgggtggattgctaggaagtagaggtttgggggtggggtgagctccccggatgggaagtgggcacacagccccgggcacgcccgggaagggcgcatccatctttccggcggggaacggattccgtcccacccttgttgctggaggaagatctccttggcagatgctggcgcacacttggccacgcgggggagcgtcttaggaagcctggccaactggaggatgagcctttctcctctatctcgcgggtttctaaaaatacttgggactctagctcagagcccagcgggtgctgcagacgctgagggactgaacgtcggcgcatttggaaattgtatctctgttctctccgaagctgcaccatcaaggctggggggttgggtggcagtgaggaggccgggcaaaaggagcggtcccagctgactttctcgctccctgtagttgatgatcaggtttaattcaatatctaaagcaaacatgattatccgtgcgaccaaatctgtgcgtcgatagcactctgcgcagcagcccagggacgcgatgacactttattcccgcgttccacaccgcccctggataattgagggctcggaagtctttctaataccccagtaaaggtcctttcccatctccgggctcatcctcggggaaagggcagtttttctaaatgctaaaaggtctccctttgttctccacactagcttggcaatgtttgggggcttatgtcttactgtttttaaaggccaacgaatttctcccaaatagtttgttgtgcaataattgaacgcccaacctgccctggtactaaccactcaacatccacttgcaacttcccctaatcccaaaatcctcttgggaggaaaggtgagggtttcaagtctcttggagcggagctgtcagaaggcctgaggccattttgacttttccaggccccagggcttccagggtgagaatgatcacaagagaccctcaggtttccagagaggaagggggaagcgtggaaggtcctcaccctggcaggcttccaccacttgctcattgaggacaaatttggagctgtggccaggaccgcgggcctgcaatctgggtgtgcgctcctgtggccggccgggagcccgggaggtggacccggcgcccgcctctctctgtcctcgggtccccatggagtcaataaaagcgcctgcggagccctgtgtggccctaaccccagcgccctgggagcgcacccggcgcggggtccgcttcagcagtctatcttcgcccaatctacagcgggcggtacaaaaccgcacaatgggaaagctgggagccggagatgttagaggcgtgcatattaaaaagggacagagaaaggatcgcggggacagagagaggggaagaaggagaaggggcccgccccccaccccccgccccaccccgcaccattcagcgcgcttatcgccggcagtgaatcccggagtcaggcagaagtctccttggggttttgttgggcctgtcactgggtccctttgtcatccacgggctccatgctggattccatatggccagctgggccgagggagcgcgaggagggacccgcacaaaacctaaattgtgtccggctttcaaaccctgtattgttgtctgtgaaaggaagacgcattaaaaattcgtgctatatctattggggaggaggctggaggaggggagaaaaagccacccctgtctttgatggcttcggagggcgcttgccccgcctaggccccgtgacactgaaagttggatctctctcattctgtctctctctctcaaaatctctctttttctctcttctcataatctcgctctcataatctctttctctactttcataatctctttttctcataatctctctcccttcctcacttctctccttcctctcttctgtctccttgactctaacgctgggatgggagtccgcgaacctgcgtcttcagggtttggctcacttgtgcgcactttgctcactgctgtgtgtgtatcaggaaactaacttctgcctgggagctctgcaccatcggaccgtcctggggctcaggaggcaactcagggtacccagggcctgggtgatgctcggtcccctacgggcttagcggctcctgggtagatgaaaatccaccccctgatttcgcaaccgaccggccccgaagcgcccgcgcgcggagccgcccttccactcaccgcgagaaaggttctgagaggccaagggtgccgctcagtcccgggcccagctagacttgggctgcagccggttccaaggcgacttgcgcccggccggaccacttggttaccaaccccgaagagctaaagacgcgcgcgttcctttgaattatgcgcggggatccatcccactggcctcttggtgcgatgggaaaccacttcagaaacttcttccaacagcgtctctccccatgttggaggagggagatacttcctctttaattttcaatgtctcctgtatcgcgtgcttacaaaattcagtaccagggagacacagcagggcttccaaggaatttgcccattttttgcctcctctaagcggtccaaattggcgcgaggcagtcggaaataatttgggtcatgccttctcccctgcaattgccaggtcaaaactcccataagcagtccccaaataaaccatatgtactaaacaaaaatagtttatgctgagctctgtggaaataaaaactggaacccagatatgttccccacaaagtcactcggcccttaatgagcagaactgagctggtggaaattccgactaatgggaaacttggatgcgccccctttcctatttagtacaacggtcatatttagtagaatcagataatttggtaagagtggaagtcccccttcccaacattccccacctcagatggggaaataacttatttccttacctattgactgttgggcttagttgagacctggtgtgtatttctcgagccttttcaagagcctggtcattgaaaagctaatccaatatttaccgagcataaggacagttctcagacgtatttattaaggcccatcgctaagtgattacttggactgaagacaaaggccaggggagggggcgtctaggcataccagatccttctcatttgggctctccccacccagaaccaggaaaccgggagcgcgcttgtgcgctgctgaagttcccctcccggtgttaagtggcgggcggattagatactgtgctgggcggtatttcaggaaatatgtacttgtggctccctgagaggccaagcgcagtgacactctaaaccgtgtcgatatatcatcttttatccaggatctgcaaataaacccctgatccccccggcgcattatagccgccgctatctcgccaaggaagcgatctgagttttattgctttcaccaacgccccgagacacacacacacacacacacacacacacacacacacactcctctctcgcactctgatttttaaaggctctattttttccctcccgaggcatcgttattaataaagaggcgaataggcctcagcgccgccatccgagcaagcggggaaatgtgggccagcagcccaggcccgcgcgcggatcccgcgtacgctccacgcgccccctcgggccggagaaccgagcgtgtgccgcgtgctgccgccgccaggaggcgcccgagcccagcgttcccgagcgtctctgcgcgcgggtccgggcagagcccgggagccgccggaggcagctgcgcatcagcggactcgcggcccgggtcggagcccggtgagtggtgccaagaggtggcggcgagtcggaaccttggggagagccgcgagtcagacggcggcgggtgcctgggaggtgcgagtcgacctgtgttcggctgtggttttcccgccatgcctcttctcctccacgtgcgtaccaccgcccgtcccagccccggtttccatcgtgtttgggcacagaccacagccgactggtccaggagcgctctggccactgggagggccccaccaggcgccagggcgcgctgtctccgcgatctcagggcccctggcggcgtcggccgcgcgggtggacgcggagagggcggtgctgcgagggcccggagagtgggtgcccgcgtggggaggcggcccgggagcgcgggagcgatgcggaggagggacccggtttggttgcaggtttccggggcgggggttccgggaaggagagaccctcgccttccgcccgccctggatccgggtcccgccggacccccggctcctgccgttcgtcgcctggaagcggggcaggcgcacagtccagacgccagggagagacgcctcgccgacccagaccgtggggtcagggcccgggaggcaagaacgccccacacacagcagggcaccccaggcaaccctcactccgtgctgaggcctcggctagggtgcaaaggtgtccgggaatggaagggacacgagggtgtggacgcctcgcactctactcacgcctggtgccttctgagaggctgggcgtggggcagagggtaggggacaagggggtgacattccttaaggtcctccccccaacaaaagtagggcctgcagttccagcttgattcgttgattgttgggtggaaccgcctcacatcaaaggcatcgtggctccaaacactgtcccctttacttttctaagcccccgcttcaaaaccagctgtcggtgggccggtgagggcgtctgcagtacccaggctttccgcggggcggcgcggttggataagaaaaggcttcccggctggggcgcgcagcgcagctcagacacctgcgggactcgagatgtctccgcga

SEQ ID NO: 5898 - DNA, 810 bp, Homo sapiens
  source 1..810: mol_type = unassigned DNA
cgagtgccgacccgcctgggcgggaccctttgagcgcatcccctccgagcgcgccagtgtctctgggagaggcctgtctgggtgagggactggacgccggcctctccgcaagtcggccggctgagggtgggggccgaggcggggtcgggaacagccctcggaccagggcccagacaacctcgcccggcgcctgcctccccgcgcgcacctgccgggcccgggggctgctagaagaggccgcagcccgcgccctccgggctcccacgccccgcagcggcgccccctcccccggcggcacggattggctgcggcgccgctccaagcccgcctcgcgctgccggcggggggcgccgcggaccagagcgcgctgcgccgccaccgccgccgccaccgccgccgccgccgccgccgccagcagcacagcgcgcctcgggctccgcgcgccgccagctcctggcccgcccgccggccccgccgcgcccgccagccccgcagcggagcctcggcccggccccgggccgccgccaccacgccgcgcgccgtactccgcgtcaagaatggggcggccaagctgcccaagccgcccgccgccgccgccgccgccgcggccgaggcgcccggcgccggcgcgggcatggagcgctcgcagagccgcctcagtctgtccgcctccttcgaggcgctcgccatctacttcccgtgcatgaactccttcgacgacgaggacgcaggtaagcgcgcggcccgccccccagacccccggggtgtcccgggatccaggtccggtagccccctccccgacccgtgcgc

SEQ ID NO: 5899 - DNA, 1142 bp, Homo sapiens
  source 1..1142: mol_type = unassigned DNA
cgcgtggagcgcggccccggggcagcggagagtggggttttaatatctagcacatgtagaccctggggcggtgctgctaggggcgcggacccgggaccaccggagcacttgcaccgcggggaaagctgacagggcgcgcgaccctaggaggctgccgcgccgcctggtgcgtgaagctccagggcagcggagcgcggggaccttgaaggctgtcgcgtgcaggcgaaggggccgcagggtggtcgctcctgggagagcagacggggaagaaggcaacgggagggagggcgtagcgcgagcagtcccggacgcgggctcaggaactggccgcgaggagcgcaatccagcaggcgcgccagggcccccggatccaaggtgcggggtcccgattgggcgcctggacgccccgtgacggtggcgccgctgccactgtcccgaagcgaggcgaggccaggcgctgcgctttcggctgcccgccccttctccccgccccgcgctcagtcccctccctccgtcccgcctcctgcctcgctccctccctcggcggctgctgcgccgcgctcccggcgcactcggagcccggcggggaccgggaggcagagacggggcggccgtggctccgagggcgggagctgagccgggccccgggaccgaagtttggcggcggctccgggaggcagagcgggctccccgggcgacttccaggcccctctcgcgtcctcgccccggacccgtgggcagccggggggaacggaagccgcggccgggccaactccgaggcggggacgccgcgacgggaacttgaggtgggaactttgcgcgctgcagcctcgccgggcgccaccaaagcgcgaaccggaccccgagcctgcaaactcgggctcgggggcggctgcacgtggccgtggccctgaactccctgcgggggcctcgaaacccgcctgcggggaggccagggcgacagaggactcgggagtcaccgctggtgcgtggcggcgtggagcgcgcttgttacggccaaggtgcgggtccggcttcggttcatcccaaggggtcaccgggatgcgaagtccgggacgttcgccgccgcggtgaccccggcgggggcgcatcccggctgtgggccgaggtttctcccccga

SEQ ID NO: 5900 - DNA, 2885 bp, Homo sapiens
  source 1..2885: mol_type = unassigned DNA
cggaggctccgggaaagcccaccaagcctcacgcgtttcgctgatagatgcccaggaagcggctggcagggaagaggcggtcctgcagctcacagagctcccctcccacccccggggagccccaggccgcgctgccctccaccttcccgccctccccggcctgcaacgctcgtggcgtttttcaacaggttctagaaactccctctcactctgcccctcaagcctggccacagggcgccccgagcagggagtgtgcgggctccgggtacacgctgcgccgcggctgcaccagagcgcccacgaccctgaccccgacccgaagcggcccctcagcgggacagggtgttggcgctggcgctgctgctattgcggcgcgcccccccgctctggcccctgcgtgtcgccagggactcttgcgctagggtcagactcaaagacggaccgaggcgggtgcccacctgggacgcgtgcgtttggtggcggaatccccggggcggccggaggcggcggccggggagtcgagaagcaagtactagcgctccaggaccgcgcgcgccgccccgcgccgccccgcgccgcccctcggtccagagcccccacccccggcctgtgagcctgcggcgctggtggagcccggctccaggaagaggagctcacccggtcccccctgattggacagcagcgaggtcccaccgggcgcctccgcggcttaaaaccgaagcgggggcgagggggaggtagagcccgccccctgcgcgtcgcggctgggagggagaggaggtgggagagaaggaagaggcggaggaggcagcgggcgccgaggctctgggacccgcaggcaagccagaccgacgcgcagagccgggagcctcatcgcagcggcagcggcagcggcgggctcgggccggcctcgggggctgctcacccacatgagcatccgcccacccggcgagcccccgagcccaggcggcgcggccatggccgagctcaagtcgctgtcgggggacgcgtacctggcactaagccacggctacgcggcggcggctgcgggtctcgcctacggggcggcgcgagaacccgaagcggcccgcggctacggcactccgggcccgggcggcgacctccccgcggcgcctgcacctcgcgccccagctcaggcggcggagagcagcggcgaacagagcggggacgaggacgacgccttcgagcagcggcggcggcggcgcgggccagggagcgcggcggacgggcggcggcggccgcgagagcagcggtctctgcggctcagcatcaacgcgcgcgagcggcggcgcatgcacgacctaaacgacgcgctggacgggctgcgagccgtcatcccctacgcgcacagcccgtcggtgcgcaagctctccaagatcgccacgctgctgctcgccaagaactatatcctcatgcaggcgcaggccctggacgagatgcggcgcctggtggccttcctcaaccagggccagggcctggccgcgcccgtaaacgccgcgcccttgacgcccttcggccaggccactgtgtgccccttctccgcaggcgccgccctggggccctgccctgacaagtgcgccgccttctccgggacgccctccgcgctttgcaaacactgtcacgagaagccgtgaccgcgcgggcccccggccctcccgcacgcgtcctccgatcgcccctgtgactgtctctctgcccggacaggaaaggcctggagggaccctgcagaccaggaggagggggcccgacttcgcttccagcctgtgcgcggtggacagtttagcgcagcgggaagcgccaaggccgtcggggcgcgggattgagctcgagagccggacgctggactctgcgcccgggaactcgcggcacccactgggtattgtcgggacccagcaagtctaggaacgggggtgggtagagcatccttcgggcactgccgttcgtccccaaaagaagaccaccgcggggtcccagggccacggcgaggacgggcactggtcagattccggacaggcggtcctggccccgggcgcacgaaaggtggagacgaagaaaagccggacttactggctcctgatcctcttgcagtgggcctcgcgctcccgctccagccggcccttcgtgctaaactgcagggcagtgctctgttcctgaggacgcgcgtggccggcacctcccacctcggtgactccgagactccgcagccctgcggagagcccacgatggccgtctgcagaggagctggaccgcgggcgcaggaagaccccggggaaggccttttccaagtaggagtttgttctatttatttgggaattggacgccgtcgccggctgcctcgaagtctgaggaatttgtcccctaaatgtcccctggcctcccccccccgccgccatccgctgcctgggacgtccgcggggtggagttggatggagaccgctttgcgggccctctgcctcggggggctgcgtggaggagggtcctcacagcccgcgccctacttaaccctgacggtcaggggagggccccgtctagccctggtgtccagcaaaccccctccccaccgatcccctctcccttccgagggaggaggccgggctacgggtgagtaagctgctgcgggccccgtgccccgccgggtgtgaacggagatgcgctgcgcagtgcccgtcctgcgcagctcccagctctgccaccatccgggatccagggagccgggcagggtgcccccggggacccatctgtccgcgccggtttgcgccccgcggccccgccgcagtatccggctttattaacccaatttcctcggctgtcggtaatgccaaggggagagggccgccgccctgcaacgcgcctgtctacagcgt

SEQ ID NO: 5901 - DNA, 1460 bp, Homo sapiens
  source 1..1460: mol_type = unassigned DNA
cgcgcccagctggaatgcagagatcgccgcccggctacggcgcacaggacgacccgcccgcccgccgcgactgtgcatgggccccgggacacggggccgccgctgacacgcgcggcctcgccgccggccccgccgccctcgccgcgcccgccgcgcccgcctcgccgcccagcccgcagcgcagtcccccgcgcagccccgagccggggcgctatggcctcagcccggccggccgcggggaacgccaggcggcagacgagtcgcgcatccggcggcccatgaacgccttcatggtgtgggcaaaggacgagcgcaagcggctggctcagcagaacccggacctgcacaacgcggtgctcagcaagatgctgggtgagcggcgggagggcggcagagaagggggagagggcggggggggctcgggccggggtggggcggggggggcaggggtcccgggccgcggggtgcgggggctgcgccaaaccctcgcggggcgtcccgggcgcacggagggctcggcgcccacccgcccgacggcgttccactcactggcgcccacggcccgcaggcaaagcgtggaaggagctgaacgcggcggagaagcggcccttcgtggaggaagccgaacggctgcgcgtgcagcacttgcgcgaccaccccaactacaagtaccggccgcgccgcaagaagcaggcgcgcaaggcccggcggctggagcccggcctcctgctcccgggattagcgcccccgcagccaccgcccgagcctttccccgcggcgtctggctcggctcgcgccttccgcgagctgcccccgctgggcgccgagttcgacggcctggggctgcccacgcccgagcgctcgcctctggacggcctggagcccggcgaggctgccttcttcccaccgcccgcggcgcccgaggactgcgcgctgcggcccttccgcgcgccctacgcgcccaccgagttgtcgcgggaccccggcggttgctacggggctcccctggcggaggcgctcaggaccgcgccccccgcggcgccgctcgctggcctgtactacggcaccctgggcacgcccggcccgtaccccggcccgctgtcgccgccgcccgaggccccgccgctggagagcgccgagccgctggggcccgccgccgatctgtgggccgacgtggacctcaccgagttcgaccagtacctcaactgcagccggactcggcccgacgcccccgggctcccgtaccacgtggcactggccaaactgggcccgcgcgccatgtcctgcccagaggagagcagcctgatctccgcgctgtcggacgccagcagcgcggtctattacagcgcgtgcatctccggctaggccgccggcgccgcccgggtccctgcagcgcttcctcccgcagcccccgcgaccgatccgaccgcgtcgctgccgctctgctctctcatacgcgt

SEQ ID NO: 5902 - DNA, 1560 bp, Homo sapiens
  source 1..1560: mol_type = unassigned DNA
cgttctccaaccgaaccctccctcctgggaaccgcagcccagcgcggtaactgagttaccgcaaccgggcggtggggaggaagggtggtccaggaaaccggcgagggagaaaagcggtggaagggagagtcttctccctggagcggccccagcagtacaaagtgctggtcacagcgccccttccgcccctagattgacgagcagtggcgtggagccagcgcggaggctgccccctccccctcccgagcccgcagcgcggagcgcggtttagcaccaacggagccgggggcggcgtctttgggatggaaaagggccaaaggggaggagtggggtgggggtgggggtttcactggtccactataaaaggaccgctcggctgcccggttcttgcactcgctggaaagcggctccgagccaggggctattgcaaagccagggtgcgctaccggacggagaggggagagccctgagcagagtgagcaacatcgcagccaaggcggaggccgaagaggggcgccaggcaccaatctccgcgttgcctcagccccggaggcgccccagagcgcttcttgtcccagcagagccactctgcctgcgcctgcctctcagtgtctccaactttgcgctggaagaaaaacttcccgcgcgccggcagaactgcagcgcctccttttagtgactccgggagcttcggctgtagccggctctgcgcgcccttccaacgaataatagaaattgttaattttaacaatccagagcaggccaacgaggctttgctctcccgacccgaactaaaggtccctcgctccgtgcgctgctacgagcggtgtctcctggggctccaatgcagcgagctgtgcccgaggggttcggaaggcgcaagctgggcagcgacatggggaacgcggagcgggctccggggtctcggagctttgggccagtacccacgctgctgctgctcgccgcggcgctactggccgtgtcggacgcactcgggcgcccctccgaggaggacgaggagctagtggtgccggagctggagcgcgccccgggacacgggaccacgcgcctccgcctgcacgcctttgaccagcagctggatctggagctgcggcccgacagcagctttttggcgcccggcttcacgctccagaacgtggggcgcaaatccgggtccgagacgccgcttccggaaaccgacctggcgcactgcttctactccggcaccgtgaatggcgatcccagctcggctgccgccctcagcctctgcgagggcgtgcgcggcgccttctacctgctgggggaggcgtatttcatccagccgctgcccgccgccagcgagcgcctcgccaccgccgccccaggggagaagccgccggcaccactacagttccacctcctgcggcggaatcggcagggcgacgtcggcggcacgtgcggggtcgtggacgacgagccccggccgactgggaaagcggagaccgaagacgaggacgaagggactgagggcgaggacgaaggggctcagtggtcgccgcaggacccggcactgcaaggcgt

SEQ ID NO: 5903 - DNA, 5118 bp, Homo sapiens
  source 1..5118: mol_type = unassigned DNA
cgcccctcctcgcgacagagctcccgagcccagcgcaggccagtcctcgcttccccgcggcccctggctcccctgtcgccagaacgcgccggcgccagtcggctcacttggcgtcggaggtgaggcgcggcaggctgccggcgcccatagccgacacgtggtggtgcggcggcggcacctggcacatgctgcaggggcagggcatgccgccccagtgctggaagcccccgctcgccccactgccgccgcccccgccccccagcggggcggccgcggcagcagacggagacttgagtaggccgtgcggtggacggatggagccgaccgacggcagcccggatccgggcagagaggcgctggacacagccgcggctgcagcggcggcagcagccgctgcggcggcgggcggcaggatggggtggtgcaccgcggggtgatgtgcggcgtgcgctgctgctgccgggtgcgcggtggcggcgggcaggggcgcggagtgcgccaggccgccgcaggccgacgggtggaagccagcgtggtggcccccgtagatctcgctcaccagtcgcttcatctcctccagcgagttggtgagcatgaggatgtagttgcgcgccagcagcagcgtggcgatcttggaaagcttgcgcaccgaagggccgtgtgcgtacggcatgacctcgcggaggccatccatggcgatgttgaggtcgtgcatgcgcttgcgctcgcggctgttgatcttgagacgcagctgctgcagctccggctctgtcatttgcttcttgtccttcttggtggacgacgcagccgccgacgacgtagacgacgaggtgctggacgaggatgacttgaagccactgcctcctagcttgtccccaggatgcgcgcccgcagagcccatagcgccgcgcagctcggcgctcagctccggcgggcagtcactcggggtggacgaggacacggtgcccccagtgaaggcgctgccgctgctgcccttactccgggccggcagaaaaaggtcatcgggctctggcgacgacgggcggctggacaccaggctggcgtccgagtccatggccccaggggaagatagtcgtcgcagctttcgcagggtcctccttccctcggacccgaaaacttccaggagaggaggagaaaagagagagaatgagagagagagagagggagagagagagagagtgagtcagtgagagacagaaaagctgctcccgcctgcaccgcagtaccacagcgcggggtcccggcacaggtggcccgtggctcctcgtccccctcgctactatctctggccctccttttagctgcacgcgggtacctataattaagctctctctatctcccctctgctctcatgcaacaggttatttcagggagcgttggtgaccctcggggtgcgggtggcattctagaggcttcgggctttcagttaggtgtgggaaaactgagcccccgggctggaataaacgagtgggaagtgagggcctttctttggggagaatggagatctagatagagaactaatgatttggttcctcaaacggatccaccttatctccatcgacaccacgcagcaaacacacgcacacgcacatgcacccagagccggcgcggggcccagagtccatgtgctgcatctggagaccacggggagctcaccagctgactggggcttgggcagaaagagctgttgtcgctccgacttctcgcttttggtgagggagatgcagcggtgagtgtggggaggacagaagagcaaagtcgctctggagaaatggcccgcagagtagggatccagaccccctgtatcggagcattctgggtcacagccgagttgaggagagtctgtccctgggatctaggctgcggctgctgtggggcggggacacttactctggatgcgatttgaggagctcgctccgaaaagcctcaggggagaacctggcaccgggcgctggtgtcgcgtcgatctataataagcatccgcacctttaggggctcggccggtttttatagcccggtggcagcggcgacggcggcagcggtggcgggggcgggggcggggaacaatgtgcgtgtcctggaggggctgcctcgccaatgagctgggcccgccggggggctgggaagctgatgtcatccgggctaattccgctcaatgaaactcgccaggccgggcacacgcctcctccctgcgcacaaccaatgggcgcccgtggccgggagattcttggggagggactggaggagggacccgaggaggcgagggggaggagaagggcggctcaagggggatggagggagggctgagcgcgcttgggaccaagggagaaagggaacgtggtcaaatttctgtaaaaaatacggccaccacagagtcaggttgggggatgggatggtttggagactctgcagagtctaacaaactaacctgatgccccacgcagccgcaccttttgggatgcgcgcggaaaaccctggcgacccaggatccggggctggggtctcctccctagctcttcctctgtctggtttcccgccgcctgttcccatctcactggtttcatcaacacgtgggcatttggcgccccaaatgtaaacgatgcccaggcacaaagtccccactatcttggtgctctactcgcgcgtctaggagatggccgtggctgcagctccgacggcagccggtagcgcccccagctgggggcagggacttgaggggtagagggcgggcaaggagggaggggacggactccagaagagtgttttgaaagaattcacaactctcctttaggttgaggatggtgtgggtacagggacgagttatttccgcacggtaaccgcgctagcacaagggcagggtcgtgcctgtagttaaacacccctccatttattagcaggggagccggatgatagtaagtattttcagtgtcgtctttgtgatcaccacacgccttggggcaggggcaacgctggcatctgtagtccaagcagggctccgctgtaaaaggttagcaaagagccttccgtcccagtcgcctgctttctggaactgcaaagagaagtttcaggcctgggcaaggcttctccacgctgtgggccagacagcgagatggaaccactcgcgaccgcgttgggacatgttttaccgattgcaggctggctctgaaacctgaaaactcttgacgatgaggaattaagcccgaactggagaagcacctcacggaggtagctgaggtacggatgcattcacccattttacagatgggaaaagccagagaccgtgtgcagcaagcctacagaaaaaattgctaagcctttacagagcagccctgcttggactacagatgctggcgttggcggttccttatagtacaggcagccacctgtctcccccagtccctaatctcttccccgagctgaatttctcacacccatacatttcgaattcagacatttgtttctgcagatctcggatgctagcacttgacactgtgagcgcacgcgcgggcacacacgcacacagtctcctagggagtgtgaggaacgtcgggttacttccgttgttggggaacttttactgtgcaagtacggttttaaaaacaagcaaacaaattagcatagtaaataattggtcttcaagtagcaaagttacaaaataaacaaatacaaagagaaacccacgttattgcccctagttctgagatatgtctccctctgcggtctccgctagaagcccagcccgctctcgccttcgccccagtctcgtgccttctggagcattatttttcaatccgcgtgtttcccagctggctctgcagccatccgttaaatatgtatttaaaacatgaagaactgaagcgtggtgttatgtcgtccaacggttacaaggatgacccataaccgttcaattagtagaatctgtcactcggacgacgcagggagcgggggggtggggatcagaaagggctcgggcatttgtagatgcctccttcgggcctaccccgccaacagcagcgaggccatgtgtggtgcgcgctgtggggccaccagtcggggcgcggagttgtgcgcctgccagtgtagctaataaacaccagcaggcgcaacgtgcgcgctccttggttgcagccgctgaggttagtccagccgccggcacgtgtcccggaacccggtttctttttttgttgctgcccactggtgtctgtcctgcgaccgacttgcggcggtgagagcaagcggtctcaggttctttgcgcgctcggtccagtggctggagttgggagtcaggggtgaaagtcgaggggcccgtcttggcatggcgcgagtctagagcctggaaggcaaagtcggaagctctgtgctgctgctggccccttcttcacctggcaggcttccctcaacatcctcccgtcgccggagtagcttgggaggtcggggaggtctgtgtcgcccctgggctcccttggccctggtgccaatcggatgctgagtacctctcggtgtgtctcctatgcctccccaccccgtcccaggaataactagaaattagatcccggtgcccaagcttgccctggtgcgtcctggaggcgtccccaggacttgtccgggtcctgcgcccggcgcccggggtgggcgacctgggcgggtcccaggcactgcggttcccaccagcgcgcgcagctggggccccttcctggggaatggagtgctcatttgcagaggctaatgggccccggctccgggagttcctggttggcccccgcgtcctggtgctgttggcctcctccgtgtttttccctcttctttgtgtttctctcccacaaaagaccgggtgcgtgtcggggccggcctttgttggaccgccgggcggcccgggaggagcccgtgccaaaccggcgggctctcgcggggctccagggcgcagacctcccactgcttcccgggtccctcccgggccttctttctgattctctcccttcccttctccgagttcctgctcacattcaggctgcgtctcggcctggctgccaaacagaacgacgttcttgcgcagagctgaccaggggtggcggcgggaggcaaggctcccggcaccgg

SEQ ID NO: 5904 - DNA, 1423 bp, Homo sapiens
  source 1..1423: mol_type = unassigned DNA
cgctgcgggacaggttcctagagatcgctccgggacggtcgtgacggcccccgagggacatgagagaagaggagcggcgctcaggtaagctggattttgcggtcggaattcgcgtagaaacgaaaacttctggaaggggcttagccccgagccccggaggcggacaagctgagcctcctggctgcaccctttggaggctgctggttgcagacgccgtcgtctcccaagggcggctgtcaccgcgtgcgtcggtcagaccaggccgcggtgccctcggcatccccgcgtcccggcggctgtatccggctcctccccacgaccgaggtcccgggcaccgcgcctctccctccggacgctctgcgcgacgtcgtcccagttctcatcagcatcgagggcagtccgcggtcattttataaacgtcttagtgtcgcaaccgttttcacttttactattttcaatgtttgcaacggttttcaatgaggctggaaaaatatcacttctcgctaaaagcgaccccgagttaggaggagcgcgcacccccgcggctccccctcccacactttccctcccctgaccccctctcctcccctctggtccttcccttgctcctcgcccctccagtagtcgcgtgctgggttcctttcctgctggggccggactctctcctccggccgtcccagcctctgctcctccgcctccctcctcctcttcctcctcctccgcctcctcctcttcctcctcctcttcctcccggagccgccagccgcgtcctaaacccgagcagggcgcgtagtgtccaaacctgcccgcgcggcccgcgctcttggccccgagggcgcgcgcacggacacgcgagcacacccacacccacgcgcacacggacacgcgcgcactcgaagactcccgcgcgctcgcacccacgcgcacctggccacgcgcgtgcattcccgcccacgcgtccctgccccgcccccggcgcgcactccgggttcgcaagtcgcgcgtcggggcggccgccctgctccgcgattggcgggagccggagcctccctgaacccggcgcccacaccatgggctgagcccgtcggcgccgagggagttagtgcgacccggctcggcgcgcacggccaaggcacgcgcgctggcacacgcgggcgcggacacgcgcggacacacacgtgcgggacacgccctcccccgacggcggcgctaacctctcggtaagtccagcgccccacgcgacctgcccggctcccacgctggctacagcggctgcggggacggggaggaaggcagcggggtggccctaggggctcactctgcagggctcttccgacggcgccgggacaggtggggcgtccagcgccgggagggacggctcgccagtgcggggtcccagggaggcgcgtgcagtcgggtgcgg

SEQ ID NO: 5905 - DNA, 1384 bp, Homo sapiens
  source 1..1384: mol_type = unassigned DNA
cgagcgccttctgaagtgacggggccgggacgcgcagggaggcggcccaagaagcgcgccctaggccagcccagaatgcgctcggccgcgactaggacaacggcgggtggggctgggggcggctgccgggcggggagcggtcccgcgccctcagctacccctcaagagccgttgtttccctaacttcagctgccagaggctctgtgattggctgcggcacgatgacccgcgcacggattggctgcttcgggccggggggccgggcccgggggacagaatccgcccccgaaccttcaaagagggtaccccccggcaggagctggcagacccaggaggtgcgacagacccgcggggcaaacggactggggccaagagccgggagcgcgggcgcaaaggcaccagggcccgcccagggcgccgcgcagcacggccttgggggttctgcgggccttcgggtgcgcgtctcgcctctagccatggggtccgcagcgttggagatcctgggcctggtgctgtgcctggtgggctgggggggtctgatcctggcgtgcgggctgcccatgtggcaggtgaccgccttcctggaccacaacatcgtgacggcgcagaccacctggaaggggctgtggatgtcgtgcgtggtgcagagcaccgggcacatgcagtgcaaagtgtacgactcggtgctggctctgagcaccgaggtgcaggcggcgcgggcgctcaccgtgagcgccgtgctgctggcgttcgttgcgctcttcgtgaccctggcgggcgcgcagtgcaccacctgcgtggccccgggcccggccaaggcgcgtgtggccctcacgggaggcgtgctctacctgttttgcgggctgctggcgctcgtgccactctgctggttcgccaacattgtcgtccgcgagttttacgacccgtctgtgcccgtgtcgcagaagtacgagctgggcgcagcgctgtacatcggctgggcggccaccgcgctgctcatggtaggcggctgcctcttgtgctgcggcgcctgggtctgcaccggccgtcccgacctcagcttccccgtgaagtactcagcgccgcggcggcccacggccaccggcgactacgacaagaagaactacgtctgagggcgctgggcacggccgggcccctcctgccagccacgcctgcgaggcgttggataagcctggggagccccgcatggaccgcggcttccgccgggtagcgcggcgcgcaggctcctcggaacgtccggctctgcgccccgacgcggctcctggatccgctcctgcctgcgcccgcagctgaccttctcctgccactagcccggccctgcccttaacagacggaatgaagtttccttttctgtgcgcggcgc

SEQ ID NO: 5906 - DNA, 1361 bp, Homo sapiens
  source 1..1361: mol_type = unassigned DNA
cgccgaggatgtggcctccgccccccgcagccgccgcaggagcttctgcctctaaagcggcaggcaggggtctcagcgggcccacttcaacctgggaaggccggtgcgtttccccacagaccccgcagggcgtttcttctggggaccactgaagccctggcatccccaaccccagcccctccgcgccacgggaaacgaagacgacactcttttgaacaatcccggatgtgtcaccacagaggggcattctacactggcccctaccccaacccccacctagcacattgcttgcccacccctcaaaccccgtgcggattgcggtacctagccccgggggaccctccagccctgccttcccgatccgcgtaggtgcgtccgtccacctaagggtagggaggcatgtccctccgggtccctccggccgcatggcttgcctgcccccctggtctcccttctccgcatcaggaggggcgtgagatagctaggtcgacccccaccccggcagtctgcggcgatcggccgccccgagcgcagcgccagacacttgggttggggggtgtcagcctgacgcgcaggaagggcgcagcggcgggagggggcttcatttcagatctgggaggcttgcctggcgccggccctcgcccgctctccgtcggtggaggtcgcggctggcggagaccgccaagccagaggaggggatccgaggtcccggctgggcgaaggttctggagggggagaagacggccgaggcgtggaggggcagccgcggcggggcgacccttacctgctcactgcggggcctgtccgtggggccggggcagactccgcaaaggacgcgcagcctgcaagtccgcggcccgcgcggcgcggggatggggagcgtgtgcgccgaggagcgcgcgccgagccgggtctccgcgcctgtgtggccggctggcggccggggtccgtgtgtccctgcgcggcggcgtgtgcgtgtgcgcacgcggggaccacgctcgcccggagccgccgccgccgccgtcactccctgcccggggccgagcgcagcgccccctttgcccgccccgcgcggcgcggcagtccagcttggctccgtcctgcgggagaggcgccgcctccgccgcgaagccaggctgggcgctggagggaggcgaccgaccaccgcctccccctgctcacttcacaggctggggagggggtgctgcaggccaatgagcgcccgggggcggggttagatcgagggcggtgcggtggggggcgcggtggggggcgccgggctgctcaacccgaccccacccgcagcacagactggagcaggagctgcggcgggaaatcccagcggcgggggtcgggggcgc

SEQ ID NO: 5907 - DNA, 1175 bp, Homo sapiens
  source 1..1175: mol_type = unassigned DNA
cggagagccgggaccccgaagtccccactgtccctgccgaggcgccggcgccgtcccctgtgcccttgaccacgccagcctccgccgaggaggcgatacccctccccgcgtcctccgacagcgagcggtcggcgtccagcgtggaggggcccggaggggctctgtacgcgcgcgtggcccgacgcgaggcccggccggcccgggcccggggcgagattgggggcctgtcgctgtcgccatcgcccgagcgcaggaaaccgccgccacctgaccccgccaccaagcctaaggtgtcctggatccacggcaagcacagcgccgctgcagctggccgtgcgccctcaccaccgccgccaggctccgaggccgcgcccagccccagcaagaggaaacggacgcccagcgacaaatcggcgcatacggtcgaacacggcagcccccggacccgcgacccaacgccgcgccccccggggctgcccgaggaggcgacagccctcgctgcgccctcgccgcccagggcccgagcgcgcgccgcgccccggcctcttggagcccacggacgccggcggtcccccgcgaagcgcgccgaggctgcctccatgttggccgctgacgtgcgcggcaagactcgcagcctgggccgcgccgaggtggccctgggcgcgcagggccccagggaaaagccggcgcccccacagaaagccaagcgctccgtgccgccagcctcgcccgcccgcgcgcccccagcgaccgaaaccccggggcctgagaaggcggcgaccgacttgcccgcgcctgagaccccccggaagaagacccccatccagaagccgccgcgcaagaagagccgggaggcggcgggcgagctgggcagggcgggcgcacccaccctgtagcaggctgtggctcgtccgcgcgcagctccctcagcttcgcagcgccgcccgccaccccacacctcccacgctaccgggcacgggcggcctcctattggccgggcaccgcgcggctagcggaggttgcgtctcattggctcaggtcctgcagccgctcctggattggagcagtgtgctctggcgggaagggcccatcccgttggtcgaggcctgacaggcgcttagcgggcgactccctccccattggccgagttatggagcgctccgaccagacagcgt

SEQ ID NO: 5908 - DNA, 1087 bp, Homo sapiens
  source 1..1087: mol_type = unassigned DNA
cgcttgcagctcggccgcgtggaggtgaccgggcggaactccgagggggcgcggggagagctgggcgggcccaccgctccagcggctgctgtcaggggccgcgaggctttccctgaagatgcagcgtagcatattttgcacatgagttcagaggaagaggaagtgtagccggcggacgcgcggcggcggcggcgggggcgcgtcggggctggagccggagcgcgccgggcgctgggcgcagcgagcgagagcgcggcggccgcgggctccggcgagggacagacgcaccgatcgccggagggacagacacacgaccacgcggcgccaccgcccacgcctccacccaccggcgcccaagtcctccccgcgccgcctcctctgtatggcacaaactttcctcccgggacggaacacgctgcctcagggagcccgcgaccgcgccttctcctccgccggtcccatacggtaggcggcggggggggcgcgacagggcttggggtgtcgaccggcacaggcccctccgtttggccccatggaccgggtctctggcgggtagtgggaaccgcgcgtggcgcctccctgcaggttgctctttgccggggctccggagctgccagagcagcaccccctggcccgcgtcggatggggacctgggctgatccttgggacgcctggatcttgggccaacttttttttgcggggaacgggtgtaggggagtcattcctggagcgatgtagggagaggcacttcggagcagcctgttgggggtcgtaggctctgcaggctcagaagcgcctaggaaggacgcagaggtgggggagcttggaggctacaggtgggtccaggacacactgccgctggggtcctcggaaaagaacaggagggagctggtcgcggagtccaggtttccggggtgcgcgcggcctgggtggggcagggtggaggcggtgcctgactgcccctctgcgtgtgccctgggaggtgggtttgctctggggacagaggtgctggacgtgtaggagcagacatgccgcgcgctccgaggaagcgccggaaccaccagaagcacagggacgcgggtgccga

SEQ ID NO: 5909 - DNA, 693 bp, Homo sapiens
  source 1..693: mol_type = unassigned DNA
cggcctaggtacccgggcagagggatgatcccgcgctctgcgaaaagcaacaggcggctgcaccttaccttgcgccagtcccgggccggggtggctgctccatcctcgtggctcagggaggaggcgttgggtgcgtatgcttaggggtgtgcccgctgccagggctgcagcggccgccacctccaaccagctgcaagccgagctgcccacctgggaccgggccggcccggcgggcttggctcccggcgaaggcggcggcgttggtgcgcggcggctggggcgcgggacgcaggcagtgcgtggcgcggctggcgtcttcgggcgccgccaccgagcgagggtgcggccccgggcggccgtgcggggcacgacttggctcgcgttgctgcggcggccgctgcagaccctgctccaggcgccgtagccttgcaggaagagcagacaaagacaggagagaggcaaagcgccgcttgcccagagatgcagtcggctcagtcaatagagggaaatcgcctccaaacccaggctgggaatgagggaggaggggcgaggcggctggggactagaaaaagcagcagggaattaacgtgacagtcagagcccagccagtgcctcgccggcgctgctctctcgcctcgcggttgcggggtccggaatggagagaggaggcgggggctgagcgttggctgccgg

SEQ ID NO: 5910 - DNA, 5065 bp, Homo sapiens; identical to SEQ ID NO: 5878
  source 1..5065: mol_type = unassigned DNA

SEQ ID NO: 5911 - DNA, 307 bp, Homo sapiens
  source 1..307: mol_type = unassigned DNA
cgttttgggggcgacatcgccggggaacttgatgatgggcgacggcgcggcggcggcgtggctcagcaggcagcccaggagacagagcgccctcaggggacccgtgagcgcgccccgggccattagcgcctccatcgtagcgctccctggccccgcgcgtcgcccgggggtcgctggctcggtgcgtgtggccgcctcgccgcctggttggagcctgctccgcggcgcagggctgcgctccgagggtccgctggctcggtggcctggggtttgcccggctcagcggctcatggtccggcccccgcgc

SEQ ID NO: 5912 - DNA, 1563 bp, Homo sapiens
  source 1..1563: mol_type = unassigned DNA
cggtgctcccgcagcccggacgccagcgccagggactcgccacaacctcaagtcctctcccggggctgggctccgcacacaaacaggtagcacaaaactaggacttagttggggtccgcaccccttcctgctcagacccgagccgccccagtccccggccgccgcgcccggagtccgctccaactcggaaagtggcggccggctgcggggcaggcgggcggtacctgtgagcagctccagccggtgtcccagcaccttcatctcggcgcccggcgcggcccggctctgggtggcggcgtcggggcagcgcgctcggccgagccggggagaggagcgcgggagacccggagcggagcggcaggagagcgcggagcgaagcggcaggagcagctcacagccaggagcgctctcccgcccccaacgccgcgctcccccctccaaaacggtttaaaaaaatccaccaattgcatggccgcgcacccccaaaaaggcacccgccgccacctggtcccggtgaactccaggaggcggaggaagggcgcggggtgggtgcggtgacaccgtgggaggtggtcccccgtgcccgccgcccgaacaaagagaccccgccgcctccgggcgtcgcggtggggggtcgcggacggcggctgggggtccccagcgcggccgggaaggcgaggaaggagagcgggagccgcggggaggagggggcgccgcccccgcggaggcgaaatggggcgggagcgagtcggtgcgggactcgcggggctagggtcgtgcgtggggctggggtcgtgctcggggctgggctgggctgggcggggacgcgcgcagcagccgcggcggcgagagaagctggccctgggctcaggggcgagggcgccgccgactcaccgcggagatgcggacgagacagacgcgcaggcggggagcggggcttcggcgccgccgacgcgcgggtgcaggtgcgggcagccaggagcccctccgcgtgcccgcggctgcaggggcggaggccgggctgggggcggtgcgccgcgggggcgtgcccgcgtgggtttggcgggtgtgggcgctcggcccgcggggcggtgccgggcctggggctagtcccggacggaccgcggtccctcgcgcgtggcttccgccttctgcgcggctggggtgcccggtgggcgggcgggagggcgagcggggaccgcgacgcggagcctgggggacaccccggtcgatccgcgcccccgccgacttctcacccgctccgccgcgcggactgtgctgggtgcgctgcgaggccctgcccgcccctccaggccccctgtggccgcgcggcgtcgggttcccgggggaggggacggcgctgccgtagtctttgtttagactcccaaggggaaccttagacctgcagagacatccccatcccagcgcccctgcgcctgctgcttcgcgctacccgccgtcgccgcctgggaaccgagggagaaaagcccttagggtcgggaagaaccaggggctcaggggcctctggggcgtcgtccccctccccccgttttcggagcccga

SEQ ID NO: 5913 - DNA, 512 bp, Homo sapiens
  source 1..512: mol_type = unassigned DNA
cgacccgaggctgtctacccggcctggcatgtcccggcgctcctggggcccctgtactccgctggttcctcgctgtggtgtcccgcagcccgaccatttctgtgcttctaggagcccaccctgggcggcagggaggcgttgcgtggggctcacgagttccacgctgtcatctccaccagctcctacctcccaggcgcctgccctcccgcactgtcaggttctgcctccgcagcatttggcagatctgagcccggtccctgtcacccctccgcgggagcctcatagtgaccctggaggagaagcagcaggagcccacaggccaccgcgctcggccgcgcgtgaagtctgtgcagccgcatggtcggctcgctggtctcggttctctgccgacggacacgctgctgttcacccagaggctgccccgggtcggtccagccgtggatccagtgccttgcccagcctcggagtttggactgggcagggagtcggcggggtgcgctgacttgggccgg

SEQ ID NO: 5914 - DNA, 1070 bp, Homo sapiens
  source 1..1070: mol_type = unassigned DNA
cggcgcccggggctcgactggtgggaggggtccggcagaggccccgcctcgagatcccagcacgccccgccccgctccacggtgtagcacagactccgcggagaacgcgagcatggtcggaaatcatcgcctttatttcttggcgggtctcgagggaaggtcgggaacgggcgggtcctgctggcctagagggcgtcaggggcagccaccggcggctcgggatcctcctcgtcgcgagcgcgggggagctcaggtccggcctgccgggggctgggtgaggctgcggaccaggttcctacgctcctcgcgtccgcccgcgtctgccctaggcctccaccgcggcttcctctgtccccggggccgccctgctccccacagaccccactctcgggggccgctcccaggacccccgcccgctctctcctgactcggtccctgcccgccccgcctcccttcctcgggctccctacctctccctcgccggccccgacctcgggggcgctccggacctgctccccgaatatctccagctccgccttcagcctgcggagaaggggccgaggagacaggaggaagagagcgagagtccaggggacgaggaggaagccaccgagacgcggagacccgacgacgccgagggaggcacaggccggggaagcggcagtcgggggcggagcgggggacctgggcgggttcccctccgccctgcccctgccctcctcgcccactcctcccttcccctctcacccgtcattcaccgccatggcgccctcgacctcaggcggcgagtgcagccgccgctccacctcccgcagcttggcgcgcaccagcctccctgtcggtgggcgggcgtcaggggcagggccgaggcccgggcacatccccctccccccgcccacctggcgcgggaggctcactctccgagagcagctgctccttgcttctctccagggcacggatctcccgggccagtcgctgctccagcatctgcgaggacaaagaggaggcctccccgtttggccgtcctcttggctacacggcccgcccctccccttttgtgcttctcgcga

SEQ ID NO: 5915 - DNA, 766 bp, Homo sapiens
  source 1..766: mol_type = unassigned DNA
cgggaatcccacgcccttgcaccagcccgggggctcggacgagcccgggagccgctggtcgccaatcaccgcgcggtggagaggcgggcgctcggctccggcgcgctgggggagccagctggcgctgtcttccccatcgcctcagacgctcacaccgacacagacagacgcacagacgggcgggcagacaccgacagtctcccaaccgtttgcgctccagtcccggcccagggagccccccgtaccctctggggtgccgcaaactgcagctcggcaggcccgcgccgggagaagggagggcgcgcaggcggccggaggaggggaggtcccagcgcgcccccgctgcgatgtgaacggcggcggctctcacctggagccgcacctggggcgccgagctccggggccgcggaaagaatgcgcgccgcccgtgcgctccgcctgccgcgtctggccacccgcagccgccgcgtccgcacctgaccatggagtgcgccctcctgctcgcgtgtgccttcccggctgcgggttcgggcccgccgaggggcctggcgggactggggcgcgtggccaaggcaggtgccgccgagcggagctccgagagcgggtggcagggggcgcccgacgccagccccgccgcgcccctcacgcgcgatgtcaccttttctcttgcaggcgctccagctgtgctgcctctgctgtgcgtcggtcgccgcggccttagccagtgacagcagcagcggcgccagcggattaaatgatggttcgt

SEQ ID NO: 5916 - DNA, 363 bp, Homo sapiens; identical to SEQ ID NO: 5689
  source 1..363: mol_type = unassigned DNA

SEQ ID NO: 5917 - DNA, 2919 bp, Homo sapiens
  source 1..2919: mol_type = unassigned DNA
cgagcgcgcaatatgagtctcaaaggccaaactccggccagtcaggagccggaaggctgagcccggctgacctgactttgagcttccccggagttatctcgcataggcgctcgctctgtccaagggcacgcgacgccagcgggcagccggtctccgtgaagaatggcctctaaacaacttattttacctcgttgtaaagagagggataaaatgggctttccctctccacggatgcccagccttctgggcaggcgcatggccgggcggcgcccagcccgcagccccgatccggacaccccactgcatccctcccttcccggtcccttccccgcacgggcgcccgagagacggacaaagagttggggccaagtttgagcgccgggcacggccaggctcagggaaggaaggtccccggcagacacctgggtaccagagttggtgcgaggaggaaaagctgggaggcgaattcacaatcctgggggtggagggcaggcaggggaggggaatcaggccaatcccagccgagtgagcccccagcgagctggggctccggatgggaggcctgtctcgcgctccaaagaaaagcaaaccgccctcccaggtccgcccggattgccgaagcccctctggaaaaactccttcccctcttacaccaaactttgcgccgggcctcgttccctcccgggtaggcagcggcgcaggaagggttaagccagcccgtcccagctgacagtcagctgattgggccctgattgacagctccgaaaagtttccttgtttctatactattatgctaatcgcggccgctctcgccgcctcccattggcccggagtgccagtcaatttctcatttggacctgacgtcacgagtgctataaaactcagcaattgctttaaactcttcttgctggatcagaggctttaaaatcttttttcatcttctagctgtagctcgggctgcttgtcggcttggcctccccctcccccctttgctctctgcctcgtctttccccaggacttcgctattttgcttttttaaaaaaaggcaagaaagaactaaactcccccctccctctcctccagtcgggctgcacctctgccttgcactttgcacagaggtagagagcgcgcgagggagagagaggaaagaaaaaaaataataaagagagccaagcagaagaggaggcgagaagcatgaagtgttaactcccccgtgccaaggcccgcgccgcccggacagacgcccgccgcgcctccagccccgagcggacgccgcgcgcgccctgcctgcagcccgggccggcgaggcgagcccttccttatgcaaagcgcgcagcggagcggcgagcgggggacgccgcgcaccgggccgggctcctccagcttcgccgccgcagccaccaccgccgccaccgcagctcgcggaggatcttcccgagcctgaagccgccggctcggcgcgcaaggaggcgagcgagcaaggaggggccggggcgagcgagggagcacattggcgtgagcaggggggagggagggcgggcgcggggggcgcgggcagggcgggggggtgtgtgtgtgagcgcgctcggaggtttcgggccagccaccgccgcgcaagctagaagcgccccagcccggcaagctggctcacccgctggccacccagcacagcccgctggcccctctcctgcagcccatctggcggagcggcggcggcggcggcggcggcggcaggagaatggcatcagaactggcaatgagcaactccgacctgcccaccagtcccctggccatggaatatgttaatgacttcgatctgatgaagtttgaagtgaaaaaggaaccggtggagaccgaccgcatcatcagccagtgcggccgtctcatcgccgggggctcgctgtcctccacccccatgagcacgccgtgcagctcggtgcccccttcccccagcttctcggcgcccagcccgggctcgggcagcgagcagaaggcgcacctggaagactactactggatgaccggctacccgcagcagctgaaccccgaggcgctgggcttcagccccgaggacgcggtcgaggcgctcatcagcaacagccaccagctccagggcggcttcgatggctacgcgcgcggggcgcagcagctggccgcggcggccggggccggtgccggcgcctccttgggcggcagcggcgaggagatgggccccgccgccgccgtggtgtccgccgtgatcgccgcggccgccgcgcagagcggcgcgggcccgcactaccaccaccaccaccaccacgccgccggccaccaccaccacccgacggccggcgcgcccggcgccgcgggcagcgcggccgcctcggccggtggcgctgggggcgcgggcggcggtggcccggccagcgctgggggcggcggcggcggcggcggcggcggaggcggcgggggcgcggcgggggcggggggcgccctgcacccgcaccacgccgccggcggcctgcacttcgacgaccgcttctccgacgagcagctggtgaccatgtctgtgcgcgagctgaaccggcagctgcgcggggtcagcaaggaggaggtgatccggctgaagcagaagaggcggaccctgaaaaaccgcggctatgcccagtcctgccgcttcaagagggtgcagcagagacacgtcctggagtcggagaagaaccagctgctgcagcaagtcgaccacctcaagcaggagatctccaggctggtgcgcgagagggacgcgtacaaggagaaatacgagaagttggtgagcagcggcttccgagaaaacggctcgagcagcgacaacccgtcctctcccgagtttttcatgtgagtctgacacgcgattccagctagccaccctgataagtgctccgcgggggtccggctcgg

SEQ ID NO: 5918 - DNA, 2267 bp, Homo sapiens
  source 1..2267: mol_type = unassigned DNA
cgggcgggggagggggcctgccggcagagaaagtgcggagagggcagagcagcggctcggggcgtttctgcaggtggacatgaaacgcacgatatgcaaatgaatgcaaagtgtatgcaaatgacctggccccgggacccgcgggaagcgagggcttcgcatcggacccgcccgggaggctgagcggggggagcgcgacccctgccggccacgcacggaggtggccccgggccgggccaggcgccgcgctgggggcgagcgcggggcagggggcgggggcggcggccgaaggagcgacctcccccccaactccccacctccccaccccccccacaccccccaactcccgttcagcctcccgcgcggccgccagaagccgcggttctaaagctgcgaggcccgcggccgccgactgctgcgaggtgggtgtgcgcggcctgcggagggggagagggtgggcgcaggcgggggccgccccccagagccgcgccccctccacggcgcccgcacccctcaacctcttcgctcgcccccgcctgcgcctccccgcgccgccccccgcaggaggcggcgcgcccgtcgccccctccccgcgcccctctcccctctccctgctcccggcgctccgcacagccccggcccccacggccagttcttagggcgccgccccggtggcggaggcgttgggggcggctctcggcggcggggagcccctctccaggccggcgccccggggcggagctgagcgccatgggcgccgggcgggaggcaggtggcgcagcggcggcggcggggggcaggaggcggaggcggagcgcgcggggcgggggccgcggggccccgtgagactctcgggcgagcgcgcggcgttggagccacaggcgcggcggctggacccggcgcgggccgcggaggccggagaccgccccgggcggggtgcgcgctttgttcccgcgcggggtggccggagccgagtccccggcatggcccaggcggccgccccgcgcgccccagccccgccgcgcgcctgagcccggtgcggcgccagaagacagcgcgcagccgcccctgagtcgtggaggcggggaccaagctggaaggagcagcgactcccggaccgagtcgcgagtgtgcgccgtccgccgcccgccggatcccccggaccccccgaccgtaagtgccgtgtccgccccgcgcgccgccgccgctctaccccgactccgcccgcggctgccgttcccggatctgcgccgcagccgcgccgagcgcacgggccgttttcaaagttggtgcccacggcagggtggagccaacccgcccagcgcccacccatccgggctgagcgcagccccccgtgagcagagcctgacctgcgggggctgcggcgaaacttcgaggggaacgacgcgcccgggcgctgggagtctcgcgggctcccctggggccgcccggttttcctaacaaaggccccgcggcccgcgtgacggagacccgggagtggggaggccgagggcggccctgggagaggcagaggtggcggcggccggtctggggaggggggtccagagctccctcctgctcctctccctcctgcccgggtccccggcgctgccccgcaggctaaaggtggtccgcgctgggggtcctggaccctgcctggcatgcggtccctggggtcctgacggccgcgggcctcggcacagccgggtggcagcgatggcgcgcacagcctttgggaagcgtccatctgtgttgggcaggccccgagccaggctgtgggaacagcggggagggaggtgtgagcctctgtggagggacagatggctggaaacgcagccctagacggctgacttcacttacgtggagcagaaggcggccaggctggtggcggcgactcagagccgctgggctccgaacacactgcggggctggcgctcccccgcccctgcgtccgcccgtgtgtgctggggccgcggccgggctgtgcccacccctcattcaccctgtgggctgaggccggctgacttcaggcccattccagggcccaggaagaaaaacctttcccttgaaaagagagcacgtcgcgtgctcctgtgggtgggggcttgtcggtagctgtcaggcttgtggccccagccagggtgcggcttctgtgcgtccggcccgggtgtgcgtttcctctcctggacgaggaacaggaggttcccagggcagccacctcggcggacgggtcggccggggataaggggcgggggccggtttttcgg

SEQ ID NO: 5919 - DNA, 265 bp, Homo sapiens
  source 1..265: mol_type = unassigned DNA
cgcagcctgcgaccgatggagcaggaggcgcgggtgctgagagctgcgggcggctttggccgggcccggcgcctgctggcctccgcctcgtgggtaccctgcatagtgctggggctggtgctgagctccgaggagctgcttaccgcgcagcccgcgccccactgccgaccggaccccacgctgttgcccccagcgctgcgcgccctgcgcggacccgcgctgctggacgccgccatcccgcgcctggggcccacgcgagccgcga

SEQ ID NO: 5920 - DNA, 374 bp, Homo sapiens
  source 1..374: mol_type = unassigned DNA
cgaacagcgttctgaaacgcagaaacgtgcccattcgaattgttaacgcgagcgcagagcccactgacaaagcaaaataagacaaaccgggagtcagaaaactcagcgacccacaggatccaccgtgatgtttcccacaaatgttaccgcgaaaacagtcggacttgaaaataaacgcgacctacctggttctcggaaggggagaaggatccgggcgaaaggcgtcagttctccctcgctcgccccgtagacgcagcgcaggccccgagctcccgagcggcggtttcagaacccgcgggtcacccgggagctcctcccgcagtaccagccgaaagctcccagcgccgaggagggcgggcggctgccctccccga

SEQ ID NO: 5921 - DNA, 1133 bp, Homo sapiens
  source 1..1133: mol_type = unassigned DNA
cgaacagcgttcttaaactcagaaacgtgcccattcgaattgttaacgcgagcgcagagcccactgacaaagcaaaataagacaaaccgggagtcagaaaactcagcgacccacaggatccaccgtgatgtttctcacaaatgttaccgcgaaaacagtcggacttgaaaataaacgcgacctacctggttctcggaaggggagaaggatccgagcgaaaggcgtcagttctccctcgctcgccccgtagacgccgcgcaggccccgagctcccgagcggcggtttcagaacccgcgggtcacccgggagctcctcccgcagtaccagccgaaagctcccagtgccgaggagggcgggcagctgccctccccgacctcgccccgcccgcgcggacgcccccggccccacgcggggaccaccccgggactcccgccggaccccgcgcgcccgcggccaacctgcgtgcacctgcgccccgcgccacgcccccggcgccccacgtttagccctcactgggtcccgcttcttagtggctctaagccccgccccctcgctggtcaccgcaagctccgcccctcgaggccccgcccctgcaaggcccgccccttcacgactcaggccccgcccaccacggccagcccgggtctaggccccgccccgacacgactcaggccccgcccccggccagcttcgctcctcgcgcgccccgcccagcaatcctcgctgaacccggcgcggtttccccagcgctgctccacgccgcagtccagcgcctggagtccgcgcgccccgagcccctgcccgctcatgcgcagctgggtcacccaggtgcacccacttccttgctgtcccgccgccctccctgcccccaccccgcctaggccctgggtgtcccttctccatcctccctggcgcctctgcctcaggccacctggccgtcctcctgggctccccgctcgggggcggcccctggtccgacggtgccgcagacgcgcgcgcacaggccagtcccgcggagaggctgctctcaggggctaggcggggggctgagtcagaggctggggcctgccaggagcggggcggcctggggcgcagcagcattggagctgaaggcgagggcggcccgcgccgg

SEQ ID NO: 5922 - DNA, 2358 bp, Homo sapiens
  source 1..2358: mol_type = unassigned DNA
cgggacccgctttccaagcggcgcctcctccattttccgcgaaccccccggcggggtctgtgtggaccaagggagatcagagaccccccgccgccaccccacccaggcggagacggcccacccgaacccgcacgggtccttccttctccctggaatttgcagctggccctttccgaatgcttgctcccctcctctccccacgaaagaacagtgtcctgggactcggggtgcggggcagccgggttcgctggagctgttcagtgcggggaagagccgtcgagactgggagaaggggcgctggccagggaggagacggggcagggagcggactcgcgatccgtactctgggcggcggtcctcgcgtcccagccgcgtctcccgatgacctccagccgcgaagggcgagcgggcgggggctgggctgcgggttcgggctccaggaggcctgcggggccggggaggggcgtggagtggtccgaggaccggcttggggactgggggcaggtgcctggacggacgcgggccgagcatcttccccgggggcgggcgcagtgaaaacaccttgggaggcggcgccgcgcggctgagcgctgctgccttgggaataggacggcgctcggcactgcgagctgagagcactttcataaattttgtatgggaggcgctccgtgagcgggggcggggagcggagcgagagggagggagctagagagcaagggagggagggaggaggagaggagggggaagccggggggaggaagggaggcgccccgctccgccgatcgctcggtcctgcaaacgcgcgccgggcgctttccccggagctcggcggtgcgtgcgagcgcccttttgctgcagccgcggcggcggtggtccgagggggcggagaggagggggctgcggccggccggccagggggcggcgtcccccctcaaaaccgcctgcgaagtgctccgggtggcagaagcaggccgccggctccgcggagcaagccgctcgccccggggctgagcaagcgcgcggggctgccgggcagcaccacggttgcttgcgggcgccggtgccctcggcgcggggctggagctcaccatgcccctgcggggccgggccaccgggcacgagcggatccccggcttgcccccgcctcgacgcgctcggattagctgcagctggcgcccagggatttgaatctggaccccgggagggagtgcgcctaggccgacctcggagcggcggccccgtggccaacatgcttcgcaaaggtgagttggagccgcaggggcaagttgaagttgaatgcgctccggaaagagccgcgagcccgggcgccgcccggcgccggggctcccggtctgggaagtagcccccggcgggctggtgggttttgccgggcgcacccgccgaggggctgctgctggggctcagctcccgtcagcggccagttgtgagacacggggttttctccatggatcgagtggccaggcctagagatccggcccggaggggtcagtcggagaccagagtgagcggccggtggtggaaggggagccggcctcctgggacctttgctttgctgggataaagttttgcacttgcagcctccattccctgcgcgggcacacgcccttgcttctgccgctttgtggaggccgagtccgcacggcgcccccgtgcagccagcggtcagtgaccgcgcggcccgggcgctccccgcgcgccctagctccccagacggggcccggacgcggacgtcttctctgcagttctgctctgatcgctagggatgggctctgggcacccagcggctgagggtggggagcggccagcgcctgatgtccagttcctcaaactttcattatgctgggagcggagggacgcgaaagccgtgccgccagtgtgcgcgaccggtgcacagctcaacttgaggacagctggcttcgcgaccaccgtagctagacgccccagcagcccggcccggtacggagcgcggcaaagttggtgcgggcaccggggaagtcccgccgcgcccccacgtggttgccacgcggggcgccgtcccccgggccctgggagggcaggtgatcacgccgggagcccacgggccccgccaccagctgttccagcctctgcgtctgcctctcccctcccaggcccgagcaggctgtggcgccccgccgggatcccccccgcgcctggcccggccaggaggctgagaagccgcggcgcctgcggctggctgccccggccctgcgggagcggctgaggcgggagctcaggtagccgaggggcctgatccctgcgctccacgctccagccttaatccgcccctgtttccatggcaacagaccgaggtgtcgt

SEQ ID NO: 5923 - DNA, 1050 bp, Homo sapiens
  source 1..1050: mol_type = unassigned DNA
cgggcgggcagctgcggctgctgaggctcggtggggcccctccaagacgcgtgtccgcatctgcccgccgggcgtctgcggggtgcagcgtccactggagcgcgacagcccctgggacagaggaggacagtggcctcgcttccctgtgcgatcgcccaggagctccgggccggagagtgcgagcggggaaaaggggtcctgcacctagagtggggcggacgtggcgaggaagccaggggggaccgggaagcgaggcccgcggtgcggagggcgcggggcgtggggggacacctctcggagagacaccggaggggcggaagtaaggagatggaaaggagagggagatcggggagatagacctgagagacccagaggcctgcagagagtttcatccgggacccttcagagcccaggaaagagcagatgcggacgcgggagggcgccttacgccaaagcgggcagcaccagtgaccaaaacacgccccgcttggcagccccgggacgcacctctgcctcggcagcgcaggagaggcttggacagcgcgagatgctagggcccaggctgcccctagagggctggcccgaagcgttggagtccaaagacgcctcccaccgccgccgggtggcagaattgggggcaggcgcgtcccacagaccccgaggggtggccccgccccagggccgcggggaggcgcccccgtgcggggcggagttgtcaccgccccctccccaatccccggggactgtggccccttcttaagcccgcggcgcctctagctgcccctcactcgtctcgcccgccagtctccctcccgcgcgatggcctcggcgctgagctatgtctccaagttcaagtccttcgtgatcttgttcgtcaccccgctcctgctgctgccactcgtcattctgatgcccgccaaggtcagttgcatctccaggcagcccttcggacacccggcgtcctgtgcccactaacgggcaccgatcccgggagccctgagctggagcgcacggatttcgcggggagcacagctctcccggggcgcgcgc

SEQ ID NO: 5924 - DNA, 1731 bp, Homo sapiens
  source 1..1731: mol_type = unassigned DNA
cggccggccttagctgtcactcaggcaaccccggagccgccgcagacaccggatccactggaagggggcgaagccgcggggaggaatgggggacactggggaaggggcgtcgcccctgccgcccccgccctctccagtgccattgggcggctgctgcggagcccgcgccaccttttctccatcccaccccgcccgtctggccccgcctggccgctggtccgcgccccgctgcgctcgtccgggggctggtccggcccgggcctttgacgtcaccagcaagtttgctgccctcggcgtcccacgtgtggcggcggccagcggcggcccaggaggcagccggtgagcgcctgcgagcagagtggcgggggccgctgacaggtcccgcgcagcccagcccagcccagccacgcggctcacaggtggggtccaagagcagtttggagcaacccggcgctacggagaggggtggacggctctgcacgggcctcctgtctcccgctcgggcagagggactcggggggacctcgctccttggctgagagaacctgaactcgggcggagagaacgcgcccaggcgggcaaggggaccagagaaagccggggctggaagtcactgtcgctcgccactgtctggagcgcacggagcgcagaggcccggcagccgcgcgtgccctcacggggaccgagccagtgatgcaggatcgctgagcggagatccgcgccgagaagtctctcggggccggggctgagacgcacgccttcgacaccgctgccaagaccccgattccggcgactcttgcggggaaccgaggggccaaggctgccccaagctcaggacttgggcgagtctaagacgatggtttcttaagcacggacccgcgttccccttcccgctccctcgactggaggcagggatcctgcgcggggcccccgggattccgtttccccgcggagccccggccgctgcctcccgggacagttcgcacggccacaggggcgcacggcgatgtggcctccgtccagcgcgctggcccgccggggggatgctctggcacctgtcggggtccaggcctagcatggccggcgcgttgcccgacgtcgcctccggctaggatggcccctccgggcccggccagtgccctctccacctcggccgagccgctgtcccgcagcatcttccggaagttcttgctgatgctctgctccctgctcacgtccctttacgtcttctactgcctggccgagcgctgccagaccctgtccggccccgtcgtggggctgtccggcggcggcgaggaggcgggggcccctggtggcggcgtcctggccggaggcccgagggagctggcggtgtggccggcggcggcacagagaaagcgcctcctgcaactgccgcagtggcggaggcgccggccgcccgcgccccgcgacgacggcgaggaggcggcctgggaagaagagtcccctggcctgtcagggggtccgggcggctccggggccggaagcaccgtggccgaggccccgccggggaccctggcgctgctcctggacgaaggcagcaagcagctgccgcaggccatcatcatcggagtgaagaagggcggcacgcgggcgctgctggagttcctgcgcgtgcaccccgacgtgcgcgccgtgggcgccgagccccacttcttcgaccgcagctacgacaagggcctcgcctggtaccggtgagcggggcgggcccgg

SEQ ID NO: 5925 - DNA, 3535 bp, Homo sapiens
  source 1..3535: mol_type = unassigned DNA
cggccgcgccaggagctgctggtgcagtccaggaacgcagtgtttggggccagttgcggcatttacagtgggctcctccggcagcccgatccgccgggtcaccgccccgggccctgtgccccctggacccgggagtcctgcttgtcagttcagggagatggctcgggaggacgaagaacctcccgcctcccgcggcccagccaagcccttgcggccgcccgggtccagccgccatgcgtggccgctcgcagcgcagcccccgggcgcaagtcggcagccgaacctcccgggctgcgctgtccgctgcaggcgcgcggcgagggtttccacgcgacttcgttcttcattcagcgttttttagtcaatcaaaaagaacgtggcaggtggagggcagccgcctaagagactgcgtgagccttcctgtggggatttccatagcttgccccaggtgcttcaaaaccgcctgacattaagggttcagtccttttcctgccagttcctcccaacccggcccaagtgtgtctgatctcagaaaatcctaggctgcctcggggctctggcgggttccacctggaagggcgctagttatagcctgccgcctggccctggaatcaccatcccaggaggagggggagtggtggtggtagaagtcataacaatacaatcggtgacaatagctaacgattagagaggccctcacgtgcctgcgaggcaccttaccgtaccagcgcattcactcttcccatccctgcccagaacctgcattattcccactgcacagatgagagcaccaaggttcacgcgactagccaggacgtgaatccaggcgtcggactccagagaccccattcttatccaccagtgtcccgagaatgggtcacagcccgggaacggtgggaaagatgactgtcacggttggctaaacctcgagacttgggcaactcctgacaataataaaaaaccattaaggacaaaggggaaggggtaggacgaggctgggaagggagccgttttaatccgcggggtcagccctcttttattctccaacccacccaggtcccgacagtggggtgggcacagggagaggggttcagttatcttctcctcttttgttttcccaagtcttgagcgtctgtgaagctaattgggcctggaggggtgtctgaatgtcgtgctggctggggttacgggtggagaccccaacgaaaatgtgggggtcgttacctgggcccctagtcgaagacagttatcggaggccgaaatctagacctcctgcccactcgcgccttacccgaagctcgggcaacccaacagctcaccccaaagaccagcagctgcggaaagcagtgggcagaggtagtgattgtgaccccggggccactgtccctttggaacctgacccgcaacccgactcgagaacagaatttccggaagccgcgacctcgaagcaaccctcatttctcaatcaatgggccccgaatattctttgctccggacgtgtaaaagccccgcggagacacgcgtccttgctttccctatcccagcaccgagggcagggaggcggaaacgggcggcggtgcccggaggcccggacgccttcaaagcctcgcgccgctccagccggttgcagtgcgcgcctttgcccgacagggaccagcacagctccacgctccgcgcgccgcccgcccgccaggcggaggcgccgggccacccgcccggctcaccctcccgagcccaggcggctcgcgagcgaggcgggtctgacacccttggggttccggtaaccaggcggactgtaacaaaaagttaacagactctgcggcctcgccgggacgccgcggcccccaccccctctccccatctgggaagcagaagctgctctagaagttccttgagggcggagaccgaccaaaggggctcagaacattcccagcgtctcgggctccgggaggaaaaaatttaaaacgagtcataaaatacgattcgagtcggatacccccatggttagagggtggctcgctttgctgagggcggtctcagtcgctgcccttcttctttgcggcgaggtcgcctgatgaattcaagggcaccagtgctccgcgagaactttctgtgggttgtgacgagaaccaagcggagcgcaaccctcaccgcacccggacaggatgcgctgcgcaatctgccgtagtttccctgccctaccccgggtggtccgaagctgtaaccctgccaattccctatcatacgccatgtctcccttagctcagggtctgaatcgacgatggagaccctgcccctggcagggaaactcaccggtaccaagcgaggcccttgtcgtagctgcgatcgaagaaatggggctcggcgcccacggcgcgcacgtcggggtgcacgcgcagaaactccagcagcgcccgcgtgccgcccttcttcacgccgatgatgatggcctgcggcagctgcttgctcccagacccactgaaaaagctggagatggggcttggggagtccggcacctcgggactctgctcctccgggctcgcagcgccctcggccatctccttgcctgaagccagtggggtggctggcggcgcccggaacggcagcctggggggcgtcccgtccggagctgtggccagggctggcgggtcgtgtgcggcgcgggacccagagcccaggagcagcagccccggcgcggcggcgcaggagccggcgcacgagtacaggaacatatagagccagacgcagagcatggcgaagagcagcgcgagcttcctcctcaccggcggcgggggcggcggcggctgcggtaggagccggccggggacatcgaggcaagatctgccgccactcaggcgctgccccatgcgctgcccgcgggcgcggccagggacatggctcagcacatggcgtgggtcccgccgggcagtgagcgcagagagggttccccggcacgctggacgcccgggtggctcggtttattgcccccgtgtgcccgcggccgccgctgctgctgctgctcttccccaggtggcggcggcagctgtagcggcggcggctcttgacatgttgcccggcaggagctgcaactggaacggaaagtcgggacggcggtaactgctgggcgagggtctgctcccggggcgcgacgacgcgctcggggccaggaggacgttgcactctcgcgccctggccactctagactgtgcgcaccgccgcacgccggggctgcctccttgcagtcctaagaactgagcctcgagcagccccggcacttccccgcagaggctgcagaggcgaactgcgcaggaagagagctgtggaccgaggtggagtgggcggtcccggccttccagagtgacgggctgctctacctaccaaaaaccccgaacgccatgcaaatacaggcgcttctccgagagctcagcagccaacccgctcccaggacgagggggtgtggaaaggcttctgggcggtgtagggcggtcaggggttgctattggcttcggaacaaggggcgggcccaaaggggcgg

SEQ ID NO: 5926 - DNA, 2896 bp, Homo sapiens
  source 1..2896: mol_type = unassigned DNA
cgacccccggccgcgaacccaagcctgccgccttcgccgcgcccaccccccagccccctccctgccccggcgccatcccaggtcgacgtctctaaccaaaacaagcccctcccccaggagccccctccccctgcccgaggcccagggtcagcagccccaggagggacctcctccccaccccactccccccggcagaggtgcgagatttcattgtcagcctggccactcgaccgcgcgtgagactggggcgcagggcaggggggccactgggcaggctctcgtgcggggagtggggaggggtctccaggggaagtgtttgaagccactcctgcagctctgtccagatccggaagccgccgaggaagggaggaaggcgggggtggggagagcgcgaccttaagcgctggcgggcggcgaggaggggccgcagcggcccgaggaagcgcctggaggcgtcaggggcgccgagtccccagggaggccgcgctctcgggaagtttcccatcggttgcccggagcaggatcggacgcgcggatcgccctccccggtccgaccagcttcggggcgcagattgcgaacttgaacagaactccttccttctctggcatctctcgcctccccatccgtggccaccagccccgccatctcagccccatgccttccgccaataccacattcgtcaagaccgctcaccaatgctttgtggaggaaaggggaggggggaatccccagcacaaccaaactgtggccaaaagcggccaaaaaaaaaaaaaaaaaaaggaaagaaagaaattccttcttctgagaccgattccctcaaccagcgtggaaaacccccaaacatgcaaatccgcaactccagccaagatcctggcgccgcgggaggggtgtccgcggcgggcggcgaccccagcctgcagccccggactccgggcaggtctgcgcgcggcggcgggccgggggctcggggagccctggcgcccacagcagcccgccgaaaacacaaagctccgccgccaacaatacctgcgggctcctcctgggtctcccgggcgccggcgctgcgcgtctcgccgtctccctttcccccgccgtctctctcctctcgcgcacgctctccctctcgcctcttccagaacgcggtggccagatgagatccttgggagaaacaaatgtgagcgctcgcacgaatcctttctctcgccagccgcttgcaacggccccaggctcgctcctttccctcgcgctcccgcgcgcgccgcgcctctcgcgccccgcgtttccttcttagcagcccctgcgagcgccctcagtagccattattcacaggccgccgggggtcaggaggtaattagagacggccccgtggccgcatccactcggtaagcgcgatgctggcgcggggcgcgcgcggggaggggcgcgcgatgagggggcttggctgcgcgcagcccgcgccccagactcgggggaagggaggaggaggagggggcagggaaggaggaggcgggcgggggggcgagagatgagctcgggaagggagcgggaggagggggcgccggggagacgctcccttggctctcaccgcggggcctcggggtcacccgctgcgaggctccgacgcgcttagggacggggggtgtgagtgtaagagtgcgcgcgcgcgcaggcgtgtgtatgtcaaagatagaggaggggagggagggaacgctttaatatttttccagtgacttacgagcctgcgggtgaggtcttggctgtgcgtttaggtccgtgtgtgtatcaatgtggctgtatatttctggtctgtcctacgagtgaatgtcacggggcttgggggggggggtctggatacaagctagtgaatgtgtttctgggtctcagtttgactgaatgatgtggcgctgcgtggggctgtgtctgtgcgattgtttataggggggttgtgtgactccgtgaggtactgcgtgggtgggattgcgcctgtgtgcggttgtgtgtatatgggattgtgcctgcgtggggctgagtgtccagagggcagttgtgtggccatgtgggcctgtttgcgagtgggctggtgggtgtgtggggccgtggggctgcgcatgtaggggcagtgcgcctgtacggggctttgggttaacttaaagggctgtggtgggtatctgcaggcggttgcgtgtgtggctggatctgcgtggggtctgaggcctggcgggtgggggttagtcctcctggcgtcggggatcgcaccgcggcagaagagccgcttaaggcgccaacaggcagcgccggggtcgcggcgcagcgcgacgtgtagtagcggtggggcgtagagagaaggcggagaagaggggggccttcatcgcgcgcctcccctagccgcatcagagacgcagcttggagatcctgccgcttgccggccccgcggtcctagaagcacagggtttgggggaccctccccagctgggggagacgcctactggccgggaaggcagcgagaactgagactcgatgattctggcgcagcacagaagcatgcggcaaggaccgccaggagaggtgggtcgcggcccggagacagccgagaactaggccgagacaaagaagagcgggaccggggaccttggggccaaaccgcgcctctaggtttcccggcggccgaggggagcgcactcaaggccggcgcgtggagcctggcggaggtggcgcgggcccctcttcgctgcagtcccagcagccgctccagagccctgggggcacgtaattaggcgccacagggcagggccacggtgaggggggttctgagtgcagctggcgggcgccgagccccggggctgtgattgagcgctcagctggcccgcccctctcccggccgctcaccgcccacgc

SEQ ID NO: 5927 - DNA, 2567 bp, synthetic construct
  misc_feature 1..2567: note = Description of Artificial Sequence: Synthetic polynucleotide
  source 1..2567: mol_type = other DNA
gygttgggygatgagggatygttgggtaattgggggtataggatygggtttygttgggttyggggtagaagygtygaagtttygattyggaaygyggtgattttattaaygtagaagttygygtagtygagtagaggagtttttygtaggygattttyggatagaygtttttgygyggttygygtggtttagtttygttttaggaaatttttygygtagttttygttttatgygtttttatttagttttttttyggggtygttttttttttaaagtagtttttygggtttattgggygttttygtaatygggtyggaatttygaayggtttygygtgttattyggttattttggtaatattattyggyggygttyggyggtttaattttagtttgyggtttttttygagtttttygtaaggtggggatygggaygygatyggggatggggaagggggttgtaggaggtttygtttgygttgtygtttttgttgggtatagygttttttattattygyggygatttyggttttygtaaggtggggyggygagtaggagtyggggttaggttaggggttygagttttygttygaggggyggggaaggygggtgaygtgagtygggtygggygggyggagttgggatyggtttygggaggygggggygagygygyggagaggtagaygygaggagggaggyggttgagtagygygggyggttttgyggygggygyggtgggygygggyggyggggtttygggattttygygygtttttttygygyggygtygtygtygygygtttttaygtttygygttttayggygttttygtttygygygtttttygtgttygttttttgttagttttygggtygyggtygtttgtagagygagygtttagayggagttttygggtaatttgagtggygtygatyggyggyggagtttttggtagagtttttygattyggtagygyggaggggattygygttygttygygtygygttattttaaattttaagtagygtygttttatyggygyggagtttyggttggaggtaagagtygygygtygggagataygtatygtgagyggtagygtygtyggttttttttttygtygtttyggagggygaagtygyggttttttagttttttgttgygtygygatagygtyggaataygtttygtttygttgtygttttygttgtgtygtyggyggagggggtygygagtttygygtttyggtyggaggatgtgygttttygygggtygtttagtttgagttatgygttttaayggyggyggygygtyggtyggtatggagtttygygyggtygygttttgattygttgtgygtttygyggtyggygggyggygggaggyggyggatygagagtyggagatyggygtygygggayggaagygagygggygygggygtygygtagatggtttgggygagttaggtttgaggtttygtttttygaaaygtgattatgtggatttaatagtttttaggatttaggtgagygattyggtyggygtygggtgygtgtgggygygtgggtgttaggttgggyggaagyggygtttttttttatgttgtaaattaagggattttttttygtttttygtaagygggtaayggggtgtatyggtagtyggaaaggggygttygttyggagtttggagtagtatygyggttttggyggggagyggtygggtttttagggtttygygygttyggggtyggggtagyggygttygttttagtaattygggaagtggggtyggttaggygygttygtagttttaggagttagtagygtagtgttttggtyggttgtttyggygygtttttttttyggggttyggggygaggygtyggtygttgggygyggygggygygggggtyggggttgtyggggaaagttaaagtttygggtttttagygagagtttygtaggyggagttggaggaaattatagttaaatagttatttygttttttttttttttttttyggggtttyggggttgagtaggggttttttaggtttttagttgtygatttagttgtttgygggtgattttygggttygaygggygtttatagttggygggtagttggggygggagagttggggtttttggggagtttyggyggttatttygttgtaaatatataygtatataygttygtyggygygttyggggtttgtttgtgtttgggattttagggttagatggaagagggggttygagtttagagttygtggtgggggtgtttagaaagatttttttyggtaaattttgttagttygtyggggttttygggtttttttggtttttgtttggggtggtttagggtttattagagtatagttgtygtttttgttgggtaggttgtttttgagttttygtttttttgtyggggtatttatygagttygtgtatttgggtttygggttggaatygygagyggggaggatagaggtggaggyggagagtagygtgyggttttygagtttgtttattgggatgtattgygttttygygttggggayg

SEQ ID NO: 5928 - DNA, 573 bp, synthetic construct
  misc_feature 1..573: note = Description of Artificial Sequence: Synthetic polynucleotide
  source 1..573: mol_type = other DNA
gygtttaagaagtyggggttttttttggttaygygttttygggggygttygygttttttaggttttggttgtttgggygtygattttygggaygygtyggtygatagtaggggaggyggtagtagggatygtagtagttttygttttygtayggttygtygggtygyggtgagtaaggygggtaggygyggygggaggygttygaygtttatttygggtttggygttttttttyggttattaygyggygtygtttttygggattttttagttttyggagtttygygygtttagagtygttyggagygygggyggggttagtttgggtagtygygggtygttgttgygtyggaagttttygtygttagggagttttttgggygttaggttttgggtttttgggygaagtygaygttagaatatgtttggtttygtatttagtttatygtatttttagygygygtgggtggggggygtyggttgaggtggggagggtatagtttagttttaggttatagtgtttygggyggggtagygyggtgyggggtgaaygttatyggttyggyggatagyg

SEQ ID NO: 5929 - DNA, 383 bp, synthetic construct
  misc_feature 1..383: note = Description of Artificial Sequence: Synthetic polynucleotide
  source 1..383: mol_type = other DNA
tyggtttttatagyggtttygggttttyggatggygtgayggtttgtggggtttgyggggtgygttgttttyggatttgyggggggaggyggttgagttggyggygttygygggtttagtggtgagtgyggygtttttaygtttagttygaygttttyggagyggtygtygygtaggggtgggygygggtttttaggagggagggyggttgtgaaygygttttgtttttygygttttygtagttttttgygtagttgatgatttttataattagtttygttagttttattttttgtggatatttgggtaaggtygagtyggaygttgttaygttygtygttayggtgggtgtttgatttygtttttgtaggagtygaygggyg

SEQ ID NO: 5930 - DNA, 853 bp, synthetic construct
  misc_feature 1..853: note = Description of Artificial Sequence: Synthetic polynucleotide
  source 1..853: mol_type = other DNA
tygttttaggggtatttygtaggygagatttttgtagattttagttaggaaaygttagtgaayggtagygtagggaayggggyggggtygttggtttygtttatygtygyggtgttgggggttgggggtggttttygggattggtgtggagtttgggtttgatttattgatttggttgagtggggagattggagggtygtattyggagttgggttyggggaygttygttggtgggaagggtgtgygygygtyggaggtygyggttgattttgtttyggygttgttaggtayggtattagttyggatagtattattttgtatyggtagagtatyggtayggtgtttatygtggatttggtttygygttaygagtgtgtygyggtggtgttgtattygtygtttatttygggtatgygygtygttttttttgatattaagaygatttattgtttygaygttttttttaagtgagyggtttgggyggggayggaggyggggyggggayggaggyggggyggggttygggtygggygttaagttttattygttttaygtttttttygtagtatygagaaggtgttttagattaygtygttygtgtttattatttayggtayggaggaygaggtgatygatttttygtaygggttggygttttaygagygttgttttaaggyggtggagtygttgtgggtggagggygtygggtataaygatatygagttttatagttagtatttggagygtttgygtygttttattttttaggagttgtttagttagygygtttagyggyggttttaatyggtyggattttagtaataaggyggttttyggattttatttygygtyg

SEQ ID NO: 5931 - DNA, 1062 bp, synthetic construct
  misc_feature 1..1062: note = Description of Artificial Sequence: Synthetic polynucleotide
  source 1..1062: mol_type = other DNA
tygggatgaatgtagttayggaaygygttaatgtaggaggtttttaggatattttgagygttygggagaygttaggygyggtagygggtayggatagyggaaaggggygygatttygyggaatttttyggtagggtagggtttttgggtggtttygggtgtttagaggaaggggtgggttyggggaygyggagggaaattggggaygyggagggaaattgaggtygyggaggaygyggtygttggtagttygttgygtttgtyggtttygygtgggtygttttattygggaggaygygggttttttttgtttgtagygttttygtygtygtygttttygtygttttttttttttttttttattttygtygyggttttygtttttttttttttygttttttattgtttttttttttttttttttttatttttttttttttttttttttttttttttttttttttggagyggttggggttgyggygtygttgttgatayggatyggtygyggtygttatygggyggaggttgygyggygtagatttagaygggyggtttyggagggygygyggygatggyggyggygggtaggyggygggygyggygggygaggggttygggttgagttgygggtyggttyggatggygggyggygygggttggtygggygttttygyggttttgttgygtttygtgygtygtttgygygaggtgttygaggtgtgyggtygygatttygayggttttttgygygtggagygygtygyggygttyggattgygtttyggttagggygaggaggtaagttggttygattttagtttyggttyggggattttagtttagtttygtygttttttttttagttttttygtygggttattygygtggttygaggyggtggttttttttttaatttttttttttygtyggagtttaggatttyggtttttttygggtatttttggtttagtygggttttygtttttygtttttyggygttygtgtttygagygttaygygttaygtttagggtggtttttgygtttatttttttttttyg

SEQ ID NO: 5932 - DNA, 918 bp, synthetic construct
  misc_feature 1..918: note = Description of Artificial Sequence: Synthetic polynucleotide
  source 1..918: mol_type = other DNA
tygtygtttttatagygygtttttaatatygttgtttttgtttygygttttagagygtttttagtttttttttttattttttttatgagtggagtygggtttggggygttttaggyggtgaygatttgtagaagtttttgagaatgtaagattttttggagttttyggttygttagggtygggtttagttaggaygtttygtttagatttttttttagtttggggtgggtttaggttygtttgtttttattgttttgtgttttaggagttttygttyggagtttagattyggtgttygaagatgagagtgtygttttttttygtygggtgagaagttagtttaygtttygtyggttaggtayggtgtttttyggggygttttaygggaatttttgtgtttttatyggygttttyggyggyggggtagttttggygtttttttttygtttttggtttaggttyggttygygggtgtagttttttttagggttttttttttttttygggtygygygttygtttygtatygyggyggtttttyggtagtgtttgtttttattggaygtatagtgatygtgaygggtayggggygygagtttttattattataatgggtgtgtatggygyggggyggggggygttgtyggtttygagygagggaggggagaggagggggtgygttygtgttttgttygtttygagttttygagttygygttttattatygtagygagtygtttttttgggtygtttttttgttttttttttttattygttttttttgtttyggttgttyggagatatgtttggtggygatyggggatttagagttyggtagtygtttttgtttttgtttttgygatttttgttttttttttttgttttttygygtagygtttttygtygyggaaatttygyg

SEQ ID NO: 5933 - DNA, 865 bp, synthetic construct
  misc_feature 1..865: note = Description of Artificial Sequence: Synthetic polynucleotide
  source 1..865: mol_type = other DNA
aygtgygygttygtyggagattagggatgaggttattaaatgattgtttyggttaatttttatttygtttttattygtatygttttttttttaattgatttaattttttaattttagtttttygtttttggtatyggtttttttttaagtttttagattttaattttggttttygattygtttygttatagtttgggaagygggagaagtagygygygtttttttgyggatttttttttagggaagattgtggtgttagttgtttagggggattagggggttatygggatttagygtaatttttgtttygttttttaattttyggaagygttaatagtayggtttttaygtaatgtygggtttttaagtatttttaattygtatagttttyggggaggtygygtagatatyggggttttttatagtttattattttggtgtttgaagttattttggagtttttatygtaggggyggggattagtgttaatgggtagyggggtttggtttttttaattagtattttagaaagagggtttaggggygggggygggtggatagggagggaaygggtttgggtgaaaggggtttgtggagtttaaatttagtgaatagggttttaagtgtygtgttaggaygaaaagaaggyggaggttttgggataggagttggttygggggtygggggaygtttatttgygtttygggaagtttttagtttygggyggttttagygtagtygggygtttagygtttattgtttgttaatygttagttyggtttttaaagyggtaaggttttttygygagggggyggaggttyggaggagaggggaggtgaggagaaygyggaggtyggtataattyg

SEQ ID NO: 5934 - DNA, 408 bp, synthetic construct
  misc_feature 1..408: note = Description of Artificial Sequence: Synthetic polynucleotide
  source 1..408: mol_type = other DNA
gygttyggttgttaggtaattyggttttyggttttttayggyggttttttyggtgtgttttattaagagygatagggttggtgattygaggggygygtgygyggtygttagtttgggatttgtayggatttttttttttttagtaygttygttygggggttttttttttgttaygtygttggggttygttygttatttatagttttygtagagtttttygggtatatygyggttggtygttyggggttaaggatggggygggagygtttatttattttygygtyggtyggggtatttaagaggygygttygtagttatayggygtttygtttttygtttygaaaaagtttttgtttttttggygyggtgtggygttttygttagtttagtyggatttttttygtttyg

SEQ ID NO: 5935 - DNA, 2245 bp, synthetic construct
  misc_feature 1..2245: note = Description of Artificial Sequence: Synthetic polynucleotide
  source 1..2245: mol_type = other DNA
ayggtttyggggtttggyggggaggtttatygttgtttagagggttyggtyggtygggagggggygttgtgttttttttaygttttgttygygggtttttagtagygttygtygygttgtaaygtaatgygygttyggtttttttttgggtagygtttagtgttygtttgttttgtagggtatygtygttttttttttattttggggtttttaggtttaaagggtttttagatttagttttttgtttgaattaaagtggttaggtatttagtttgtaagatgaataaatgaaggaaagaaggaaygaatgaataagggtttattttgtagagygttygygttttagygygtattaggtatattagtgttaaaggtgttgggggtygggtttagygttyggygyggttggaatgggggyggygaggagttttttttagttagtygtagggygggaattgtttaaaygtaggtygtagttttattgggtttygyggyggtttygtttagtagggatygttttgttttttagtttttaatagtttygtttttataaatttatttgagtattttggtttaagttattttagatttttgggattttttaggtttygatttyggtygggygggaggttgattttttatygyggttttttttttttattttyggttttttttygggttgyggyggtygttattgttgttagygygtttygaggattgtygtaaatttygggygtagggaaaggggattttggyggygggatatagagagygggtygggggaaggggagggaayggaggaggygaggaggagttgggagggagtygaggggygaggygyggaggagggatygaaggggagyggaggggagagggagggggaggaaggggaggggaygagttgggygagggggyggggagtygaggygaggagyggygyggatygtgggggaggtggygggggygaggtyggtaagaggyggtygygggtygggttgygtygggaaayggyggttagattttttygggaaggggygagygagagtygggtygggtygggtygggtygyggggtygggaagygtygagtygggtatttttttattaggtagygatygaggagttyggtygtttatttygtgtygttygagttygtagtygttygtyggtttttttgggatgttygtaggattygggtatttaggayggtagtygagygagttygaggatgggagggtattygtagtttygtttygttaaggtaatagttygtyggttatttttygagygttggygttttyggtttttggyggaygygggayggggttgggttgtgggtgtgatgggggygggggygttgggagagtygtgtttaggtyggggaaggttgggtttyggggtagtttaattttttggatttttggagttagggttgggtaggtagggggagatttaggtgagaaaagaaatygtggygaagtygtygggatgttggyggaggagggggttygtttattygggtagtyggtttygygttaagaatygttttaggttttygggtagaygtttaggggaggggaggttttattttttaygttttttttgtagatttyggtttygggattggagattttgaagyggggtttttatttygttttagygtttttaaatagtttttygatttygtaygttttygttttagttttgggagygygttttgttttttttttttygyggygagttgygagttyggagagatgaatgtygttygygtttgygagtttttgattaatatygtagtttygggggaggagayggtgtttttggyggtagtttttgtttttygatygyggttgggagygygaygttygtttttygagtttgggtattygygattttygygttgygyggtygattttgygaygyggatygggygttggagtttaggaaagtagttagatygtaygtttagygtttgttygttgaagttygtgggyggtgggggyggttygygggttgtgtgagttagggaagggtygggaggtyggtagttyggttygtygttygtgttaggygttatttgtagttttaagygttttttagagygttttggttttgtagggtataggygygttygttgtagtyggtyggagaggygggtgggtttttgygttgttgtygggatatttygtttygygttagtttgggtatygttttattyggggttygggatttygtagggttyg

SEQ ID NO: 5936 - DNA, 2972 bp, synthetic construct
  misc_feature 1..2972: note = Description of Artificial Sequence: Synthetic polynucleotide
  source 1..2972: mol_type = other DNA
gygggtygtagtyggagaggaataggaatygtagtggggaygttttggttttygggtttatagtattygggayggaygygtagtagygygggtygggaattgggtattagggygggatgggtgagaggttttaagggataaggtagggagaagygtagyggggtgyggggaatygtaygttttttttttgtttttgttttttatttygaggyggtagggygggygggygyggtttygggggtgggygggttgggyggggyggaggyggggtygtagtattggttttatttagtttttttygttygtagttagagygagtygagtygyggttagtttyggygggtagggggggygttggagygtagygtagygtagttttattagttygtaaagyggatygagttggaagtygagygttgtygygggaggygggygatgggggtaggtgttatyggtygygttatggaygggtygygtttgttgttgttgttgtttttgggggtgagtgttagtyggagggggttygttttttttttygggattagaatttygagaagagtygggygtygttattaaggaaatagaatagagtattggggttttagatattgagggtgggtggtgggaaaggatttttgatgtygggattaygaaggagggtttagggttttyggagygtagaggygattttttagggtggagatgagggtaagatyggagtayggatgtyggtttttaggtatygtagggggyggtgggggagttgggaggggttttttaagagggggtatggggtttttygatgtttaggtttttyggaagaggatattygaatgtygggatttygaagggattttttttttagtatttyggtttttggagagtygtgggatagaattaaggygagagaaggagggggaattggayggggattagagatgagaggggygagttgggttggggyggggagttygggaygaygggatggaataatggaggaggtyggagggattggaggtagaggggattyggtaaggataatggggatyggttagataatgggggggaggggygtyggagggagaggttggggagygggagagaggttgagaagtgggttagggagggtagaagaggggygayggygagggyggtagagagatggaagtagaaggaaaggagatagagyggggygyggattttgaagtggtyggggtttygtttgttygttgagggatagtgagaygagaagagagagtagaggtttggatatttttagygtttgttttygygtttttgttygyggttttttttagtttyggaattggggttgyggatttaaggttgggaggggagtgtttatttygtyggggygaattygttttyggggtttttttayggtyggygggttttttygaygygygtgtttttayggtttgaagtagygtagyggatygygagggayggagygggtgtgtttttattygggttggyggtggttaygtttyggggtgtagagygtyggggygtattaggyggggattttttttggtygygygtagttttggttaygtaggygggaggyggtaggtagggggygttgyggggygaggtaagtgtagttygtygttgtttgtttgygagtttggggttgygygtygttttttatttagttgygygattygagygtygygtttatygygtttygtgggttttygygtttygaagggtygggattyggtttgagttttttttggttttyggtgtaagtygttgggtatttaaygagaygggggygttyggaygtttyggattttgtagygyggtatttygggttatygattyggtaaaggtyggygggtttttygggtggttygaygagattgttagatgtggtttgttttatggttatgaatygaatgttttggaaggtttggtaayggaggaggygtttttatttttttygttagtattttttattagagtattgygttttaaatttyggttttatagatayggagattgaggttttgagagtttaaaygatttggttaagattttatagtaagttgggttagagtygtggttagatttttygatttgatttttagttyggtatttttttatttttttagggggtagtygttgttttagttyggggttayggttgygttttttagtagggyggggggggttgatattgtttttagagttygtyggyggtagagtttgygggtgaggtgggtagagattttgttygggtgygggttttagttygaaagtttagttttagttttttggagttgttaggatttgtggttgygttyggggatttgggagygatygygggtaygtttgttgattaaygtygttggttagagaygttgtttagaygygggtgggygagygtagattaggagagyggggaggagggatyggattttagaggggtaaygatttgggtttygggtttgggtaagagygagggttttygygygaagatttaaggaaggaggggagttgggygtggaggatttgggygtttgggaaggtgtatttygataggaatttgtygtttgtagtttttgyggttttygttttygtttyggygygyggttgttyggtttgggatggttgtgygyggttygagtttttttttgggtygyggtgagagagagagggttgaaattagagygygtttyggygggtyggttggygggtygygtyggtaatggaggtattttgttatttagaygtttgtaattagagtygtygggttggttaatgygtttaatagggatggaaygagggtagtaaatgggygtgygtgagyggtygggttgagttgggtggatggtggatggggaggtagtttygygggggaygggtttttatygtattgttttagtttagtttggtttaagygtttygttttttttttgggggatygygtggggaggygggaataatyg

SEQ ID NO: 5937 - DNA, 1026 bp, synthetic construct
  misc_feature 1..1026: note = Description of Artificial Sequence: Synthetic polynucleotide
  source 1..1026: mol_type = other DNA
gygggygagtggagtgttttttagatttygyggattygaygggagggattttgtaatgtttaattagaatyggttgttatggygatagtttttaggtagygtgggttgagtttttygtaggaataaagggtgggtygtygttggattttgygygygttygttattaattttttttttagattygagaggggyggygygtttygttttygggtygygtaygtyggtgttyggyggygygtaygtttgygggagttttttttaggtaatttagtgttgatygttygtgtyggtgyggtygttaatygtttttgtyggagttttaggtttaaaagtagttttttattttttttgggttttttttaatttttttttyggtttgttttggggtatgagtagygatggtyggttgtatttttgaggagaaaatttatyggygttttttggagttatttttgggygagtttygyggatygtgyggyggyggygagtyggagtyggaattygaattygaattygaattygaattygagttygagttygagttygaatttgaattggtagaagttgaggyggtygaggtttyggtagaggaattyggggaggaggyggttayggtagtygygatggaggagggggattaggagtaagattyggagttygaggaggaggyggyggttgagggtgaggaggaggaggagggygyggygayggyggyggtagtttyggggtattyggtygtgtygtygtygtygttttagttgtygtttttgttttygttttygygatygttgttagagygtattattygygaggaggtggagggygaaagtttggatttgtgtttgtagtagttttataaatagttaagtagttgggtttggttggtggtgggttygyggtttttatygygtyggtttyggaygyggttttttyggttttttaaattgtttttttttttgtttttttttttygtattygygtttgtygtygttgaaagygttttygttgttyggattygggyggtyg

SEQ ID NO: 5938 - DNA, 10207 bp, synthetic construct
  misc_feature 1..10207: note = Description of Artificial Sequence: Synthetic polynucleotide
  source 1..10207: mol_type = other DNA
gyggaggyggtatagttggagttyggattgtggtaygtygttatygtgttgtttyggggaatttygattygttttttgygaaagygttttygaaygygaatttagagtttgtgaaygygtyggtaagttttttatttttttatygtygttygtygtaggtgggttygttttaggggttttttttgygttttatttygttttttaagttatttagtygatygtttygtttaygttttygtgattttagatatttataattaygatttygtttttatgtatatttaaygtaygayggtgtatagaygtgtatttgatttttgyggattaggtgttttaagygtatagyggttattygyggaatygyggttyggggttagtgagtygtttgtagtttttygggttaggggattttttagaatttygggaaagttattygaagtttattygggatgyggttttggttttyggtygygtgatttygtttttaggtgtagaaygaygtttttttagggtttatagttgttaggttgggttttgttttygtatttttygggaagattagggayggggttatataggtygtggttgyggagaygttttttygggttatttygygattaggagggagtygagtygttygtttttttygygtttttygttttattttagttagttggttttattttgygygggataattgggaygggagggaggygaygggagggyggyggttttagagagattgygygtttgttagyggtaatttgtttaagtggaygggaygggtygggtygttgygggttggggttatygaggtygyggtttttattttaattagatttgggatygygggggagttyggttyggtygttaaatygggttggttggygttagggtttygggaggtgyggttyggyggggaagtygtgatgggaagygattttgtttagggagtgttttttattattatattttttaygtttaggtagtgatygayggtttggyggtatttttatagygggtttatagtayggggttatataygttttttgagtttagtttgggtatattygtttgttatygagggtttaagttagtttgtagttygygtttygttattyggaygtaagttygtygttygttttgttaygyggtygtatagttygagttttttgttgtttattgttygyggggttaygtaatttyggttttgtatatagaggaggaagyggyggggattttttgttatttggaggtttaattyggggaaggttttagtagtgttttttaattttgygagaggtgayggggtyggaggayggaagggtagttaygttaggtttaggatygyggttttattyggtttaggtygttttygttttygttttattttattgttgygggaagygyggggygtatagatygygygttattagtttaagttygttygaygttttggtyggagatygtttgygagagggaggggyggtygagygygygtttttygtttgtttgygggatttggtygatgygaagtgataggggtyggagttttgttgtggagtttyggtygtttggygttagtygttttygttygygttttttttttttagtttygggyggttygygaggygtttttyggggttttttaaaggaataygtatattyggttttyggggtttygttaggggagggggtttttgggaagggggagggggtyggtttaggtgggggaggggtttagyggaggttttayggygtygttttagggttttttaggtttttttagygttagttttyggtgagtttygggtatttttagttggagagtttggttgggggtygttatagattttttagagyggttgtagtaggattttagggtgatygygggatygyggggyggggygagtggtgggattttggttyggatagagtttyggaaagttagagggaaggtyggtgttattgtaggtggggtygtygtttttagatgtagtygttgtattgtygtygttaggtttttyggttaaataatttaggtttgagtgttttaaattttttaggtttyggatttttggattagttatggatggattaatgaaatggattaatgtttaaaaygtatatatttagatgtatatatatttttataaggataaaagtatgtgtttatatatatatatatatatatatatatatataygygygygygygygygygygattttgygaatgtatttayggatttttaggtyggtatttgggttttyggttaaggaaagttgttttggttattatttggttattttatyggttgygtaaaygtgtttataaygggttttttttygagaggttatatttygtttaaggtggagttagtaggtatttgtttgtggaaaattgtagtggattttgtttygtttgygtagattgygtagttyggagttaaagattygttttggttagagaggaggtattaagagaggtgygatttagttaagaaygaggtygtggagaaaattttgtgggggyggygtttatatatgyggtgatgaggagttgtgagggttttggggtyggtttygaaaagtagggataayggtygtagaggttatattgttttygtyggtttygaattygtattgttaggagagattyggtttttaaaygttgtttttaaygtttaataaygaagtgttttgygatyggtgtgygtagtgggygggygtttgtatgggttaatgttggatgtaygygtttattaygyggttgtaygggtgggaatgttattygtggttagtgtatgttttgtttttttttttagaaaaygatttttaggaattagtttgagtgttygygttygagttygattggaagtaggtgygtggtygttttatttttttygtgtatattttgagttatagttttygttgygtatagagggtattatayggggttygatatatatatatatatatatatatatatatatatatatatatatattattattttatgggggggaaattgaggttgtyggaagatagaaaaygaagattgattatagaagagggggttttaattataggtgttygtagatattttaatttttttaygygttatttagtattttttaatttaggagaygtgygttttygagagatgagaagaaattaaaaaagtggttggtagggygaagagaggaagtyggtatttyggaagaaggagattttygttttyggtatyggatagggygaaaattygttgggtygygggtggagaattyggggttygttygygyggtgtygttttgtgtttagygaaaggtgygtttatttttttggtttygaggattygtttttttyggtygttggaaagtttagggyggggttygggtttgyggagaattttaggtttttttygagtttttyggtgaaggygggygygggtagggggttttygygtttttttagygtaaggtygygtttygttttygttygygtyggttttagtagggttyggttatggttttatttattagttttygttatttgggattygttttyggatttyggtygttygagtttttygattygttygtttatyggtttygttttttagtgtttgttgttttttttyggggygtagggatttttaggyggygttaygattyggagttgggtyggaggttaggttggggttygggttagagyggtygggtttttgggygygggagaaggagggygtttttttttygttyggggtygtgttaatgttttgtatttggggtyggygtgyggttgygggtttttttttaaggtttygggattygggtttttttygttttaggttttttyggygggttaggtyggtttttygygttttttagttyggygtaggtagtygtaggygygggygggyggtgggggtyggggtaggaggaggggtttyggggttyggyggttygttattggttaatattttattttgttgatatgtttttttattgttgaggttttygatatttttttttaggttttttttttyggtyggagtttggtttgagttgttaaaatttygttttyggagatttataattggtttaaaaagygtaaaattagtaattaaggggggtttggttygttagygtaggggattygagttgggtaggatatgtgagatagttatagttttttagagattaygataagatttaattagtygygygtggttttyggygtyggagygggttagtttagttyggtttagttyggtttygygtagagttttygtygttttygygtatagagtygggtgttttttgyggtgygtyggaygggaagtttygaggagtagttgttgygttygttattygggtygttygtttatygygygygtygtygttygggtygggggttygagtygygygttttyggtttyggtttyggttttygggygtttgggtyggatgtttygatgagagagtyggygttggyggttagygttatggtttattattygttttaygygttayggttygtygatttttttatgttygtttttttggyggyggygtagtttttttttttttyggtattygygttgtygttyggygygttggttaagtygttgttygattygggtttggygggggyggyggtygyggyggyggyggyggtagtagyggtygaggyggggttgtaygtttyggtattgggttygtattygttygtygygtatttgygtttttttaagagtttggagttygaggaygaggtggaggaygattttaaggtgaygttggaggttaaggagttgtgggattagttttataagttaggtayggagatggttattattaagttygggaggtagggttgtyggtyggttggaaggygygygggygggygggygggttggggtaygggattgtayggattagagtagagttggggattttyggttttyggttttyggttttaggttttggttttgaygttaygtttygtttttayggataattaagttgatttttttygtttggtatyggagygatttttttttaaaataaaaaygttaaaatttttygaatgaaataaaaygaaaatatattgttaaagaatagttttaatygttttgagttttagygtagaggaggtttygyggtttggttttggyggtttttttygtttygygttttygtttttttgygttygggttygttttygagttygggggaaatttagttttttttagattttgtttygatttygaagtttttagtgggatttgggtttagttaattttaygttggttgttyggtttttggtagygagtttygggttagtygagtttttygttttatygggttgggagttttttttttatygygggtattygagttttggaygtattygtygttttaggttttaaagtttgaagaaagttatagtttyggtttttttatttttygatttagttatygagaatttaggtttygggtttatttttttttttygaattgtayggttaggatgttttattaggttttgtagtttagtttttaatataaatattttttagatttatttttgggagttttygttttaagtgggtattttttttgaaygaatttyggggagattaaggagaagygagaatatttttagagggtttagattttttttttgggtattagtttttattttagattagggagaaagagggtttttagatttgagtataaggtttaaaggaggttgtttaggagagggtttgataggtagaaatgggattttttgggagtaataattataggtggggtygttygggtagtgatgagagggtagagtagtygattataggggaaatagttaggyggtagyggtgtgygtaaygaggagggataaataaaggaggagtggggttttggaatttagaatagtyggttttaatgggattttttttttttttttttttttaggyggatgttttttttttttaaggtgygagttagyggtttggataagaaggttaagtatattttgttgatggatattgtagtygttgaygattgtygttataagttttataattygygttggatggtggygggtaaggtygattttgagatgtttaaaygtatgtatatttatttagatagtttagttaygggggagtagtggatggttaagtttgtggttttttataagttgaagttgattaataatatttttgataagtayggtttygtgagtgttggggtagggtggggayggtgtaggagtttgttgatttagtattgtagttgagtaggagagtagggyggtaggattttttagggggaagygttgggtaaatttttagagtgtttttgttygggttattgttttgtggtttaygtgggttgggtttgggtttgggttttagygtttttttttgtaagtttgggaaatggtggggttagtggttggtagtttataattttagttttttaggtygtggagggttttttgtatygttaatagggaggtaggtgttgttaggattgggtttgtagtgttggattayggaggttattttgtttttggtttgtaggtgtygagtttggaagatttgtttatgattttaatttgtttattatttttttgttaagattygygtttttggtttttttttaagattaggggatttaaaagttaaattattttttttatttatttttttagtttttttaagatttttttttttttttataggtagatgtttaattaggaggagagggtttgggggttttttttatttatgtttgagtaaggttttagygaaygggggtggtgttttatagggtaaaaggaattgtttattttgaggtagggtagttggtgagttttygaaggttggaattttttttttgtggggttagggggtttattagtgttagaaaggaagagagtgttaagagtggaattgtagggttttgttttgttttattttgtttgggttttttttgtggggaggggttgttttttggttggtttttttgttttgttttttgttttgttttgtttttgttttgttttatttttgtttttaattgggaaattttttttaatggtaagagaaaaagaagttgtgaaaagagaaaagygagaggaaaagtagaagaaaaagaaataagggtgagaaaagagtagagataggagaaaatggggaagaggaagaatygatagagagagagagagagagagagagagagagagagagagagaaagtggagaggaagaggttaggtatttaaagaatagaaaagttygggtyggggttggtggttgtyggttgatttttatttttttygtagattattttaaattttatgtataagtattagtygygtttttatatagtgygagttaaygatattttgaagttgttttatagtatttttygtatttaygtgttttyggagatygattttatygtygttattgtttattagaatgataaggtgygygyggygggyggtgggttaagtttttgtattgaygttttttaataygtgtaggtttaatygttygtttatygtttttygaagttttttgtaygggattygygtttttgyggttygttttygagtatygagtttygtatttataygygtagtatttayggaagtttttaaggygtttttttaattttatygygygtatatataggtttttttggggygagygaatagttgggtygtygttttgatggagatgtttatttaataattagttgagatttygggttygygttgatatttttatattttattygtttattttttggtttaggaatgagaatgtaagtgaagagagggygttygaggtaatttgtttaggttttatygatgtttagaattyggggtttagtttttattttttyggggggagttagagggtgggataggtgatatagttttttaaagtatttttggttattgttttgggttagtttaggttttagattttttgggaggygtttagagaattattttttaattaaagggttttttttgtttgyggtttttttatttttgttttagtggggtagagtattatttttttaggtttgtgtttttgtgygttattgtygagtgaaagagagggtaygagtgttygtgtyggtygttgtggttttgtgaattaaggtgtaygttgggttgtgygtgtttygtttggggtgtgttggatatttgtggaggtatgtgaattygtttggtttygtaggygtttgttatgtttgtgtatatttgygtgtgtgygagttygtgagtgtgatttggttttgtgtgtatttgtagttttgygtgtgaattgtagtttttgttygygtttgttygggtgyggagtygtttaatttgygtaagttygygggygggtgtgtatgtttgggttggtttygatattgtggtattgttttaggtttgtgtggggttgtttaggtttgtttagggataatttttygaatgaagtttttggaggatagatttygtygtttttygygaggtttttttatyggttttagttyggggygttttattttaggygggtgggtattaagtggaygtttttygggttttttttttgyggttagtattygttgatttyggggtgttatygattaygttggaagagttayggtttgatttagygtygtttttttggttttygtagattatatagttgaagatygataataattygtttgttaagggttttygggatatygggaayggtyggygggagaaaaggtgagaggtygaggatagtagttttgtggygggtgttygygggagtagygagtaggagggatggagggatgggtttttygttgatttggtttattygtttatttttaggaagtagttgaygttgtygtttttaygtttgtaygaggagtattgtaaattygagygygatggygyggagttagaygtttygtygtgygatttttttttygygygggaattatttattttttygggygtagygtttagttygttgygtttgtatygggttygaggtgagggtyggatyggaggagggatagggaggtggyggyggggggtttttaggtygttgggttggttttttgttgagttattygttaatttgaaaggttaggaaggaaaygtyggygagtgtttgggatggggttttygtttygggatttttttaygagggyggttttyggtagttagaagattyggtyggatttygagtttggttttttgggygtygtgtaattttatagttgtagggttttttttttagggttgggttttttttattgtaaatttggggttttggattaggtgatttgtagttgttttttgttygattttagtagttttttygatttggttttttygagagtagtttttttygagtgtttttgattttgttygtyggttttygtttaggtttttgtaattygygygtttttttttygtagttgaggagaagtygtgygtygyggatagygattyggagtttgagyggttgagygaggagygtgygggggygtygttaggtygtagttyggttttagatagygttagttttattygtttgatygaattygagygygttygggagyggygtagtttygagaggggtaaggagtyggtygagagyggyggggayggttygttyggtttgaggagtttggagaaggagygygtygaagttyggaggaaggaygaggggygtaaggaggyggtygagggtaaggagtagggtttggygtygttggtggtgtagatagatagtgygttttttttgggygtyggatatttgttyggtttggttttttttagttatttgtaygggtagtagttttttgggtygttgggagtyggttagtygttttttttgtattttggatagtttattatgggttttggygtttttttygttatgggtatgggttatttattggtttyggtggtaggyggyggtaayggyggaggtggygggtttgggatygtygyggggttggaygtaggygggttgggtttygyggttagygtagtaagtatygtygygtttttttygttttattttttttagtatatgttggtattttaggtaaggtttgtgatttygyggtagygttagygagggagaaggtttagggagttggyggygaggttagyg

SEQ ID NO: 5939 - DNA, 2392 bp, synthetic construct
  misc_feature 1..2392: note = Description of Artificial Sequence: Synthetic polynucleotide
  source 1..2392: mol_type = other DNA
tyggattttttgttttttyggtgagtygttttttttttgtygtygggttttttttttttttttttgtttagttaaaattygaatttaggygttaggggagaggatygtygttttagtttgttttattgttgggggtayggagtttttgtttttttaaggttayggttttygttttygyggatttygttyggattttttttggttatygggaygtttygttttttttttttygtagtaattttttatattygggttgtgaagttyggggtatttttaggtyggygataaataatttatagggaaygtggtattaggtttttttygygggaggagggggygygagtagygagagttatygttattygyggtttaaggatattygygatgyggyggyggyggyggyggyggyggtttygggyggggattygygttaygttttttggyggttaagttgagtattaygtattyggygtttttygttttaygttgtttttygtyggygttygyggtttyggggtttttatttttatttttttaagttgggtygtgatttygagtttygtagtggggggattaagttagtttggtaggyggttttagtattattttaggttygttygggggttttgggygaatttaggtgtttyggatttgtttatttgtttttggtaygtttttatttttygggagtttagaaataggtttaaagttattagtatygttaagatttggaygggttttgaaatatagttagyggaatggtattttttttaaataagtgttttttttygatttttttgtggttyggggttagggattgaattaagataaygttattattygagggttgggggatygagttagaagtttttttggaygattagggttgggaaatygagtggaygaatggggtgggtattagggtttggygggaattttygttttgtttatttagtagttttttgtagggtygygggaygtatttgggggtttaggttgtygggtgtttttgtttygygtgttttygttttgttygygtaggtaggaaataggagattyggggtttttttttttygtygtyggggattttgggygaagtttttagagatyggygtaggyggttggtgygtagttagggtttagygttaggttttgttygtttagtgttttttttgtttatttttttttttgygttttggaagttygggagtygggtaygggttagtatttgtaagatgttattattttggaagtttatttygatttttttaggtygtaggaaggagagagttaggttggggtaaaggagatggggtagagttggaaggggaagaagygggattygyggygggggaaggggtttgggygtygaggygagtgygtagtaggtgtttagtagatttagggaaattggggtattgggttggggagtygtatagtttttttttattttttygatttttttttaatttttygttttggtggattttagtttyggtttttattttyggttttgtttttygtttttygtttyggyggtttttagtagtaatagtttgggttygyggtagtttagatttttttggtttygyggtgttgtygygttaagygaaggaggaggagggttyggygattttggggaygaaygttttggaygtttygttygygtttttttttygygttygtygygygtttgtttgttyggtttttttttygtttttttttyggtygttygggttaaaatttaaggttaggtttttgagggttygggttttttagtygttttttttttgagtttygagagttttgygtgggtttaatttttygggtgtttygtttttgttttygtygtttttgttygygygtygygggaatttagttttaagttggyggygaagttggtgtttttygttygtygttygttatttatygaggggaaggggygttgygttygygaygagagttygygtyggtygtttttttygyggtgtttgttttagagtttyggtttyggagggttggygygtttagttttagtttygygggygtyggagttygggygyggtggggygggggygggggygggtggygyggtttggttygttggtttygattygtttttgygtttygygattttttygaggttygtayggygttyggtttygtttygggttgggttgygtatygygttttttgtttttagagttygtagtygattgtgygggagtttttatygtygttygygagggttygtttygtyggggttygttattttygtttyggttyggttyggttygttgtttttygaggtttttttygtygtattttygggtttttttttttttttyggaatygygtttttagatttgatattyggggtaagtgygtttyg

SEQ ID NO: 5940 - DNA, 564 bp, synthetic construct
  misc_feature 1..564: note = Description of Artificial Sequence: Synthetic polynucleotide
  source 1..564: mol_type = other DNA
tygattttttttygtggtygttagggtaggggtgggaggaatttggaagttaygtgygatgttyggagttgygttttttgttttggggygtgggttygygagygtygygtagtttttyggatygttttgagttgttgygttyggygttgtttttttttttttagtttygygtttttttttygygattttttttttgttttttyggttttggaagygttttaagatggggtgggggtatggagggagagaggggaggagggagttgttygggggtagtgtygttaggaagtgggayggggattttggygtttttttaggttgttgygygygggttggggatygtgtatygttttgygygttagaygatgtattttttggaayggtagttgaggtaatgyggggtgtgaagtggyggygggtagaggggttygtaggggttgggattygygtgtttttttttgtttyggtgyggagtaygatgtgttygggygggggygaggaygttygggaggggttgggttgygtaygttygyggggtygtygtagatgggyggtttggaggyg

SEQ ID NO: 5941 - DNA, 3277 bp, synthetic construct
  misc_feature 1..3277: note = Description of Artificial Sequence: Synthetic polynucleotide
  source 1..3277: mol_type = other DNA
gyggttgtattgttgyggggtgtaagggygggggaaattatatygttaggygaggygyggggatygtgttggaaggttygyggygyggttttttttgggygattgygggggyggtttggtagggagttggggygagtggtygtygyggggtttygtaggygyggggaggtatyggtygggtattygygyggttgaggygagggygggggatgtttggtygggtagggaayggggtgggggagggtagaggggygagygagtyggagggggaatyggagtygagggygygygyggatttygaggttttttaggygggttttgagygattgtaaagtttgttygagttggttgagygtttyggyggtyggtgttygggataggtygtttatggtgtttttgttygagtygggttgtttgyggtygtygttygttygggtttygtyggtttyggggtttagygtgttttggttttygtagyggtttagtttggyggttagttygyggatggtttttttttggtttaggatggtttttttttgttgtagtatygtttygyggagttgtagtaygttgtttyggagtttttyggygtygtyggyggttayggaygyggygtatatgtyggygtttaygggtatygaggtgtagatgaagygygtyggttygaaattttgggtttyggygtttaggaggtagagggygagtagygtataggtgygygyggygyggtyggtyggtatggttgygggtatygggygtttygggttyggttyggttyggttggggttyggtttyggttgggattyggttygggttgtggtttygygagyggttygygttttgggygtygygtttttyggtygygyggtttatatygtygygttattaggtttttattgtygtttgygttgyggagttygygttttttatgtygtygygggaggggtttygagtygtygaygttagygggggaggaatttygttttaattgttygyggttygggttygyggygyggygggggttttaygagygygttatyggggttgttttygttygygtttttttygtttttttgggagttgtygyggtttttttttttttygttttygtttgggtyggygttgttgtttygaaggtttygagagtttagggggaaggaagtygggtttyggtttyggattygaggatggattatttgygtggtgttttygaattttygayggggttttaggygggygggaaattatygygttygggagatagaattyggttyggtttttttggttgtattgaatatttttgggtyggggtygtttggagtygggttgggtgtttaaggatttaggtygttaatattygagtgttyggtggttaayggttyggagtggggtttygyggygttattaagtttagagygggggttatygggtygtttygygttttttagatgttygtgtgttattgagaagtygtygggtagtttgggtatagggattttttaygggtyggggttttyggygtttttttttttttagttttygggttttgtggattyggtttygttttygggggattgttagtttttatttygtgygggyggggygttggggatttttyggaggtagatttagttgatygagttttttttgttygyggygtyggttygatygygggtaggyggygtygtyggggttggaygttygtagyggygtttyggaagggggtttygygggagtagtygttygygtttttagtagtttttttttgttaggygtygygygygttyggtattttygggtgtttatttgtgygtggggggttgtttttygtttgtttagtygygtttattttttaggtttaaaggttagtaggaagggtttyggaggtggttgggggygtttatttgagaagtttygttttygtttagatattttattyggtattygygtattygygtttttatttggatygyggggttyggttttygagatygyggttygggtttyggygtygggttgggggtttaggattagggttggygtagtygtttygtttygtttygtttyggggttattagagyggttaaagtttyggaaattttttygtttaygttttygtggtatagagaaggaaattgaggtttygagattgyggggtygggttatagtygtggtttttygattttttttygtygttttyggtttttttggtttttgygttttgtagtttttttttgygygtagtygggggttgggggtttttagttagtagggatttaygggtagtttygggtgtygggatygggygttygtttttygggygggagtagaggtyggttygatggagatttttttgagaaatggyggtttttattygttttttagttttygagygttygtygtttgygtttagtattttagtttttaagtttttttgagtyggggttgygttttygttgtttttttyggtygtygttttttggygttagagggatttygyggttygtaygggtttgttttyggtttygttyggagggtgtgygggttttygtttygttggtttygtttgtttattayggygygtttaaatttaygyggttygyggttttttgygtgttttgtygatttygggtygtaggaggggttagtttygtyggtttttaygyggggtttgygtyggtagygttaygggttggaaygygtttygggagaaattattygygyggggtygyggygttttttgttttaattttygtagggagtygttaggygggtgtttttttggttttagygttttggtttygtygttttttygtaygygtttagtggggaggtygygttygttaggtttggagtyggatygtgtttagtygagagygygygggygygggagaggagttttgttttgtttagggtaggttgtttagayggggygggaatttttagtttggtttygygtttttatttttagtagtygtggagtttttttagtygtttaaggttagggattttgtttggttttttttttagggtagtagattttagyggtttggtatttyggtatagaggagygtgtttttttttygtagaggaagggagtggayggygttagaaagggaggggagtttggggyggtgtttggggttagygggatttttgggtattgtggggttttaggagaggagattttygggtttagtttgtaattgttgtgtaggaggygttgggygggatatttgtaggygttgtatatataygygagggttattatgtygyg

SEQ ID NO: 5942 - DNA, 5692 bp, synthetic construct
  misc_feature 1..5692: note = Description of Artificial Sequence: Synthetic polynucleotide
  source 1..5692: mol_type = other DNA
gygygttttygtagttygtyggttaygtatygtaygtaygygtttttttygygyggggtggyggtyggygggagttaygtggagtagtygyggtgttttyggttaygtttggttttygatgtygygaagggggttttggggtaggtttygtttttygaagttgtygttgyggtttttgttagtygggagaygaygaggggaaggggtgggtygygttgggtttttygtttattygtttttttttagttttgygggggttaaattygtttttaataaatttygygaaaaagtygagggggggaygygtygttgttggagaataggttagaagtgatagtagaatgggtygttgagattttygttttygtttyggtttttygtyggtttggygggyggygaygtggggaggggtygtttagaagtyggggtygttygggtyggggaattttttygygtygaygtttattttttaygggtygtattygtygaggggtygaaaggggttttagtggaggaygyggtgggagttgggtttygttttagttgtygaygtyggyggtgttygggttttygggagygtagtttttggtataaagtagygtygaagattttgtygggtgtttygtygyggttgtygttgtgttygygtagggtyggttygtgaatgygtgygggggttttygagggygttttttttattttgygygttygggggagttgttyggtygtygtyggtaggtagaggtttygggttttatgggtgttttygagatttyggatygtgygttgagaatgtygaygttttaaaygagttagtagagygggtyggagttttggtygggaatyggygtygygtgygtattggtyggygaggtttttggttygtyggggaaggagtttagagygtttgttttttyggtagaaattaatatatataaataattattygtattttttatattgggggattgggagtaaggagtaaggataggggaggggataggatttaattygttggttttttattttaaaaattatatattttatgttaygatygtttttygttaagattataaatatttaatttggtttggygtaataaaattagtyggagtttttttaaayggagttatttyggtgaattaagttgtgaaatttaatttattatatttataaaggagaatgtttttattgtaaatttaggttataaagaaattatatttgggtygtyggtttttttttyggatttattatttgaaggtttattaaattattttaaaatgttgggttattttttttatattttatggtaataaaaattaaaygtggtaatattttttttaatagtaggaaaggttaaaaataatygttataataaggggatataatttttaaaagatatttttttttatttygggatgtttttttygygtttggaagygttttttttatttttttaattaattygagtttttaaaatatttaaaygygttaygattttttttaggttttttttygttttaygaggygtttgaggygtagttttyggatggatygtaygtggggtygtagattttgggygttyggaygttagtyggaggygyggggatttygtggtttygttgygaatttgygttttatygyggttygtatatttgggtygagtyggggtygtttygggagtttttygttggtttttgggygttttattyggtttagtaatgttygggttagataaaggagtygttagggaggggttaattygttttttattttttttygttttttttttygttttttttttaggyggygyggaggagagaagatgyggtttttaataatgtgtttggtttaatttgyggggtgtgggtatttgttgygtttttttgggtgagggttgggtttttttttttttatttttttttatttttgtgtatgatattttggttggggtttggggygttttgygttggttagaagttagggttattagggatttttygttttygttttygaagaggggatttgygyggayggygaggaggatygatgygtttttgagtttttagggaaaygaggtygyggttgttgttaygtygygaggaagatttatgaggygygggtygagtatggttyggttyggyggaggtygttygygtatttaggttaatttttgatttttatttgattatttttttttttttgttatttttaagtyggygttyggaaaggygaataaagggaggaggatgggggatgggggygttaagyggtggygagggttyggttyggtaatttttttttttagtgggggtttttgggygttttaggttygygtttaatgyggggtttaggagggygtagtttgaaaggtgatygggttggggttgtyggagattygttttgyggggtggtttttttagtygttaggtttaygataggatttttagggaggggtttttgtaaatgtttttgggygaagagaggayggaaagaatatttttttttaaattgtaattaagggtgtgyggggygggggtgtttggggggtgttgyggtaggtygggttygtttaatyggaggtagtagtttagttttgggtygataaggtygagggaaaygggatttttttgtttttygtayggaaaagatttatttaagygggtaagagggaagygaagtttgtattttttatgttgaaaaaaaaatttaaaatggaaaattattttattggttattatttataagtaaattaaaaatagggataattagagtgtggggatttggagggattataaatttgyggygttttttttattggaattaggagtttttatggtttgttgttttattttgagagaaatgagatttttggttttggtgtaggygggtgtgygtttygagygtttttyggygggggggaggggggagtaggaggggygaggagatttgygtagttagggagtygygaatttygagtttyggttttygaaggyggtaggagaaatygygygttgtgtttygatttttttygttttggttaatygygatttgggaygagttggaggagtttttttygggtttyggaygttygygtygaaaatygggttatgggtattaaattygattttaggyggttatttattttgtttttatttaaattttgatgagttatttgggagtgygyggggattgggaagtgagggatttttataatatttttttttygatttyggttttygagtttattatttattttgtttttttygttttygttttttgttttaaattggggaggggggaggggggagagaaaaggatataaaattatygttttttygttaaatttttaaatttttaatttttygtaaaatggtttggaatttattttattttataggggttttattttttatygggtggaggttagttttttaattttttatataagtaggatttttttttatttttgaaagtttttaaatttagttattttaaatgtaaatatygtgtgaaattttattaattaggtaagaaagtagggagagttttgatttagttgtttttaattttgggaggagaaagagaaagtgagttttttttttattaagtattttaaaataatagygttttttttttttagttygttttaatygtagttttgtttttgttgaaagatttttgttttttttaggaaggggggyggggaggataggtttatatttygaagagttttgtttttaaaattgttygaagatttttttgtttgaygtgtatatgggggaggggaaggagttygtttaggttattyggttttttyggatttygtttaggttattyggttttttyggatttygtttaggttattyggttttttyggatttygtttaggttattyggttttttyggatttygtagaatatttttaaagtttatgggygttttttaatygtgtaagttyggggtttygggggttaggaggggttgttttaagataagggaagttgttygttagattggggttaatatygggtttttttaatttaagtttttttygaaaataatttttttaaaattgagtatttttattagaaaaaattygtattttttaggaggayggggtgggagagtttyggggaataaagttyggtttttttagttttgaggtygaggtagggygtatttttttttgggygaatttaatyggagttgtagaagagataagtatttttaaattggtattygtttygagtttaaggtgagggtggagaagggtttttggtggaagttgtaggaatattttgggtyggggtttatttygygttyggyggtttttygaatttygtagaaagataygtttgtagygaaaggtttttatatattagtygggattttattygttttttatygagagtgygttttgggagygygggaaataaggaaaaygtaygtatttggyggygtttygagggyggtttygygggtttttygttggygaaggtttttagaagttatttttygttyggttgttygttttayggttagttttttttttttyggygaygtatttygtygagttagtttataggaagygttaggagtyggagatttggttygttttttygggygttgygttygttttygatygttagggttygygtttttttttyggttayggtttattagagggatttygyggygggttttggttygggygygtttttttgygttygagtttttaggttttyggtygagttgyggagayggaygyggagttttyggggaagaygaggyggyggyggtygtygttygggtaggagtttyggggygggaggggtgtagggyggaggagygggygggattttagygtttygygtttygyggtygtygtttttyggggygtttagttttatttaygtggaatygtttygttttygtygtttygtttttaygagggaaggtattygagtttygtygtatattygygtttttyggtttygggttygaaatatygygttttttttttagygtygtgtttttygtttttttagygygyggttttygttygattygygygttygttygattygtttttaatttygtttaattatygtttttygyggttgttttttttgtttgagttttyggygtaggttaatggaattaygyggaggygygggyggtttggttaatggaaggtttagggggygtggttggygggaggggttgygggyggtygggttttatgygttgagattygagattgygtygtyggygggtgygtttaggtygtttagttagagtyggtaggatttygtygtygggttgtgggtttttgatttttttttygttgtygggagaagygtttgagtggggagggaggtgggaggaggtggtttygygtygggggtgyggggagygggayggyggtttggatggatayggttagtttygggtyggagagggttyggtttagagtagtttgggttttgtttagagttttattgtgtaygttttygygaggatttgyggagagaygtgtaggygaygtaggtttygggaaggaaggagggtatttgggttyggaygagygataaygttgtgttttgtgatttygtataaayggattttggagtttagggaaagygttttaggtttttagttygggtagggttygtgggattggygttyg

SEQ ID NO: 5943 - DNA, 7937 bp, synthetic construct
  misc_feature 1..7937: note = Description of Artificial Sequence: Synthetic polynucleotide
  source 1..7937: mol_type = other DNA
gygtygtttgygaggggygttttgygtggattyggggtttyggggygygtttatttattygagttaggagagattgggttttayggtgttagtttygygttygggttygygygtygtttttagttygygttttttttattttyggagggtttygygggttttyggygaygggtttttgtttagggttygggaattttttttttttttttttttttaagygttattttttyggagtygggtyggtygttttyggtgtaygygggaagygggtagttttygtttgtattygyggggtygggattyggaggtattygttttttygatatattygttggggtygttgttygttgttttagtttttygaggttayggtaagagttygggggtyggygttatatatttttagtyggygatygygtttagggatttaatttaatygtttttagtttaatgaatagtygygygttaatyggattttygygygtttyggggatttaygtttttyggttttttttttygtgtttygyggttygttagaygtygttttygaaggygtyggtttggggtttggttaggggttyggtygyggggggtttyggtygtyggagtygggagaygtyggagaygggagtygggttygygygatygttattttygagttagtyggggtgggtttygygttttgttttgygttttyggttyggttygyggagygtyggtgtttatttgygagtttygggtttttyggagttttttttygggtygagtygttygaagygggygtyggygtaggtttygatttaggtaggygggaaatttyggagttttygttygyggttygtagttttttattttaggtyggygtggtttgygggggggaaggtyggtyggggtyggtygttygttttttttttttttttagatttttttgattygygggtttttygtygtatttyggttttygggttgtttyggtyggttygyggggattttggaaayggtttttagtttatttttttttattaagyggttttgggtygttttgaaatygyggagttagtaattgttttttttaggaggtttagtgyggattggataatagttaattagygttttgtttatattyggtgatggatagtttattggyggagtgttaattaattttagyggtttygygggagygggagtgggggyggggaaatagagagataataggttttgagtttaattttttygtgtttttgtyggaatgagayggtggagaatttygaatgygtgtgaatttgttagttggtttttagtttaaatattttttttttttttagagggggaggtagagatttatatggagaaagaggagtaaaaataaatgtatttatygttattaagatattatttygattttttgagaataaatagtatttgggtgggaaattaaattttaatagaaatatttgtttgyggaatattttagaagtggtttgtatttgattaygataaaaattgtttagtggtttgttttagttggagtgaggatttagtagataggtagatagggagtagtattgagaaatattatatatggtttattatattatattygttttttttattattaaattgaaaatattttttaaatttaggtgtagatgaagaaagggtaatttttgtttttttaataaatttttgatttttattttagtagttgttttgttgtaaagtgtggtagagggagataaaattgagagttagtaatgtagayggttggagatttagaatttattttttagggtttgatttttaggttatggggaggagagagtyggaygggttatttaaagtttttgttgtttaagtagygggygtgygtgygtgtattygygagttygggttygggtaggtagtagttttagagyggtagatgggttaggtaatttggggaggtttttgggtttggaggtttggtttatttgttatttgttagatagattttagggagaaaaagtagttatttttaaggggtggtggtgtttttttttttggttttttgtgyggtagaagttaaaygttagatttgttggattaaatatatatgtgtgtgtgtgtgtttgtgtttgtgtttaygttttttttttygtygggataygygtattygttygttttagttttttttttygttttgygttattatatttttatttagtagtaatgatttgygtagaggagttgygtagtygtygggtttgaattaggygttatygggtttggtagtagtttygttgttttttgattggtagttttttggttyggygttagtttattgggaggtttgtttaygtygaatgagtggtaygagttttyggtygtggagggttgygyggttaattagygygttggttgtttygggttgagtggtaygagtttattagtatgtagggttygtggttygtygygttaggttgtaggtttgagagtygttttggatgggttygttagagtygttgttgtggaagyggtgtatttatagtgtaatagttagtatattgaaaatattaataggaatataaaataaagttatatttattgatttaattgtattgtatttagttgtatttaggaaatagtttttagtaagtaattgaaattgtttttattttttttttgtttttgtatttttattattattttattttttattttggttttggggttttatattttttttagtaaaagaaatttaggattgtgatgttaagaagtatatatttttttttttaataaaattygttaaaatgttgaggttttttttttttttaaaaaatatggattatgagygatttttttttttttgaaaaattttatygatyggtttaaaattattttygtaatgtatttttgttttgttttgagygtttgttgtttygatygatatttagtattaaaaataaatattygaagataggatagggatygttaggttgygtttggygygagtygygygggtggtatygggyggatagtaggygaagttygggygtygttagygtgygtttagttttgggtgatttaygaaygaattttaatattygtttttttattttgttttttttttyggaatagttttgggttggttttgttyggtyggttygyggygaggggaattggtygggtygtggtatttayggtygttgttttgaggggtttttygggtygaagttaggggtyggggaggggaatggttatggygagtttttygggttttygtttttaatttagaatttttttttttyggagaagtgggggtggaggagggggatygagtaaggtyggygtagyggggygtttttatygygygygttygggayggygygyggggttygggttayggttygtgtggyggggttygygggttggtttttttygggygygggggttaggygygattttagtttttatgatttttttagggagygggtgyggttgtttygtagggagygggttttgyggygayggtygagttattygygttttaaggygygtttggttttagttyggtttgtaggttttatygygttygygttttyggagaygaygtyggagggaggtagaygggttagagttttggttttyggtaggygggygaggagagagygggtttttagatgtaaaagtaggaaataaagtaaatttgtagaagttttagattttggagygygttagttaygtttggggtygyggtaagagggatyggyggttttagggttaygttttgttttttygggagggagttttgtgtttttaggtttagtttttttygaaatgttttygttagygatttttygttygttyggggttttttgttygtygttatttttygttttatttttttttttattttagttygatttggygttgyggygtygttttygyggtttttyggygyggttttttttggagttgggttgggagtgggtttygggtttyggtattyggygggtggyggygtygtygttgygggattgtgggatttttagttygggtygtgtggtygttttttttygttttattttttggtygttttaggttttttaggttttygaagttyggygygggtagaygyggaggygyggygyggttttttttygggaggagagaatataaagaaaagttttttttaattyggttagagtygtggyggygtaggtaggygatagtaatttattttttgtttgtttaaaaagtygagtaggttggtgagaaaggaataatygggtttgygattygttygtagggggtgggagattaaaattgttgtttygtagtygagttygygtttygagaatygtyggtagttygygtttttttaattttgaaattttttattggagagaaaaaaaaaaaaaaaaataattataaaataaaagtatagtatataygattttttggaggtygttaggaagtttggtattttygygtgygtagttttyggttttttttyggttttyggygtttttgaagttgtaggtttttgatttttttttttttttttttttttttttgtttygttyggygtttttyggggttygggaggygtyggtyggggttgggggtttttaygtttttagtttagttygggtagttttttttttgatttttgygttygtagttttttygttagagtatttttygggttttggyggtygggygttygttttgtaggtygggatyggggtttgggagtygagttatttgttagattyggggagagagttggygatttttagagggaagggagttttaaaygtttttgtatgtagttgttagataaagagaattttttgtgtagatttatttatttataatgtaaaagtttttygaataaatattaaaaaagtttattagttgagtaaatatgtatttatttaatatattatgttttyggttatagattaaattaaatataaaatagtttgtaaataagaygttttagaattyggattataaaatatygtaatttaaaaaggtatttagtagatggaaaatattttaatygttttgttgttatggtggaatggttataaaaatataaggtttttygtaaagtttttaattaggaatattaagtttatttattttttttttgttggaggtgataaatattaaaataataygtatttagaagatgaggagtaatatgtgaagtgygtttagggagygttttyggagggaygtttgggagtayggtggtgtaygtagtttttattattggtttygatttttygtatttagagtttaaaattgtttttaatttygtttgagtggatgtttygygttgggtgggggtggaagaaaatggaggtgagggttattttaggtggtygaggttygggtagggtttgttggtagaaggttgtgttgggtygggtttatttttttyggttagagggtygagttgggygtygtagatttygygtatttaggtygttyggtattgttyggagyggagatyggtttttgttygyggttttyggtaggygttgaaggaagaaattttagggtygatttgggtygttgagagagagtattttgattttgaaagtattttttttatatatatttttaagtttttaattygtagaggaagattttgggygaatttgattggggggyggggtgattgttatagttttaataggaagttttyggtttygggatagtaggtygggtattgyggygtggyggtttaggtgatgtyggtggyggttgygggttttyggggttttgaggagtyggtttggggttttagygygatgttggggataggagttggtttygttggggttggggaggggggattayggtggatttagaagaatgggtygaaagatgtatgagggggatgggagtggggagaaaaggaaggttattaaaaaaaaaaaaaatttttgagttataattaataaaattattygtttaattagtatggttattyggttaagyggaatgtagtaaaagttggatttyggtatgaggtggggagagggggagagttagtgtggattttaggttttttttttygagatatttttgggtagygggggaggggagagggtgtgygtgtgagtgtgtgtgtgtgtgtgtgtgtgtgygagtgtgygtgatggtttygtagatttgggtttttattatttagtagagttagtagttttttygtygyggygttttagttgtagggattygyggggaygagaaygggaggyggygagtagtgyggttgggttttttyggttgtttygggttaagygtggtygggayggtgygtgygygygyggggtttygggtgttgggttgygygygygtgyggyggggagatatygagygtttyggtttygttattyggtttggtygtygttygttygggtyggygggggtggggggtggggggagtgggtgagygggyggggyggggattttygggygagtygagttttttagttattygtgttttttttgtttttgtttttatagattatggattygtatagyggtygttggttyggtgygyggtygttygtygagaagtttagttttttygygtgttgatyggtttygtygttattatygtttgtgatttyggaygtygtygtttttgygtygttygygygtygagtygttttygggtttyggtygygttgtttygaggaagyggyggyggatyggggtyggggttyggtatggatggtygygattttgygtygtygtygtatttgttgtyggagygygggagtttgggttatygtagygtygttgtygtygygygtttygtttyggttgggttygtygygtagtttttygtatatttttagtygggaaagtatttttygtygtygttgtttatggtttygtatataggttagtgttyggtyggggygggygygggaygggagygttygagagyggaatagggygtttattttttygttttygggagtagagaagttttggttttatttttyggtttyggtygyggtggttgtttgggygttgagyggggtygygygtttygttagttttttaagttgygtygtygyggtttagagaggtttttttttggttattttttttygggggtttyggaggggtagtttyggagtyggttgaaattaaagttttttygygtttygttattttttttygtttttttttgtagatttaaattttayggaaattttttttttgtattttgtatttatttttttaagaygtttyggggttgggataaygaggygttttttgyggaaataaaayggttgttgtggyggggggaggggattagggtaygtygyggtttygyggattagagtggtgtgtgygtygggygagygttaatagggattgttggtgtaagaygagtaaattttgtttttatataaagttttaaagtgttagggygagaatgggtttgtagggatgtatttgttttaaygagtgtttttggtatttygttaaagtyggataaagygtggttagagtgyggtttagttttttagtttgyggttyggggaggagggtagygygggygygggttgggggtggygyggggyggygtttaggatttyggtgtaggygagagtgyggyggatttgttttaagaggagagygaggyggatttgttttaagaggagagygtggggygtygtgttgggtttygtagggayggattttttygggyggttttttttgattttttgttygagaggattagtttttggtagagygggtttaggtttttagggtagtttttttttyggtggttttgatatgagtgtygagggaggttagggtaggggtagttattaygtttgaagttttagaggttattaggyggygygggtagattygggggaagygygtagggttgygttagggattygtyg

SEQ ID NO: 5944 - DNA, 1408 bp, synthetic construct
  misc_feature 1..1408: note = Description of Artificial Sequence: Synthetic polynucleotide
  source 1..1408: mol_type = other DNA
tygaggtttttygaygtggatatttaaygtttttggaaagggagtgaattggtaggatattatygtttyggttagtttygygggagttgttttttagaaaaaaaattttttagagttaaaagttattttttaagygttttggggtttttygggygtttttttyggayggtaattttagaagttaaagygattgtatygttaggtttgtggyggttggaagyggggtgatygyggttagatggtatttygtatttaygtagggttgtgttattttagtatagaattagtaatttttataygaagttttgtgtaaatattaygygggtttatttttgaaygattttttgatgttttygttgyggttatttattttatatataaattaggatttygttgataaattttygtgtttttattaaatagaaggttgttttgtagtttttttygtgtttttttttaaagtaygataatatttgatatttttataaatyggtttgtagaggatatygygtagggggygattaattagttgaggtgtgttattttaaaatattagtgggtatattttaaggygggtaygtggaagggaygyggaatygagggtaattattttttagtyggtgaatttgatggagaaagatgttaaatgtatttttygagttagttgaatttttygggtatttaattattgttagatgtggygagggygtayggagaatatttttagtttyggagaaaatattyggtygttagygyggggatygttygggtygggaaayggttagaggygggaggagagaggattgggygagygtggggagygttgyggygtggaaaagygatygggagggatggygatgtttttatttttttyggtaggtttttttaattaaaaagttggaaaygggaattygtaaataaygatttagggttttaaattatttgtaaagaygygatggggaggggaatatttgygygttttaaaattttaatttygaggtttttagtygygtttgattygggagtygggtgygtttttagtgttygygtaygaattyggygttttggtagtttygatttttygggttygtagtttaagggaaggttygygygggaggtattttygtggtttttygygygtttygaagttygtttttttygtttagagtttygyggagttgtygtygttttattttttatggtgatygtggggaygtatygtyggtyggggagtttygygygagygtygygtagtygaggaagtygtttygagyggttgtttatygtaygtttatggtagtygygtygygygtyggtygtttgygttttygttttttttygtygtygtyggttygygtttttygygttttyggtttygygttttgttgtttyggggttgtygygygyg

SEQ ID NO: 5945 - DNA, 208 bp, synthetic construct
  misc_feature 1..208: note = Description of Artificial Sequence: Synthetic polynucleotide
  source 1..208: mol_type = other DNA
gygggygtgggggggaaggggaagaagttyggygagattagaggggaaattygaaaaagtaagtttttgyggtagtagttaggaaatattygttaggaattggttgygattttaattttagyggttygaagttttagtttttttatttttatygyggtagagtygttttygtagatatttttygaggagaatygyggtttygagggyg

SEQ ID NO: 5946 - DNA, 805 bp, synthetic construct
  misc_feature 1..805: note = Description of Artificial Sequence: Synthetic polynucleotide
  source 1..805: mol_type = other DNA
tygttttttgtttttygtattttttygggggaggggtyggttygygttygtttttagttygaggggtaatttaaaatatggygtttygggygggggatttgtgtaaattggyggagaagggaygyggggatygagtygttttttyggttagggattttagggaggtttttaggtyggaggtyggggtttaggttttgygygtyggtttagttattattgygtygtggygggyggagygggyggggggygyggygygtaggttyggttyggtgggggtttyggygagygggagggyggttggggatttyggtygygtygggygyggggttygggattygggagatygygyggygtygaagttaygygttagttttattgtttygygygtttygttttaggtttygggtttttttttygtatttygtaaagtygagattttttygtagttttttatttygagaggyggaaaagttatttgggattagtagggagttygggygygtygyggygtggggattaggttygggygygygttttyggyggyggtgygtaggagattygggygtggggaggaagtygtagtttagggttgttygtygttgtttttttygttttttgttgtaggagatatygaggtttygyggagttgyggygggggtttaygtttagagatygtgygaggaaagttaatttygttttgtttgtttttttagtygygggggagggggttatygtagtattttaggatagttatatgggtatagtttttttygttttggygtagggttaggtttygyggaygayg

SEQ ID NO: 5947 - DNA, 2462 bp, synthetic construct
  misc_feature 1..2462: note = Description of Artificial Sequence: Synthetic polynucleotide
  source 1..2462: mol_type = other DNA
tygyggtttagttttaatttatygtattttagagggaattaygagggagttgyggattggygggggygggggtttgtaattaatattaggtgtttgtgagagagttttaagggygggggtagtattttttggttgggttgggttygtttggtttygtttygttttygggatttttggygtttagygtygttttttygttattgygttattygttagagttyggygttttttttttttttgttttgtggaygtygtttttygttttygggaggatttygtttttagtattttaggtttttttggygtaaaggtygttagttygagygagtttaggyggyggttttatttttgtagagggaaagygaaagaygyggtyggygggtygagggggyggtygaaygygtygygtggttgttgttttygaattygtagyggyggygttagggyggttatygagttttgyggatttyggtttaatttttagygttattygggtgtttygagttygtygtagttttyggygygttttttagtygyggtaygtagtttttgaygygttyggggygttttttygtagtattagttaggttattttatttttygygtygygttttttygttagtygtyggttaggagtttttyggtttttgagtaggaygygttaaagggagttgggaggtttagtagtttttagygtygttttttygggtgaygtgaygttttttttggagygygggttygttttygttaagtttttatygtaggtttttatagtygagttaygggaagatgtaaygtygggygaggggygtttttyggattttgaaaaatagttttattygtttygggaaygtttygattttttattygtattttttggttagatgattttaattttgggatttygygttggtygtgggggtatygggagttggagttggaggagaggagtyggtagygyggagttgtyggggtgtagttgygygtagttggyggygaggggaggyggtttttgyggtttygtygggttgggggaattggtttttgygtttttgtttttyggaggatygtattygtttatttttatatattatatatatatatatatatatatatatatatatattgtygttagygttttttaygttataagtyggaatgyggaggttagagttattgtttatttgaaagtaggaaagtaggggttgaaaygttgagatggaggyggaggttttggttttatttgygaggttygtattttttyggaaggtttttttttttttygygtttttttagggygagtaaggtttagtttttgagatttygttttttgggttagyggttygagttgtaggggggyggggayggattyggagggagtattagagagagagttygygtttatttttgtttttttygtaaagaattggttagttttattygygtttagtttataattaggttgtygggatyggggagttagattttaggtygttttaatttyggygagggyggggaggggagtgatagtagtaattagygygygttggtaaaagtatagagtttyggaataggttaaayggtyggygyggaggggtggaggtaagagggggyggaggaggagttgttygagyggagagggatgaygttttttagggttttgggtttygaggaatygaagattggtgygttygtygggtttygygtattagttttggggttygtagaggygtygygttyggttttygyggtagttttaatatagygygtaggyggtygatttyggttagtttaaatygggygtaagttttttgttttttttaaagtatttttttgttygtttttagtttttaggtgttygtttgagagtttttgtygttttygggyggattyggttaggtagttttyggtygggttagtttygtttttttttygtttttttttttatygatttygagttaagggtaggyggttygtattygygtttttgtttayggggttaggyggygttttyggtttaygttyggttgttaagaagagaaaggygtttatttgagttatygaagtttttttttggggtttttttyggagtttgttygtagttygtaggtataattttttttggagaaaaaaagtagygtaagggtagagagaggtagggttgtttataggttttttygtaggggttttttttttygaatttttyggggtttagtttygggttyggyggygggaaagagtttttggaggttggaaggggtygttagattygggtttttttygtagttgyggtggyggtatttttaagttgttatttgtagygygtttygggygtttgtgatagttygygtygtttagttttygygggttygtttttttygttygttygttggttgygttyggtgttygggyggttttygygttttgtttygttttgagttygttttttagtygygygttyg

SEQ ID NO: 5948 - DNA, 990 bp, synthetic construct
  misc_feature 1..990: note = Description of Artificial Sequence: Synthetic polynucleotide
  source 1..990: mol_type = other DNA
aygtggtgtgtgtgtgygygygygagtgtgtgagygttaggggtygttygttygtygyggtttttygtgggttggtygggttaatgagygygyggttgtaggggyggygggyggggagggggygtygagttttgyggatggaggygygggtagygyggygygtttatttygygygggygttgttggyggggggyggygtagttattggattyggatyggggtygygattyggggtggygggtggygtgggyggygttyggggttgggatgygtygggggtttagtggyggyggyggygttggyggtggygtyggyggttgtagggggaygagttagygtygyggygttgggagttagttgagttyggtyggygagyggaggyggtagygtaggtagagyggyggyggtagygggagttygagygttgygygtttattatggtygtttagggagagttyggttatttggyggygtagtyggatttyggttttaatagygagygtagtatygattttttagtgttyggtttygaggaygatttggtygtyggggygattttgtatagttyggagtggagygaggagygttttygygtggataggaagaaatttgaggttatgttataaggtaggtatttttygtgttttyggatttttygattgagtttttaattttttttyggatatttttatygygygtttyggygttygttattttagtttayggtyggtyggtttagttttaggttygttttttygyggagtyggaggatatttagggattggagatttygygggattttttatttttttaygttttttagatttttaggygttgggggttttgtgygaatttgattggttttagaaaagtygaaggtygagtttgtattggygygtttaagttgygttttggattttggagatgttaattttagttyggatatttgggttgtgttattyggattattygggtygtatagagtatgyg

SEQ ID NO: 5949 - DNA, 2274 bp, synthetic construct
  misc_feature 1..2274: note = Description of Artificial Sequence: Synthetic polynucleotide
  source 1..2274: mol_type = other DNA
tygtttttygtgtattgtttgyggttygtttygggtttataygggatatygaggtatgatgaggaygtagaatagtagaagygygttttgtttttygggygttagtgttyggggttagyggygtgtattyggygggttyggtygggagygggttggygatygyggggttyggygttttyggttttygygttatttttyggygttygttaatttygtttygttygyggygtagagaagttygtagtttttyggagttttagygattttttggttygtttttttygtagtygtygagtagygtaggttyggygatttygggtgtagttggttttgtgyggtgatatygtygttyggygttaggttygaagtygtttggtygygttygyggggtygtaggtygttggtttygttyggtygygtttataaattattygyggttygtgattygggataaatttttggyggyggygtagttttttttatagttattttttttagagttagttattaaaatagaagaygyggtyggggygaggaggtgggyggggggagttyggtggtygttttttttygygyggttgaygttygtttyggyggyggtagtggttgtggtygyggggtygtttttagtygagttttyggaggygttygggygygggtyggyggggtaygggygtttaygttttttagygggtygyggyggygtygggyggtygtgaygtgagygttttttttagtyggtttgyggggtatygttagttagtyggggagtaagagtttygygygtagtyggygygggttyggttatyggygygtygtygttyggggttgggtttggggttgtttgtggagaggyggygggyggaaygygygyggttayggttayggttatygttayggttayggttggtagttygggtttygggtttygggtaggggaaggggagaggyggygagtttagtaatyggaatygagggaagattttggtttygygggttygtttttygttttttttgttagyggygttagaygtygagtggggttagggataggggaggaggatttaggattttgtgttygygtttttggagtygttggagttyggatttttgtaattgttggtattttgggggtttggtttagygttttgttgtttattygttttttttygttgtttyggaattaaagttttyggtttttttygttttygygygtttatttatygtygtyggggagyggttyggttygtatttagtattatgaggggatttgggatttgtttggygattttggtyggatttttgttaattgyggygggygagaygtttttaggtaagygggatygtttttgtygttttygaggygygygggtyggygygggaygttygggaygtygatagttttttggtggtagagttttaaggttggygtyggggtygggyggggggygyggygggtyggatatygtttttgtttgtgagtygggygttgggygaggggtygtggggttggtaggtatttagttttygggygggyggagyggayggatttygagggygagttttttagtygggattgttagttyggtygtygttttttygyggtttgggttagtgtttaaggttgggyggtttgtatttttgagtttttggtyggttgtaaaaggaatagtagaaaattttgtttgaagtttttagttgtagtygtygggtygtttggygtaggygttgygyggttttygtygatttygagtagyggtygggtttaggtygttggtgttyggttgygttygtagygatygtygggaattggyggtygtttyggyggyggygatttttyggtgttttgttttttttgtygttttttgttyggygyggttggygatttygggaggttttygyggtygtgtagygtttgyggagaggttggggggagtttttygtyggttttagyggtagggtttggyggtygyggagggaagygggtaggtttttaggttttggttayggttttgygtttygttgggttttttttttttattttygtttttttagyggagygtygyggttagttgtaatttgtttatttagttyggttgttygggggttttaggtgggaaggagaggtattggyggtgtgygagtaagygtgtgagtgtgtgygygtgtgtgtttgtaygygygygygggggygttttaagtttagaggaattttttayggagaggatttgtggatyggagtygggggttyggygtgggggygaattyggtayg

SEQ ID NO: 5950 - DNA, 882 bp, synthetic construct
  misc_feature 1..882: note = Description of Artificial Sequence: Synthetic polynucleotide
  source 1..882: mol_type = other DNA
gygaagtgattttttaygtttggataaagygttygaaagtttaggttygygggttagttttagtygttgggtttgataggggttagggaggygggtyggttttatagttaagttatagttttagggtttggtygtatttgagtagygyggtttygggttgttgttggygttgtaggtttygygtttgattttttagtttgygtagygggtattyggtygggaagaatttttttagtaggyggtttagtattaygtttaygygttygygttygygttygygttygtggtygygygggttttagttttaygtagygtttatagatygtgagttygtagggtagtgttatyggtttgtgtagtagtttygggtagttaagtaggtygyggggygygtygggygttagggtyggttttttttagttttgagttygtygttyggttttttygttaatagtggtygttygygtaggtygggatatattaggtygttygttagtttttttagttttttyggtygtagygtttttagtttttyggttatayggaaygygtttagggttatygggaggyggtyggygygggttagagygttttttagttttaggtatyggtygyggtygggttgygttagtygggttagtatggagyggaagagttygattgttttttggtattygttygygyggaaggtttygtygtttttttttaagygttgggygattggtttttygtagtagtagttygttattggggyggyggygggatyggtttagtgttgattttygyggggttgagatygtgygggtttggagygaaggygyggagtaggggygatgagttgttgttgggaattggtyggygggagygyggttatagttttyg

SEQ ID NO: 5951 - DNA, 4359 bp, synthetic construct
  misc_feature 1..4359: note = Description of Artificial Sequence: Synthetic polynucleotide
  source 1..4359: mol_type = other DNA
tygtgttttayggaaattattattatygtatttataggtttygaggggyggatataaagttttttgggggaagtggggtygtagatttttttygattygaatatagattygtatagggygygtttgggygtagtttyggattttaygtygggttygatttggttgtttttggggaggatgtaagtgttttttagygagggyggttgggggyggtggtggtgggagggatgggtgggggggtggtgggagtggtgtygtgtygtttygtttagagtttyggygtagtagttttgyggggygggygagtttagtttggtgttaatgttygygatgttgttgagygtggygatggagayggygtygatgtagtggttggtgtaggttttggagagtttggtygttttggagagtatttgtattygagtgtttagtaagtttttgtygatggttttgttttygtattaggttatatygttttygttgtagtggtttyggggtygttggaagaaygttttgtagagagggttgygtttygataggtatttgaygaagttggygtaggggtagaattyggtgttygttttatatatgyggggtaagtttttttygtygttgttttyggygygttttttgttttaygaygaygagygygatttgtggtagggttygagggatttgaagtagaygaatttgygatygttttygtttatggttagtttaaaagagtttttttttaatttaygttggttttygyggtygygggtatagaagtatatgtaygtttygaattagattttgttgagtagttygaagggygtgttggtgttgaagaygttggaggtgtatagtttgygtaggtyggygygygtgatggtttgtttttgtattatyggttyggygttttgtttttygagtttgyggatgatygyggttagygttaggttggygttgygtagttyggggtttttggtgaggtygagygtgyggtagtaygggggtttattgaggtagyggttgagggagttgyggatgttgatgagygaygatttgttgtagagttggtygtttttggagygggtttyggtatagaaggagygtagtaygyggtatagygtttttttgtttatggtttygaagttygggttttgygttttttygtttaggtattttyggaagatgygtayggygtagygggtggttagtygggtgttttygtttagtygggttygttyggggygttgtagtaygtyggggtttagttyggagtygttttygggyggtttatygygggttyggggygttagtagtygyggyggygtttygggttttagygyggygttttggtttatattgattatatggatyggttygggttttagttttttttyggtygagttttygggttttaggggttygttttagtttagttttattttttttttttttttttttttttygtttttttttagttttttattttygttttttttttttttttygtttttygttatttgtattttttggatttygtttttttttttttttttttttttttttttgttygygttgtagtagtgyggayggttgtggyggyggtygyggtttttygygtygygttygttttygtttygttttttattgttttyggyggyggyggyggtagygttggygttgtygttygygttggtgttatagttttygttgttaggtattttygttatattgtygtttttttgttagttttygggtagggygtatgygttatattggatygtagygttgagagtttttgtgtttaatgatttttagttatygggaggtaaagtygggtttttaaaggagtygygttttaattgttattttygagygtagtttyggaggggtagyggygygtaggggatggaggggaggggggagggggggataagttagatyggagagatagggtaaaggayggaggttgattagatttttttttttttttattyggtttttatttttaagaaaattttgaaggaaaaaaaaaaggaaagggagggagagttgtyggtgggggygaaatatttttaatttattttttggyggagaattgygygggttygggygggagagagggagggtyggygagagggygggayggtttygtttttttaagtaatgttygaggagtagtgttttttttattgtttttttattgtttttyggagtyggggggtyggggyggyggttgygtygggygggtygygggtgttgtygygggaaattygtgtttggggtygttyggagyggagyggagtaggtaggttaatgagtagggtggaggaggtayggygaggtttygtattttttyggygttygyggttagggygtagygggygaggtttgggagygggatggggttggyggyggyggyggtttttttatttatttgttggyggygaggygygggggtttggggttagtygygyggtttttaatttttttttygatttttgtaaaggagygaaataygttttaygttagttatatttttttygatttttttaatagttatatttaagttgttattaaagatttggggygtttttygtaggtttggggtaagttygygtyggtttagttagtttygggaaggagygaggtagagaagattgggaggggtyggtgggaggggagaygagggaagaggygtttgggattttaggggttatagggatttttttttattygtttagggygtygttttttttgtttttgagtaaagtgatataattttttygggygaggygttttattaagttggagttgaagtttttttaaggtttatygggtaggyggaaaaagygaatttgtgtttyggtygattttgtygtagttataattyggtaattyggattyggagygtatttttatttaaagtttgttaatygttattygttygtttttygggttgygttgttttaggygygygggggygggtatttyggaaattggaaaagtagttaaagagttygtygggtttygtttttttataggagatattgttttatttttagttaaaygttygttttyggygygtttaggtttygggygygtttttgygtygtygtttttygttttttyggtttaggggtagttttttagagtygtyggggatttyggttgtttttttaggaggtatagtttaggttattttyggagttygtgttgtattttaatttttattttttttygtagttygtgtgtattttggygygygggttagttgygagtttttggggtgaggggataygagggagttaggtttttagtagtgygtttyggtgttaggtygttttgttgggaggtagtttygtttgtttttygggtgygttttygaatttatttttaagttygaattttyggtagttaggttgtgagagttatgttaattgtttgttttttttttttttggtttttttgttttgtttttaagggaagtattttaygtattaattgaaatttatttattaatttgtattttttttttttaagaaagaatgaaagattaggttttagggtagtgtgggtttttgagtgggagttgaygatgtttttttttgtagygaaygttgttggtttttygygtgtttgttyggttttggaygttattygagtttyggggaaatygygttaggtgtgaaataagttagagtaagtttttgtttygygggtygttttyggttttttagggaaatataagatatatagatatatatatatatatatatatatatatatatatatatattaygtttttattygttyggtttttygyggagaatygttygggaatygttttygaggtgyggygygggaggtggtyggttttgtttataatgtattgttygtygtattygttttggataygtgtagaaaggygtgttygttttttygaggttgyggtgagtagttaagttagttgtatattgggatttttatataygagttggtatatattagttatatayggttaattttagagggttggttttttgttttgggaygtttttaggttttygggtygyggtgyggagaatttaggtgggtgttyggtaagttatttattaggggttgttttttygygattttygttataagygtagggattygggggtygygttggtttygggttgygtttttggtttggtaggggattaggtttaygttgtagtttgggagyggagtygttttttaggtttttttatttttgygggyggyggggtttattttttttttattagtttttttttttattgggygagttgttttgaattgttygtagtttgtyggaggyggtgtgttgggttggaygtttyg

SEQ ID NO: 5952 - DNA, 2762 bp, synthetic construct
  misc_feature 1..2762: note = Description of Artificial Sequence: Synthetic polynucleotide
  source 1..2762: mol_type = other DNA
aygattygggaggagagygtggagtygggtagggataggygtgtygtattatggygtattatggatagggtttygygyggyggyggtttaygatygtttaggggttgygggagaaagygygagagattgyggaggttagtttygtttagtttttgttttygttttagtagtatttatttttyggygggtyggagygygttaggttttgattygtgaagattayggagyggggtaatttatattatttgtttttattttyggagtaggtattttygagttgygttygtatttttyggggttgttagttggtagtagagtatttttttttttgtttygagggygataggtagggggatttttygtggatttttttgtttygyggygagggtgggtaygtttttttttygtaattttygagggattttayggtaggyggagatygatttgggattagggtattgtattygtttagttagagggtttyggtygaggttgtgtgaagtggtttttaggtttgggttggttggtygggaggagtttgggggtattttygggttggaggyggyggaaagttgggttgttttygggttgggaattygtagygtgtagtggygagggaatttgygttyggattggagtaggtgttttttgtygyggaggagttttttagtagagattaaatgaaaaggttygttggttttttttygagggtatgaaaagtayggaaggttttaggtaaaggygttttyggggygtatatagggtataggtagtyggatagagaaaggagtagtygygtaayggaatttttygttygggggagatattaggygtgagaggttagattygttttataggtaggygttgatyggtagagattttttygggtaagagggttagattttttttttaggtgggaygaatatagaatattgtgagggtaagagaagaagaaaaggaggtaattttagattgggataaagataataggatagtagagtttttgagtatygggaggygtaygggtgtagggtggggtaaggtggaggtaagtttygtaattaagatattagagtgagaatttttattgtaaattygygatttatttttgtagaaataaataaaaaaattggagtaaagtattatgygaggggygaaaggtatagaaaattgtaaaatttgggagttattttgttttatttttttgttgtttggggatatttttygygagtttgttyggtttygaagaaggagtagaggggattygtaatttagtttttagagtttygttaggaaaggygygagagatttattggtttyggtaattttgtttyggygttyggayggagttygatgtttgygtagttatyggttgygyggygyggygyggygyggygtggtattttttttttygggtgygtagttyggtttygtagyggygyggggaataaagggattyggygtygttygttttatttygttygtggttyggttygyggggatygtygygtatttgaagtagggtygttagtagyggtagtagggttygtagygttttygttattyggtatatggaggyggagaggggtygagygaagagtyggaggaggyggyggyggyggyggyggyggyggaggaggaggaggtagyggtagtattaatagyggygyggagaaayggttttaggtagtttttattttttttttttttttttttttttttattttttttttygttgtttttygtttttygttaatggagagygagttgatgataaatagygggtygyggagttygygggattygtattaggagtaataaaatagatttagagattaaggagttggggagggggygggggaatagggagggagagygtgtgagygtttgygagtgtgtggaggyggttgttgtggtagygtaggyggttyggtttyggttyggagygtagyggaagtygygagggatgtagyggyggggattttggtyggtggaggatgtggaggtggaagtggagyggatggygttttttaagagtttygttaygygaggtttygggttygtggttttgtttttttygggttttygttttagggtygttyggygygaygaagaygtyggggatagygtygyggggagggygtttygggtygtgygtgttgtatttataaagagtagtagtttygttatttygygttttygttgygtgggggtygaggggygtttttyggttttttttttyggtttttyggygagttggagattgtttttyggtttyggtygtaagggggtgaggygaggggtyggygyggtttttttygtygyggtttygtttygygtagttgttgtygtagtygtttttgttgttygygtatyggtattygttygtyggttttygttttgygtygtttattygygygygtygtttttygtygtygatygygtatttygttyggttttygttgygygatttgggygagtygtygtygtttttttygygttygttttaygygttgtttggttgygyggttygttttttttttttatttttttygtygtygtygtygttttygttttygtttttttttttygttgagttttttygttygygtygtggttaatyggaggttattaagttgyggttgtagtyggtyggattygyggtagtygttygttttygtttygtygaagygtttygtattttgttgtagttygyggggggtygtyggagggaagtttagagtgygtygagtatygtttyg

SEQ ID NO: 5953 - DNA, 338 bp, synthetic construct
  misc_feature 1..338: note = Description of Artificial Sequence: Synthetic polynucleotide
  source 1..338: mol_type = other DNA
tygygggagtygygtaggygggyggttagggggagtgggygtygttyggtagygtttygygtygaggtataagygttygygtygaggtataagygttttygatttatyggtttygygygttttttygygygtttttyggattygygtttgtttattttttyggttttgttgyggtygaggttttaagtyggttatttygtgtttaggtaatygygggggyggyggyggyggygtgaggagygggyggttgttgtttyggggttttttggttygagtttttagttttygattttyggygtttyggygttygattagygttttaggtygttttygtttyg

SEQ ID NO: 5954 - DNA, 1435 bp, synthetic construct
  misc_feature 1..1435: note = Description of Artificial Sequence: Synthetic polynucleotide
  source 1..1435: mol_type = other DNA
tygyggtaaygatttttgggagtgatygaggtattygggttgtttygtgtttttygggtagygatttaaygataaaatttgatagtgttttggggaaaattttatatttatygttagygttatattygggttttatgttaataaggagatattgtagattatygattagattygtttgtttttagagygtgyggtygggtttttagtttggtttttaggygyggtggyggyggtgggataygygttaggygtttagagaaggatatgggataatggtttagttygaggaygttagaygtygtygttygattyggggaaggaagtttttgtagtyggttygggaattygaggyggggagggaggttagttttggaggtgygttgtygttttaaaataaaggattataaagattgtatagtggggaaaaygygtttggttaatgygagtggggaygatttggggagggggttgaggaaggtagggggtataygagttaayggyggtttayggttttttttttttttygtttttttttttttttttttttygtygggttgtttyggtagataaataatagaggaaggygagttatttatygtggttttgataggtaygtagagtatttgtttggygtygtygtttttttygyggatttygttyggttggtttagttggaagtttttygatttgatttagaatttaaatttggygttgttygtggagttygattyggagttattgaggagttggaygattygttygtattttttaygggttatygttttggttttgtttgagttttygtaagttttgaggtattagttttggaattggyggtatatgtygygttygttttttatgtttttygygttyggtygttggtyggatgtttttagygtatttygtatttgtttattttaggtttatgaaaaatgtagtttyggttaygttgtagggatgygaggtttyggtygtagygggagtttgttttgggtgggggaagggatgggaagaggggaggagggttyggttgggtattagtaattaatgtttygtgttattaagtttggtttattygtaattgtaayggttgtttyggaygttttttttgtttttttagyggtyggtttttttaatattttgtgattaggattattttaatattattttggtttagaggagttgggtttttaataattaaaattttattttttggtttattaaaaattttaatattgaattggggtggtttttagaygtttygttttygggttgygttyggggttgggtaggtggagygtagygtygttttttygygygygttttagaagtttttttagttattggtttygtggtttaggagtgagggttgygtttttttygaaagtagtygttygtttagygtttttgagtttygaagggtataygggtttyg

SEQ ID NO: 5955 - DNA, 510 bp, synthetic construct
  misc_feature 1..510: note = Description of Artificial Sequence: Synthetic polynucleotide
  source 1..510: mol_type = other DNA
tygaggygygatagtttattaaagaygagggttggttttttaaataaatygyggtgattttatttgyggygtttttttttaygtyggttttttttttttttattagagyggttygygtygattygatgggyggattygatygygtaygyggttygygggttyggyggaggtagttttygtttyggggattygggaygygtygttttttygttttaggttgttygygtaggaattttayggttayggttaagtggggtttttgtttyggatttygttgggttyggayggtygagagtttagggatttgggggggygygygggttttygagtttaggyggggyggygggygttttgtygtttttttttygygygtygygtygtygttyggtttttygaagtygttttttgtyggygygtyggtygtttgygttayggygggygttatttatttygggtagagttttttgttygtgtagygygttttgggtttttagygttgatttaygttyg

SEQ ID NO: 5956 - DNA, 2722 bp, synthetic construct
  misc_feature 1..2722: note = Description of Artificial Sequence: Synthetic polynucleotide
  source 1..2722: mol_type = other DNA
ayggygatggatagtattttyggttttyggtyggttaggagttygygagttygttygtttagygttttgggttygatyggtgtagttttttttatttttattttttaggtygttgtatttaaaaatttaagtttygttttttygattttttttttttttttttttatyggygttygttgttttttttatggtatygtttttattagtatttygtttaaaatttagttttgttttagygaatagttttttaygtattttagttttggttttygttgttygagygtttttttttatygygttygttygaggttttttttygtttagttygtygttygttagtygtyggtyggtyggtyggttygttagttygtttttgtttttyggtaaagttgggagggaaaggtgtatttatttttgtgtatgtttgtgaatttgttttttagaatygtaagttygtagattttgttaaatttttygaagaggggtttgaggttttttttatttaggttgygggggatttgtttaatgaatagtttgatggtatygtggttttttatgggaatggtygaygggtttttygggttgtggtttaattygtttatgtgttyggtattgttygggttgttgtygagttygttggtattgaggtttgygttgttagtttgttygtttgttaaygtggttatttttatatatatagagaaaattttttttttttttattttttttygtttatattttttygtttttttttttygttygttygygtttatataygtataygtatatatatattygggttttttttttttyggtttttttatatttygtttttygttygttttttgttttttttttttttttttttttttygttygttygygttygygttttttttttgttttttttttttttttttttttttttttttttttttttttttttttttttttttttttttttttttttttttttttttttttttttttggtttgatttgatttttttttttttttttttttttttttttttttttttttttttttatattgaatagataggatttttgtttttttygtttaaataggttggatyggtttaagtttttagttagattaggggtgggggtggygagtgtgygygygyggaggagggygyggggggtygggaatgggygygttgtgggggttygygttayggygggyggyggtygggggtagggyggygtggggyggyggttatygygtttttttygtyggyggtttygygtygtggygatggtatagttygagayggttttyggttataaatagygttaggygtatggtttttygggaggygttgagatttygggttyggyggtygyggggagygggtgttygtgaggagtygggtagtyggttttttttttttgttttttgggggttttttttgtaatagtagtaggtgtaattttttgtattttaaaaatagtgatttttattttygtgtgggtatgtaggggggttttatttattaagttatgttttattagggygttaggygggygaagtaaaggtagggatggygggyggggyggyggyggaggtggaatgggygttttttttttttatttggttttatttatttatttagattagaaaagygagtyggtttggagggagttygttyggggattygagygygtatttattagtgtygagagaaaaaaagttatataaatatatattatgtggataaatttatagataagagttttttygygygygttttttttttgtttttttgtgtgtgtttttttttgttttttttttttttttgtatttttaatttgttagagtagttttatatttttttttygttyggtatttatygttatttaagttatttgttaggatggggttgggagttgtygggtygygtyggggggtagagggayggggagtagagattyggggttygattttygttttaattygttttygaaggyggaaggtgggggttttygtttygggyggtttttttygtttyggagagygyggttggtttttyggtggttggygggaggaaggtaggagtygggygtttttgttygttygttygtyggagggggaggaaggygttgggygyggtggtyggtgagttagygygggggatggtttgatttgttttygtttgttttaygggtttaaatagaatatatttttttaattattattaaaagaataaagtttttgaatygttatttgggttgtygtyggatygagattygygyggygtgygttgttttygygggtttygttttyggtatttatagttttygaggtgygaggttgagtygtttttgtygtggggatygggggtygagtygttyggttyggatttygtyggatttttygttaggtttattggggttggtatttyggttgygygggaaagggagtggtaggygyggagtygggagtagggttygagyggtttygtttgtaggggtgaatattggtggtgaatttggttggggtagtagatttttaygttaatgatatttatttgtatttygtttttttttatgtttgtttttttagggtagttttttygttttagaagtttggtaaattgaaataaygygttygttttttygygggttgyggggttggggagttggggyggyggggttgagyggttggtttaattttygtyggttttyggttagttattttyg

SEQ ID NO: 5957 - DNA, 1133 bp, synthetic construct
  misc_feature 1..1133: note = Description of Artificial Sequence: Synthetic polynucleotide
  source 1..1133: mol_type = other DNA
aygaygyggtgygttaggtagagagtttggggagtgtgygtgttttatttgtgtttgtatygtgtgttttttttgtgtgtttttgagaatgygtttttggtaygygttttgygttaataaggygtttggtgtgtgtatgtttgtgtgatagtgtttgggttttgtttgyggttgtttgttygtattttagttttttttgtgttygtagttaggttttataygtgygttagttttygagygtaygttttygagtgattygtgygyggtgtgtagggattttagggtygtgtgtattaagggygttygtgttygtttttttgtattaaggaaygtatttttatatgtttgagtgtaygtttttttttatgtgtgtaygtttygtgtttaygtygtttatgtttgtgtaggggygttttaygygygtttttttyggttygygggyggttagggattygygttgggttttaygtttttygtggggttgatttttttttygygtttygtagygggtygtagygattggtygtyggtttttttttagtygttattttttttttttttygttattygygygttygyggttttygttgtttttygyggtttyggygaggtygygtygygttgygtttygtttttattggttgygygygtttttgtgtggyggtagttgyggttttagygtttttgaatgtygagaggggtygggaagggagtttttttatgggttatttgttttttygttagtygtygttttatygtygttygygtttygygtttygtttttygtttyggyggttttygtagtttygtygtygttygygttygygttttggagtygygttataaagggttygygygtagtygtygtygtygtygtygtgygaggagttaggatggttttggtttaygtyggttatttygtgtttttagtgtttggttttgtgygaaatagaggtatygtttttttttttyggggtttgtttyggagygtggatygtygtaggtatyggggygggggygggygtygygggyggtygggggtttagggtatattygygaggaygtagggygagyggtggtttttttttattttattttagggggattttygagggtgggggyggtygttttyg

SEQ ID NO: 5958 - DNA, 2401 bp, synthetic construct
  misc_feature 1..2401: note = Description of Artificial Sequence: Synthetic polynucleotide
  source 1..2401: mol_type = other DNA
tygaaggtgtygttagttttagtgtyggtgggygtttgtattaggaatagttaaagtygaygatatttagttatttygagygttagggaagaygtttygygtaaaatygyggttttaggyggattttygttttagtttygygttgttggtggtattttyggggatttaaagtgggtggtttgggggtaaaggaatagaggtygaagaatttggggtatgttttattagagtatttaagggayggagtgggaggttatattagatatgygatttygatatattttaaaagtggtagtttygtgggttatttttaatagtgggatggatttttttaatttttttygtttttygaagtttttttgttatttygggttatgtttttttttygggatttttttgtgtaaaattatttttttttttgtttaaaggattttttttttttttttgattttaygaatttatttttttaataggtttttaaagtatgggyggatgtgttttttttygtttatygttaggagtygagtttyggtaggtgagyggtgtaaaataygtatttagttgtttttagtttttttygttttygttgagttggttgtttttatttygtattayggtattygagtttgtgagttttygatttyggttttagtygtagtygttaataattttataataaataagaggataggattgagygttygygtttyggagygtattggttgggggtaattttttattttyggygygtygttygttgtttygattygagagtatygggagagtygagggaagggaaggyggygaggggaaggtaggyggggatggagggaggtayggygyggygyggagygaggaggtgggttgtaggggaygtygagaagyggtggggttggygtagagggygggygttyggggygygygttattttygttttgttttygtagtggtagtatayggtttataggtatttgagygttygttagagtaagatgatgaagaggttttygaagaaagttattatggaggaggttaggaaagtttattatatgygttggtttyggttgtygtayggtatttttatggttatygggatgatgagygtatttattttgggttygtggattgaggaygaggaggaagaggaggaggaagaagaagaagaggaagaggaggaggaggaggaggaggaygygtttaggttgagatggttygygtggatattgttatttattttaagattgttgttttygtygtygtygtygtygtygttgttgtygtygtygtygtygttattatttgttatagttagtaaygggtagtyggygtaggggttygggggagtttttttygtygttagygttattttaaatatttattaatagttatattgttgttattgttgtygtygtygtygtygtygtggagygygggaggggggyggggaggygtttgggttyggggygttgtgygygatttggyggggtgygtygagatatatatagygagtygtygtygttygttygggggggagggggatggagtgygygggtagtttttttttttyggttygygtttygttygtttygggttgygttggtttygagygtygagagttagggggygtygygggtygttygygttyggggtttgygtygttttygggttygtttyggtttygygygyggtttygggtgttttyggygtygygtygttygtygtgygttaygggtgtgygttgygttyggtyggtgattttttttttygagygtttttygygyggttaaygagtygtttttygtttattaggtggtaattygttaataatggataatyggtttttttygttygggygtttttgygttagtttttttttttyggttgygttyggtttyggttygtygygttagtgygygttyggtygyggtaggtttatygygttyggtygtyggttygtggtygtttgttagtttatgttttygggattttttagttttgtygttaygtygttgagtttttyggttttygttygttttttttttttgtygttttygattttttttygttttygttttygtygtttaagttttttyggygygygtttygygtttttygtagtygttagtagtagtagttgtagtaattggagygggygyggatttaggaygatttaggygggaggggaggaggttygtygygttggttygtttgggtttygggttgggtaggggtgggtagggtttttyggtagyggttyggtaagygtttttgatttttagggygtaaggtagagygtttttagtttaggygyggggttaggygtttttttttaaggtgttgygtttttagtygagagyggtggggtatattgggaggayggyggggygtttyggttaggtyg

SEQ ID NO: 5959 - DNA, 769 bp, synthetic construct
  misc_feature 1..769: note = Description of Artificial Sequence: Synthetic polynucleotide
  source 1..769: mol_type = other DNA
tygggaaygaaygtgygtggggtagtttaaatttttgagtttagatttygtttttygyggttagatggtgyggtyggtggggttygagggatgygtatagttgtgtttgagaggtgttgttttttygttatygaagtygttgggaaattttgttgtattgagatattttaatgtyggatgttttaattttgygggtaaaaaaaaaaaaaaagtttgaattaggtattgggtttttgttayggtgaattttattygygtttygygtygtttttttatttatttaggygaggtggtttggatttgtatttygttgaagaagttttttatgygatattttygttagtatttygygyggatttggttgggyggyggyggggagttagtttgttatygtayggyggtygggatygtagtttttgggtgygtagtgygtttttygttgygtttttttagagygygggtttygtgtttgtgttyggygygaygygatttttttgttagtygggtttygygtgtttttygygtttttygtagttttygygtagttygtagygttttttagtttygtttygyggtygygggaattyggygtttgtagtttygttyggaatygatygttaggygttgttgtygtyggttaygtaaygyggggtttttgtttggtattagttttaggtgttttgtttygggtygtgttgtygygygatattggggatttaataggtygtyggttatttagttggtttygtagtttttttgyggtttagyg

SEQ ID NO: 5960 - DNA, 1169 bp, synthetic construct
  misc_feature 1..1169: note = Description of Artificial Sequence: Synthetic polynucleotide
  source 1..1169: mol_type = other DNA
tygtgtttttttygagtggatttggtttyggttttaaatttagtygagggtyggttygtttttggggattygyggatgtygygagggggygtygygttattgaaggttgggaygggggyggtgygyggggyggygtyggagttygggatgtyggttttagagaygtygygtttygtttygaggaggtygtyggtygggtaagyggagttyggagttygyggagtttggatygtaggtaaagttgagygygtygtggggtygggggtggggggttygyggygaaggagtyggggtygtagtgggyggtggggyggggggygygggtttttgtttgatggtttygygygtagtttttttttygggtgygyggtgygygygggygygggagggtygaaggggattttggaatttttttgttygggttaagggggygggggyggttyggggtygggyggggttggtgtttttttttttygtttagygtttagagttygggagtygaggggggygtygggtyggaggygttygtyggtttggtygygtygygygygtggatggaggtttyggtygyggatygtttygtttattygygttggttttgygggagttygggtgagtygaaggygaggaaggggygygggtttygggaaaattygattttttyggygttygtttyggttyggttgggggygtattyggttygygyggagagygggyggggtgtgggygaatgttyggygygttgygtttttttyggtttttttttttttyggagatgaaygttttattttygttyggatatayggtygtatttttattttgtttttttygattagtyggggygyggttygaattgggggagagaagatttagttttygtagtygygaattttgtaaattyggagtttatgygtttygtttttyggttyggggagtttttagttttgttygtygagygtagttygggttyggattgtggttattggggaygagaagggttttttttgyggggttttygggttyggatggayggagggggygttyggtaggtgaattgggttygtttygygtttygaaygtttttttaaatttataagtttyggagattttggggtattttgygatttyggagtgatyggtggagttttygttygygygtttggttttyg

SEQ ID NO: 5961 - DNA, 6036 bp, synthetic construct
  misc_feature 1..6036: note = Description of Artificial Sequence: Synthetic polynucleotide
  source 1..6036: mol_type = other DNA
tygtatagtttgattatygtgagtaaygygtgyggtaygttttggaatttgtyggttygtagygttygtgattaggagttgttgtgggatttgggygtygtgggtatgttgygtaatttggtgtattttaagtataagatgatygttatgggtagygtygtygttttgygtaatttgttggtttatyggttygttaagtattaggyggtygttatygtygtgtttttaggtagttgygtgtttagtttgtaygtgygtaagtagygggygttggaggtygagttggaygtayggtatttygygtaggygttggagtatttggagaagtagggttygtyggtagtygaggtygttattaagaagtygttgtygtttttgygatatttggayggtttggtttaagattatgttttygattygggttgttttgaygaygaygatgtatygttatttttggttgyggtygyggttatyggggagttagttagttttgtygygttgtttttttttttgggtagtttttttttgtaggggtaggygttggttygtatttygtttattygtygaggyggtaaggaggtagagaaggatattagtggggaggtagtygtggyggttaaggttaaggttaagttggygtttgtagtggygygtatygattagttggtggaggatattttygttttgtatatttygttygaygatagttttagttttagttttggagattygggataggaggygttaygggagggtygygtttagttttgttygttatgtygyggttyggagggygggyggygagaggtaggaagtygggygtattygttgttgyggtttaaggyggtttaygttagtttttttaaygatagttttaatagyggtagtgttagygaygggtattgtttaygygaatatatgttgttttgttygttggtygtattggtttygygtygygaggattttaggtgtgggtagtttyggtttagtyggtttgattttgatttgttyggttgttaggtygagttttyggttygygaggttattttygtygaygttygygtgygtattattaagttgtygtttatttattagtaygtgttattgtttgagggtgttttaagggygggtgtagagtttttygyggggtttggaatttttttaggggttyggaagtaggtttggttgtyggtagattatttgagtaaggttttygagaagttggyggttgtttygttgtttgtggttagtaaggtattgtagaaattggyggygtaagaggggttattttygttgtttygatgtagtttttttttttygttgttttyggtyggtygtttaggttttagygagggtggtgatttggatgatagtgatttttttttggaggggttggaggaggtyggttttagygaggttgagttggatagtaygtggygggygttyggggttatttygttgttygtagttatttyggtttttyggygtaatygaggtyggggtttgggggtggaagaygttaygtygtttagttygtyggagaattaygtgtaggagatatygtttgtgttgagtygttgtagttttgtgagttygttgggtagtttygagagttygtttatygttagttttatttttagtgaattttgtagygggtagggtagyggtattattagttttagygagttgttygatagtttyggatagattatgttttttagtyggagtaagaygttatygttggygttygygttatagggttttttygaggttatttagtttagtttgtagtgggagagttaygtgaagygttttttggatatygtygattgtygggagygttgtyggttgttatttgagttggaygtaggtagygtgygttttatygtggagaagttagaygagaatttttygtgygtttttagttttagygygttggttttgtaygagtattaygtgtagtaggaygtggagttgyggttgttgttttyggtttgtttygagygyggygggggygtygggggygtyggtttttattttgtagggtatyggyggygggaggaggggtyggygtttaygggttttygttttygyggygtygyggattaggagttggaattgttgygggagtgtttgggagtygtygtgtttgttyggttgygtaaggtggttttygygttggtgttaggtygtygygtatttttygtgttygtttatatgttggtgttygtttyggtttyggtttaggaggaygatttttgtattgatttygyggagggtaygtyggttaatttttttagygtygtttygtttagygaygagaygttgtagggattttttagggattagttygggggattagygggtaggtaaagatttatyggtygttttatttttgttagataggttatggggtatyggtataaggygggaggygtyggtygtagygyggagtagtttyggggygygggtaagaatagagtagggttggagttgtttttgggtyggttttygagygttttygtagataaggayggtttaaagttyggtyggattygyggggayggggygttttagtygttgtgttttaygaygtttattgaggaggtygtgtattgtttttayggtaaygattyggaygaggagttttyggyggtygygtttaygttaatttatyggygtatatyggttatttttygygtttttaygygggagygttygtagggtyggaaggaggtttttgtttygtttaaggttgtattagttgtttygtygttygttyggatttagtttagttttattgttgaygagatttygttttgttattttttgagttttttygttagtttttttagygagttygagttttyggagtygtyggtygtttatttaygaggtygggagttygyggttattaaggattygggtttaggaggyggaygygatagttygtttagttygygggtygyggaggagtttttgtagyggtgtattagttyggttttgtttaggygtyggtttttygtgtttggtttgyggygtygtaagtttygagttattyggttggatgagyggttygtagaggggtttygggaaygyggygaggaggtagygggttyggatygggttttygatttggatagygtggagtggygygttatttaggagggygttaatttaattgttaygtggttgtattaggtagtagttgttaygygggaggtttygttygagttygattttattttgtttttygtattygggttgttagtgggatttattttatagttttttaagtataggaagggaygataggyggagggagaaatgggtagtgttyggyggttagagaaaaggggygtagttttagttaagattagygggagttttygtttttttgtaggtttygagaagttaygtggtatatagaagattaygttyggggtgttagttgtgtttyggggaygaatagtgatttaygtttttagttyggtatttygtgtttagtttaaagggattttyggttttygygttatatygyggaaggtggygtttttttgtttggtatagttygyggttttagttaaagtttygagtttygggtagtagyggtygyggagtttatatyggtttgttaagatttyggagttggygaygttgagttagttttttagaagygttatatygttygttygtttygttaagatttttttttttagttttttttagatttygttygttttttagtttttgtttagaaagygtttttyggttatttaggttgttggggttttgttyggtttyggagttttttyggtgtttaaaaygtyggygygtatttttttggygaagtagtataagaygtagagatygttygtgyggatttygtttatgtagaggtyggttyggygtgggtygttatygttggttygggtagtttyggagtygggttttaggggtygggyggggatygaggygggttygggggygygygggggtygtttgggtttggtgygtgtggttttagttttttttagyggtagygagtttttygatygttygggttttyggygatagttaatttttattaaggagtygtygggtttgyggygtygtygtttygagttgttttyggtygagttygyggtttttgttttttagggygtttygtttygtygyggtyggttygygttgttygtygtttttttttgtttttygygttgygaagagtttygagyggtatttyggtagggttyggtttyggttyggtagyggtttttygyggttygatttagttttggygagygttttgttyggtgtattattttygagagttygtttygtttgtttgtgygygygttygtygttyggtyggagattgttaagygttaygygtygttgtygtatattagygtggttygtaggttygayggygtygttttygyggtttttgttttagtygaygtygygygtygtagtagygayggggagtttyggtygttttttagggtggtygygtygggtaygatttggyggygtattygagatgaggaygtgttttatattttgygtagtaygtttttygttayggttttgttattgyggggttttaygttygaggaygtttyggtygggttttygtygygtaagattagygaygtygtggtttagatygaggaggtygtygtttttaagattaattttagtaygttttygagtttggagattagggagtttttyggggttttygtyggyggttagtttttttttttyggtagygaygtggayggttttagtttygttaaggtttttattttygtatttttygtgtaygagggtttgggggtygtygtggggggttttttygttagtyggtayggtttttttagtygttyggttygagtatttttttttaattatgtgtttagttttatggtggtygtagttattatygattyggtygyggagaaagtttyggttattgttttygttatttttttggaatagtggtttaggtyggttttttggaaygttttttttyggttttgyggygyggtttggttgttttatgggtttgygttgtagaygttttttataggtygttttagggtttttgtttattygagttttattatttttagaattttygtttagygtayggygatttygygttttatyggaagattttgtttttgtgtygyggaggtttaggaggaaayggggyggtygttaggttttaagtttygatygtggagygttggtaagggygttttggtttagttttgagygygyggttttttttttgtyggaagtygttgtttgatttygggygagggaggyggtagttttygggttygggtttgggtttgggttygttgtttygtagggatagygttggggaggtgayggygttygtygtaggtggggygaggttgggggagggyggygtygyggygggtttgttagttgggggtttttgyggygygtaggggygaagtttgtaattattgtagtygtyggtaattygttaatgagggttttgtagggattgtttttatttttagttttagttgtgggagtgygggtgggggtgtggtygagtttyggtaggaagtttygtttagayggtgtttagggaattyggagtttaagygtttyggyggagtttaaaagggtgggggtgggaggggtagaggttaayggatttttttgtttgtygtattttttggygggagaygggaaggtagygggttgygtaygatgggattttggtgtagaygtygggtyggttgatatttggattttattttagaggagatgttggttattagttggggygattttaagggtygttggagttagtatyggttyggygtagtygyggygggygaggttaatggaaaggagattgaggggagtttyggtagtgagttygaggttttgggatttggagttygygttggtttttttttagyggagtttgtaygttayggagattattatatgtgggygtggttagtgtttaggatygtatyg

SEQ ID NO: 5962 - DNA, 3400 bp, synthetic construct
  misc_feature 1..3400: note = Description of Artificial Sequence: Synthetic polynucleotide
  source 1..3400: mol_type = other DNA
gygtagaattagtggygatgggaggaaggggatyggtagagyggggttgggtaagtttttatttagtygggttgagttttggttttygtagagtttttgtttttttygagatattygttatttggtgttagyggtggatygttttgygggggtttggygyggtttygggttggttttgattttgtagtttygyggagagggtaggttygygtggagagggayggggagtygggtygattgttttygggtttttagtttttgagttagtygygtgtttatttatygtagattttyggttgagtatygttyggttgtaggtattgttgttyggygaygattatygttgttttatayggatgatttyggttttgtttttgttgtygyggttygagttygygtygttgtttgygtayggttagttggatatygtgtttttttygtygtttaggtgygygtaggtatygggatayggggtaggagygggygggggyggygtggtttygtggtygtttttaatttttttaattgygggttttaggttattygyggaattygaggagtygttatttagygtagatttttttttggagaygtttaygygtttggtgygggygttgygggttttttyggttygggttttygygtygygtttggttttggattyggaygygttggtyggtttttygtagggtttagttaatttgtyggatttygyggygttggagygtttattygayggygaggagtygttgttgttgttgttgaggtttattgyggttattatyggggattttgygtttttgtaygattttaygtyggygtygtgggttayggttttggygygtygygtggttgttgaattgtaagyggyggttgtygagttgygaagtttttygggtttgttttyggttatagtttygttgttggygygtttgttygygttttgtttaggtggtttyggyggtttyggygattttttgygagygttgttgtttttgaaggygttgtagggtttgygygtggagtggygygggygggattygygygggtygggtygggtatagygtagygygggggttatygtygtygaygggtygtgygygttgygygagtttagygtagattttygygtygagygtttygtatttattttygagatttattaggttaataattgttagggygtgtgyggttggttttagttygatygtaattygygttayggtaattaygtggtgttgttgttgaagatgtaggttygtggggtygttttggygygtttattttgttgygtgtttatygtttaygygggtaagttgtttattagtttgtyggaggagygtattagygygtattaygtgtttaatatggtggttatygagtgtggttgtyggtgatttttgygtygygyggatttttgtttygagggttyggaygygttttagttygygtttttttttatatttattyggattttaagtatygttttaataaagattagtaagtaatyggttggggtgttygtgygtgttagggggttygtgggattttttttgtygttttttttygygtayggttygggttygttttgtagygttygttgttttttttttgtttgaagygttttattatygttttttaggtttyggatttggtgtygggtttaggygtaaaggagtaggtgattttgyggtygtagtattygttttatttygttagagtygyggggygtttagaaggggtttttggatttyggygyggggtyggtttagtttygttttttgtttgygyggagtttttggygatttttaggtygttgtttttygtygggaygtttyggggatatttaggtttgtttttttttgggttyggygtttttggagtttygtgtttayggtyggtggtttttttygygtgatttttagygttggggtagggtttttyggggttttttggyggttygtggtttttttttttttygyggttttttttttttaggtttttttttttttygyggttttttttttygyggtttttttttttttygaggtttttttttgggttttyggtttgygagggttatayggttttttyggayggttttttyggtggtttygtygggttttttttygtygttttttgtagtttttygattttygggaattttgggtttgatttttgtttyggttyggggygtaggyggygttgatggaggygtttgggtttygaatttaggttgtaagatagagtggggttttggggtaagygtttatttttttttyggttygggttttttttttttttggggatgaaggttttaatgttygyggttagtggaaggaagtttttattaggggygaygatggttttttyggggttgagtttggygggatttagggttygggtataygtgtttggagtgttgtttttttagggayggygtttgtagygatagggtygggattygagttagttgggtygaggtayggtttatattgtttattttttttttatttttagagtttttttttttggatagttggagtggggttttttyggtayggttgagattaaggatgttttygagtygtgggaagggatttygggatttygttgtygyggygtttttttttygaatttygtttttttaattggttattttttttttygattaygggttgtaggaggtttttagtaagggaggggtygtaggagtgttttyggggggygtttaygagttgagyggtttttagagagggygtaggggaaaggyggtagaaygttaygaggtaggaggggttgtataaggtttattyggaagttagaatttattygyggygaggggaatgggtttygtaaaaggtttatatygggtgagaggggygygtaaggttygttatttaaggggagatgtataaattaattttgggggygtgtaagatttagttttggagaggaggtttttagattttattttggyggtatagygtttttttttggaggaataggygtataggtggattttagtttygttttatttttggggagtttgygtttatygyggtatagttggaaagtygagtttagtagygttattagygaggygagtattaggtatttgttgagygataggtttttttagggtagtttttygtttagggtygggggyggyggyggyggttgtaggggyggygyggtttgygtttttttgygygyggggaygtttygagggtttgygggggtaagtgygygttgygttgtggttattggttttgtgtygttttttttttygggygtaggggataagagataggtttgtgttttgaattyggttttttttgtttgtttgtgyggtttygggygtaggtgaatttagtttygggtgtttygtagttgtayg

SEQ ID NO: 5963 - DNA, 1143 bp, synthetic construct
  misc_feature 1..1143: note = Description of Artificial Sequence: Synthetic polynucleotide
  source 1..1143: mol_type = other DNA
tygatygttagtggttgggaagtgggyggtgttggggggtgagtttyggtttttttaagatgygttttttatgaaattttttagttttaygtgtatttataygtatayggatgtatgtataygtatagaaatatatagggttyggatatagttgygygtagataagtaaaggattaygtttaygtggaaataggtgtgygtataygttttygygtattygygygtataagygttttatatttgggaaygtgygtatttgtttttygttttyggtatatatatagtygttttatattggaatatttgggygttagygtygggttattygggtaygtagggygttaygtagggtygygtataygtttttyggttataygygtatagttttttaygtggaygygygggtatataygttyggggttygtagtygygtatattygtatttaggaaattttagttattattaygyggggttygatygtttttgagtatttttygttttagtygygtattygttgygygttygggaygygtatattygygtatatatyggttttttttgygtaygtttygggtttattttygtttagagttttyggggtttttttttatttyggtttyggggtttttttaygttttttygtygaygtgtttatttgtttagggggygttttygagtygygtttygygttygtttttaggagggttttygygagtyggttgtatatttygaggyggtttyggttgtataatttggagygagttgtttygtttttttattttgggggygaagaagggtyggggagtgggggaaagygggaggygtygyggtttgggaggttttygygggttttagygtyggtygtattgyggtttttttygygygtygtygtygtygtyggttttttttygtttygttttygyggttttyggygtttttygygygtttygggyggggtttyggggygtaygygggttttaygtttggttttgatttggttttgtygggygtgtattttttatttattttgggaagyggggtttttggagygtggaaygggygtygttagtgygygyggyggggatygggggtgagggagagtgagttgttygttyggggagataagtaaggygttaagttyg

SEQ ID NO: 5964 - DNA, 220 bp, synthetic construct
  misc_feature 1..220: note = Description of Artificial Sequence: Synthetic polynucleotide
  source 1..220: mol_type = other DNA
aygtgtyggtgaygtttygtggagttggygagtttygtttgtttygygattgagtttgyggtygtttygattttttagtagattttggygtggggtatttgagattttygttattgaaaaggygttatagaaatgtaaggaattatgattttaataaaattgttttatttaggagygagtttttgygttgtttttgtygtyggagttygggtttgttayg

SEQ ID NO: 5965 - DNA, 1860 bp, synthetic construct
  misc_feature 1..1860: note = Description of Artificial Sequence: Synthetic polynucleotide
  source 1..1860: mol_type = other DNA
tygygatgttagttayggttygyggyggttayggagttattttagtatttygygatggatagtgattttyggygtggygygagttttttgyggtttttaygygggtttgggyggygggtttttttayggtttygtttagatattyggaggtatttgttaaagttgyggaggtggaygatygggygtttaagtaygaattttttygtygaggtayggttgtygggtttygttttgagggtttggggyggygaggatygtyggggaggagggygygygagtyggaggttagagtygggtygggtagggygygtttaggagtaggggagayggygattygggtygaggygggayggggataygttatttgttygtggagygyggggaaggggtgygyggyggyggyggyggyggagtttggygtagagggtagyggtagtagygggagtatyggttygttyggggtyggttagtyggggagatyggggagtagyggggtygygggyggyggggtygaggygagtagtatygggggaattaygattttygygttgagtyggagtagttyggtygagttyggtattatttagatttagggyggyggyggyggyggttttgygtttatyggttagaggagaggttgtygtygtyggggttgttgttgttgtagttgtygtygtygtygttggaatttggygttygtttgtattttatattttygygttgayggyggyggygggggyggygggygttygagatgttgggtyggyggyggygyggtttyggagygaatttatttggtttygyggygyggtygttygtttygtttttgtttygygygggaagtttttttttttttygttygygtygtygtygttttyggattyggttttygtttyggttttygttygttygygttttttttygtyggatttygtttygttttygygtttttyggttttggtyggggtttttttttygttgygtttttggattygggyggtygyggaggaygtgggtgggagagggtygagggygygttyggttgggttttygtygatgtyggttttttggtggtttttggttttttgggatttagygtatygygagggaggtttygggtttygtatttaagggtaagyggaagtygaggtggyggygtyggagttaggtatgtttygttgtttagygyggggttgagggygtagayggggatygygygagtygttttttatttggttttttyggagtttagggygyggagggtattgggttgyggattyggygtaggyggtttyggaygttgttaggygygggyggatttttgttgtataaatgggttaaataggttygtaaggttttygygggttttttggttyggaagttgagtygygggtgtttggtttgaagtttygygttttatagtggttygygggtttyggyggtttttgttttaygttttttaaggtattaggtaggtggttttagggtttttgtttaygatattttttgggtggggtaggattatttttttgtgaattygttttggatgtttttaggtatagtttgtattttttttttttttagtataygyggtttttgaygttgtaygtygagttttttgggatttaggaygaatygggttttaaggattttygtttygttyggattataygtaggtagygtyggtygagtygagtttgggttygtattggttaygygtagttatygttagayggygttagttttttttygttgtagattttgtttyggaggtygttagttttttttttatttygggtttatagttttagtgtagtttttggygaygygygttgatagttgggtagagattttygtgyg

SEQ ID NO: 5966 - DNA, 441 bp, synthetic construct
  misc_feature 1..441: note = Description of Artificial Sequence: Synthetic polynucleotide
  source 1..441: mol_type = other DNA
gyggggttttaaaygttatttaatyggggatattgggyggggggtygtttaattaggttygtagttggagtagatagggyggttttygggatttggygyggtttttgtttttygttgtygtygaagttttaattttygtttgtttgttttgtgttttttgtaygtagaagtttagtttgtgtggttttgygatttgygggtattgggagatttatagttaagaygttagggttttttggaagtttagaaatggtgagagtgtyggttygatatttygagagagggaayggggttggttggaatyggtgggaagyggttgtggygggatttaggttttttygtagttagttttataatttgygtttagagtttttgtttagttyggttttagttttttttagttataygatggyggtygygttgatagtyggggtttyggyg

SEQ ID NO: 5967 - DNA, 5587 bp, synthetic construct
  misc_feature 1..5587: note = Description of Artificial Sequence: Synthetic polynucleotide
  source 1..5587: mol_type = other DNA
gyggtgttttygggaggttggtagtyggggaagtaggtaygtgaatttatygggttgttttattttaatttgaggttagagttgaggygtaggggtyggggtaggggtagaggtgtygaaaygtattagttggggattttygggggaaggagataggagagatttaaggygagttttaggattygtttttatgattatgattaygygttgygttygaattatatgtttatttygtatttgttttyggggattagatygygtttttttagatggttggggagggagtagatttygggtgaaggttgggggaggtatygggatgtygagtaygttagagtaggygggggatgggtttyggttttttgtygtttyggtatttygttttgtatygggtaaagaaggggttaygatyggygaagagygygtggagatatagggattygygatttaggggtaggaatttygttttttttyggaaatttttygggttttgagtygtgttyggygttttttattttattttattttygtygtttttgtygttatttayggtygttgygggttggttagygtgtgygtttttygygtygtaggtatttgttygttgggygttgtgygtttatttttttttygygtattgtagattttyggygttgtygtygttatttagygtagttttyggttgggtatagygtttygtttttttygyggtttygggygtttatttattygttatggtttaggtttgggttaaatagyggggtagttggttgtttaaattggggtaaggagttgagggttgggagttgtagagaggatygagggatatayggggagtagggatgagyggtygtttygagtygtgtagattgggaagaagttagggagagtttgggtgggaggatttttaatttaagygggtgyggggyggggttgtattttaattagaaagayggtggttttttygagygattttygaggagagagggggagygttttggggygggggyggggygggttgtggtaggagaggggagggygggggygatgtagyggtggaggyggtttggygtttagttattgatygttttttttttttttttttttttttttttttttygttttttttyggtttygggttygttaygtyggattygtttttttygygttgygttgggtyggaygttaggtttgygygtygyggttgagygtttattygttttgyggaaagagtygyggaggaatyggygggggyggttgygggagtygaaggaggtggtaatygggagtagaattagaaggagatagggaggtagaagttygyggtttygtggtaygtattttttyggttagggatgggtttyggygyggtttagtttttgttyggttygtygggtagagattgaatygyggatttttatygttttgtggaygatyggatagagagaggtattgatygatygttagtagtttttyggtgggatygygttttttgtatatttygygtagygtttttygtyggagtygtatygggtaagtyggygagggagyggggttgattggyggtygtyggyggttaggggagggggygtygygyggggttatggtaggttyggaggygttttagttygagtyggagtygattygagtttaygyggtygtygttttttygttttygggttttygtygttatygygtttttygygggagatggaatagyggaatyggttyggtgttttyggatatttgtygtttttgttgttgtatgttttgttgtttttygtggtygayggtgagygygggaattttgttgtygttgtggattygggggggtttttgttggggtygttatygagaagaagaagaaagagaaygaatygggaagtttygyggtttttagtaatttygttgtgtagtttgggttyggaggggtagggagaggygagyggygaagggtygtygtagtagtagygtygygttygagtygtttttagtttygtyggggtttyggttgyggaaaggatgtttgyggggagygggagtaggygygttttagttaggttttggyggtgyggttaggggygggggagaagtaygagtygtttttgtygtttygttttattyggagggaagtagtaggtagtygatggtyggtttttgtttyggttttgtagtygttttttygaattttgttagttttttyggtygtgygttagggagtagttgyggggtggggggtataaggttagttagttagagatygattgtttygttttaggttgttttaggttttygatttatagttggttaygtttttttttttttttttatttttagttgtatttatagaagtttttaaagatgtgatagtaygggagggagaygatatygaaatgttttgygygtttygggttagyggagttatttygtattygttggagatttagtggtggtattttaaggagttatttygggagttgttgtaygagttggygtttagygtgtygggygttyggagtaaggtaattygtygtttaygyggtatyggygygygttyggttygygttyggggyggygaaggttaatttagggagggaagtagygggttttattygygtagggygtygttttgtggygtagtttattttttattttygtattttaaagtatttttaaagttagtagtggttatttttaaatttgttaattattttgatagtatygttgtttttattattttttagaattttatttaygtttagtttttaaagagttatattttagtttggtygtttgttygtgttygttggttgyggttttttgatgggtgttgggtagtgaaggaagtttttttggttttattaggtttttttygttttttgttattttgaggattttagggtttttayggttgygttttagaggttattagaaaatygagtatyggaaagtyggtaggatttttagtttttaggggtatagaggggttatttttttgtggtygaaaataggtttaygttgtttgtttgttttaaaatttatatttttttatatattttagtgtgttygygtgtatatatatttatatatatatttatatttatatatatttatatttttttagggttttatttagagttatttttattgagtttttygttgggtgttgtttagatatagyggttttttttttagttttttayggtttttagtgagttgggggaggattttgagttaygyggtagggtttaaggatgtttagagggaaggagaggggtttttttttttattttggtgtttatttagtttttttagtttagtyggtaggtgtgtattagggtagttattygttggttaggtattatgttagttttaaagttygtttttttttgggaaatttttggaaagtyggaygttttttgtgtttttaatttttatttttygggyggtttyggttttagtttgtyggaggagggtgtttttgtttaaaggyggattygagtttttttagttagaaggtygygagttttaygtttttttttttttttttgtattttaggtaataaataaggatgtaattaaaattagygtaagtgtggagtttagygygggtygygggagattttttttggtygtttygggtttygtagtttttttttttagtaagtygyggyggtygygtatgtggggtygygtaagtagggtagygatygtagttttgtatyggtggttgttyggygtgttygggygttatttgtygtyggttgtagggtygggtttttttttgtgtaaattaagggtttaaggtttgagttttttaattyggttyggygttgatttgtaaaattttttttggtyggattgygygtttagggtttttygygtttgttagttttygttttgygggtattttttttagtatygggagygygyggttgttygttttygtygygatygtggygttagtttttygttttttttgtttygttttgagtatttgttttgygtttttygttgtaattttttatttttygtttggattgygggtttgggtgyggggtgttgtaggtttgtaggggayggggtagggggtggttgtgttaggttgygaggggttygggttatggggttgttaattttgggaggagatgygtttaagttttttatttggagygtagaaaggtttggagatgaygaagttttttygtgggttyggtttagaggtgagggttttttgggtgtttgttgagagtygtagagtagtatttttygaagtttttatyggggygtaggggaggagtatttygttggggggtttttggagatttygyggaaaggygggttggtagtaggtggttagggagttaggtagtagttttagygttgtttgtttttttaagaaagtatagtgttagttgtaaagggyggggttyggtgatagggtggttttttttaggaagygattygggtaggtttttygtgtttygggaggtgaggagggtyggttggggygggattgtyggttggagygygtyggggygggaaagaygtggggaagttaaggaataaggaatttagtttggggttttttgaaggtgtaggagggaggaaggagaggtggattttgtttttttgaagygttagttaygggaagataagtagtgttggtttgtatgggyggggtagatgtaaggtgggygtttggttaaygtgatggggaygtggggatatagtttaaagagttggttgtttggygtttaygtagagttggaagttttatgttattgggtagaygygggtgaaagggaagtyggatygtgatggtgggtaaattaggattygggaagtgttggggtgygyggatgagggggygygayggttagggtggttagaagagtaggtttgggagttgtttagttyggtttttaattttgtttttttgtagatygtaygygtttagggtaatgatattttatatyggtttyggttgtttgtygtgyggttgtaggaygagggygtgtaygagtgtygygtgtyggattatagygaygaygataygtaggagtataaggtttaggygatgttgygygtgttttygygtttygygtygtttaatatgtaggtygtygaggtygtgttttatatttagagtagyggttygygtygttayggtttagttagygtygttaaygttaataaygygggygtygygagtygtattattttygagttyggtygyggygataagagttygtygttygggagttttttygtygttatygatttygtagttttygaggtygyggtagtttyggyggtttataygtttattattatagtygyggtagttgttgttgtttygttagygtygtygttatygggataggyggttttgttgygttagaggtayggttygggtaagggatygyggagagggggygtaygygyggggatggygtagggttagggttgygtygggaygtttyggggggtttyggatttaggattygttttttgggygtatttgtatatgtatatttttttttagttaggtygggagygttttttttagggtttttttttygyg

SEQ ID NO: 5968 - DNA, 3643 bp, synthetic construct
  misc_feature 1..3643: note = Description of Artificial Sequence: Synthetic polynucleotide
  source 1..3643: mol_type = other DNA
ayggggygattttgaaaagaggttgatgaaaatygagttygttttgtttyggttgggttgggaatagttygtagggttttgtygagtgggygagtgaggygygygagtagggygttygtttttttttagtttyggaaaatgattaagttaatygtgtgggtatgttttattatttattgaatataattttttataaygtttygtttaygtgttygagtttgtttttgaygttygygttttaatgtttaaggtaaggaaaataaaggtgggggggggattgyggggygyggygyggtgyggggggygyggygygggggggyggyggygggtgggggggtagtttyggygttygggaggtggtaaagtgagtttggatttttggygyggttttttygttttttttttttttttatttyggygaggtttgtygttyggttttttttygttttatygygattaaaaaatayggtttaattaaatattygtggttgtgaygttggygagagaagttgttagygggtggggggtggggggaaagaagaggaaaatygagtyggyggttgyggtygggtatygtatggygttagagaatttyggyggygagygggatttgygtttgggtygtygttttttygttygyggtttygggatygttattttgaaaaggagtttygaggtttggygttyggygygygatygggatttygygtttagtttyggggattyggtyggygttttttattygygagyggttygygagttatttttaggtttygggaaatttttaagagggtttggggggtggggggagtaaaaaggggagggggtaggttggggtygyggaaatttttgtttaagtgattttttttatttttttttttgtttgggaygggggttygttttgygttttttttttggttygygtttattgyggggtttyggttttttygttygtggagagagggtaatttgtaatttttttttttttttaattaaagttagttgatgtttataatgtgttaaatttgygggygtygagagtygttgagatttgttattttgtgattgtatyggttttttgtgtttygggagtttggttaggttgaggtyggagagttggttttagggttgaggtgttagggttygaattygygattttaggaaaggtygtggygtttgtaagygtaggyggygttygtagtatttgttttagtygggtttyggtttgggggtttagtygggggttaaagaggaaataaataaataaataagtaataggttatggagggaaaagagtyggttagttttaggttggagaaatgaggttaattagagygaggaagtgygggygtgggggttttggaaggtagaggagaggtagggtttgygyggygtttgggaagagtgtaatttggggggaygtttttygtttttttagygtagatgtatgattggggtaggaatgatttttgttgataagtttttttttgtttgttttaagatattatttttygaagatgaattgaggaaaatagtygtaggygagattyggggtgtattttaggtaaaaaaaaaaaagttagggttgggggagagtttttttttgatgagtaggaaagtgtttagatttygaygygtttatttgttgtagttttgtaaataatttaaaatatagatatttttatatagayggatgtatgtgaagtggaggaaggtygaaaygyggggaagttagggaaaaagaaagaaaaagggttgggtagagagagatttgtgttgtttattttttattttgyggagtgaatttyggtagggttttttttggggataggtggaaagttaagtttttttttttttatttttgtattgtgagtggtttttattgtgtgtttgttggagaatatgtttatygttttygagttaggtggaggattggaatgttggggggyggggagygttggagttgaggaygtagtggttaggggttgggggtygagaaagagtagggyggggttttagtttygygtgygggtggtagyggyggtygggttttgtttgttagatattgttatgtttaaygggtgtttygtyggagaygtgatttgttagtygttttygtttttattttagtagaaaatayggtagttgygaggtgtttyggtttgyggggttygggtattyggtgygttttgggggttgggtygtgtgygygggtgggagtyggyggtyggyggggtyggggygaggggygagygggaggggyggagtgagygagygygyggtayggtttttyggttttttttgygttttttttyggtagtygtygtygtygtygtygtygttgtgtaatttagtagaaattygataggggtygygtttgttgagygtattyggyggtygggtagttygagygggtygtygggtttggtyggtyggtgtagaggygyggagggggtyggyggaggggatyggyggggatgggygygggaagtaygtttgattagagtaygygtygttttttaattttggtgttttyggygagttgggtagtttygygygttttgattttgaygttttagtttttagttagggtttaggtgaatttggggtggggtgtgygtgygtgygtgtgtatgtgygtgygtgtgtgtgtgtggaaggggtggtgagattgggaaygygttgtttttttttttagtttgatattagtaattggatttttattttaagatyggttttgttttttgttggggttgggagggggggygatttttttttattatttatatttttgtttattgtttattgagtggaaggtaggygatttaaagagaygaaagagaggaaaaaggggtgagagayggagagaggaaaaagaggggggyggttagaagagggaaggagaggygtggggatagggttttygttttygtyggggtygggtttgatggtgaaatagtaaatttaygtayggagggtygttaggaaagtggatattatygttttaattaatttygagatgtttyggyggygggatttggygtagtygtgaygygtttttataaatttgttyggttyggggttgtttygagaattygtatagtagyggygttagatttatttygygttttttagttyggagtttatttgtataattggattttttttttttgtttttttttttttttttgaaatttgtttgaaaatttaagtgaaaatygygaygatttgtatatttaaaagtaagtgttaagtaagtgttttgyggtggtttyggygygtttyggggtgagygygtaaagtygggagygaggtgtygygagttgygygtygtttygggtyggtttygygtgtgggyggttgggyggttgggyggygggaggayggttttygygggtttygggattgttyggttggttgttygtataattttttttttttttttygtttgttgatttttygggttaggtgaagtgtttgggttaygygtgtatttgtggygagattygggaggygattttggggggygygyggtygtagttgggtattttgtttgggtygggggygggtagtyggttttagtggtygtygttgagggtagagttgygagygagyggggtyggttgttggtygygtygygtyg

SEQ ID NO: 5969 - DNA, 808 bp, synthetic construct
  misc_feature 1..808: note = Description of Artificial Sequence: Synthetic polynucleotide
  source 1..808: mol_type = other DNA
tygggggagttgygaggttatttttagtyggygttygggyggattgygagttttygygggttyggtygggggagyggagattggtttttygttygggttggggygtttgtygttygygagtyggaagagygttttatttaygagtaggtagttttggtagagggttaattgaggattattgttgttggttttaggaggagygaagygtttggagatygggygygygggygyggttttgggagygggggaaggtgaggggaaatgggatatgatggtattaataatygttattaaagayggtgggagtaataaaggaatgygttttygagaygtygtttagtttyggggtgttttttggygyggtygyggtgtaggaaygygagtttygtygtygagtttttygtygtttgygttygttggygyggygttyggyggtagtgttatttygaggtygagygttgttttygtyggttygyggttgttagtyggttttgttygygttygggtttygygagyggtygtattttattttayggaggggagataatgagattaattagaggygtygttatygygtyggagatagttgtygtygtatagtaattattygygggttgggtgygygggggtttttygttatttgygygtttgttgtttttattaygyggtatygattygggygygttttyggtttttgttygtagtttatagttatatygygtattttatattttttttgygtttttgttggggagtttattttttttattygtatagtgygttgyggttyggggtgtgggaggtttyg

SEQ ID NO: 5970 - DNA, 3415 bp, synthetic construct
  misc_feature 1..3415: note = Description of Artificial Sequence: Synthetic polynucleotide
  source 1..3415: mol_type = other DNA
tygaggggatyggttygtttattygttygygttttttggttyggyggatattaggtagtttttyggyggtyggtygttyggaggaygyggaagatgtttyggggaatttaggtgatttygttygttatttatagaaagagttaggtyggggttgttttttattttttttgtagtyggagagttgaggaggtagggatttggygyggtttagygygtttygygagyggttttttaaatgggtgygagagggaagagggtagagygyggyggggygttyggggggygttyggtattygaggygggygtaygtatttaaataggagagyggygttyggagttatttagtgygggtagaagagyggggygaggagyggggtygygttygttggaggygyggggygagtggaggaagaggaggaggagagtagaaggaaggggaagyggttygtatttgttgygygtyggggygtttgttgtttttttttyggtatgatgttttttyggygattgttattgtygtygtygtygtygttgtygggttgaggatagggagggagggggyggygggttygygggggggygaggygggtttgtttttagtttttttttyggagagyggtygttygtaggatgttgttgygtttaggtttttygygtttttttygygtygygtttygtygygaatttygaaygtgyggagggaagaaggagggygggygagggaggttyggggagggaggagtaygggggggaggaggaggtagaggaggaggaggtggaggaggaggaggaggatygygttgtyggyggaatgggaagtttgataaatygttttagaggttagaggaggagggggyggggaggagyggyggttttgttttttttygtttygtttttagaygaggtgygyggggttyggggttggggggyggggagagggygggtagagyggtgggaggaggagygygggagyggttyggatyggtattgtttyggttttygtttttaggtygggggttayggtattyggggggaygygtagtygtygtygyggttyggggttyggyggtttagttttttgttygtggygyggttggagyggyggygtyggtaataggtaagtttaaaggaaaaggagatgatygtgttaatygttygttygygggggygtygygttttygttttyggttttaggttygygtgggattttygtttygttagygaaaggggtgtygttttttygttttygtttygtgygtataygygggggygyggygttagtttygtygagttygtttyggggygttygttattttttatttttatttttatttagygttygtttttagttattttttagttgttttattyggttygtatttttttttattygtygatttyggagtttttagygtggttttygggtyggggttggygtttttyggggaagttagagtttaygggtaggttttttttagggaggaggygggygygggtyggggygggtgggggtagtttttagatttygygttatttagttttttttttaggattygtygtagttattttttttaatttttttttttyggataaatttttttgggttygtttygggggtyggtgtgggagggggtttttttaagtttttttttttgattttgggatgattagggtttttttatttygtttttygttttygggagtygggtygygttttttatttayggygygggtygattttagggygggaygggggygggagaaggaaatygggtttttttgtttatttttygttaggggtttttttygagagtttagggggtygtygygtygtgtttygygttyggtttgtyggggttgttggattagagggattgattattgattggtgatyggggtygttgaggtttygggtyggttyggtygattggtygyggtaagaaggagttggttgggyggygtgggyggyggggygaygygggtttatttaygggyggyggtgagggygygggtgggtyggagtttatgygggygattttygggyggyggyggttgagygggagtyggagttygagyggygygggyggyggygtatygatgygttgygggttygattgygtttttttgggttagtttttaggtygggaatggggyggtygygtyggggtyggtttygggygttgtygggyggyggttgttggagygygggggyggttttygggtttattattttygaggyggttttgygttygggygygtyggttggggttttggygttttygtaggtttygaggtygatagtttyggygagggygggygtttygygttttagtatyggttgtttgagygtttttggagtagtaaattttagatttttttttttttttttttttttttttttttttttttttttatttttttttttttttagtttttttttttttttttttttgttttgtgttttttttattttttttttaygattgtttttgtaagtttgttttaaaagtttatagtatgttttttttttttttagatygggagatagtgattttatttatayggtaagattaaaagttttygttygtttagtttgygggtttgggttgggtttagaygttttttaggatgtagatgygtygtygttggttttttyggttataaagtygtttttagygttttttygygygtaggagygttyggagttgtggggtayggattttaggyggggtagggagttygaggygggttgyggyggggttttygggttggyggattygggggttgaggygtygtgygygttgggtgttygyggtygtagaggttagaatygttatttttttaggtyggggagaygyggtygtggagygtgaaaygttttttgtaagygaggaaayggtgagttggtygatatygtyggyggttttattattttggtggtygygttgagtttttgtygtttggaggygggttgygtygtayggggttagttttygtyggtttttagtttattttygaagtttttatttaggygygttyggtgyggygtgtgtatagygyggggygtygtatayggaagygtgtagttttttttggtygygtttttttttttttttttattttttygttgtttttgtaaatttttgttttttyggtttttttttattgygggtygyggtttgaattygggttttygygtagtyggtygtygtygttgggtygttgtttggttttttttygtttaggygtygagygttgtgygattygttttaatatttgttygtttaattattggygtatttattagtgttaatgggttgtatattgtagygatagttygttaygtataataygggttatgyggagtgtaygtagtaattatattgttatgtygggataygtaaaaaggttttyg

SEQ ID NO: 5971 - DNA, 3415 bp, synthetic construct; identical to SEQ ID NO: 5970
  misc_feature 1..3415: note = Description of Artificial Sequence: Synthetic polynucleotide
  source 1..3415: mol_type = other DNA

SEQ ID NO: 5972 - DNA, 1592 bp, synthetic construct
  misc_feature 1..1592: note = Description of Artificial Sequence: Synthetic polynucleotide
  source 1..1592: mol_type = other DNA
gygaagygatttagygygaggattagtttttaattaattygtttttagttttgggygttttttttagtagttagatgggggttttagaggtyggtgygyggttatatggtttygggttaggtagggggtygtggggaygtatttgygttaggygtatagtatttttgggygygggaygggygaagygtygtgggttttaagttgagttgggtyggttttgtagygtyggagagtaaggyggygtagggaagggagatggggygggatgtggggaaagttgtygattgtttggattttttyggttyggatggygttagttgtttttagtttagtttgyggaaattygagttttttttagyggttygayggttygggygtttygtagattttgggtttttttygyggtgttttygtygttygtttttgygttttggttyggtttttaygttttttygaggtttyggygtagygyggtygtygttattttttttatattttagaggtygtagygtygttttttttttygtatttttgttttygtaaaggagttttttygtttygygygaggtygyggygaggagggggygyggttyggygtttgggagtttatattttttygtygygygygtygtygagtagggygtygygtttttyggttygygygtggtygtyggaaygatttyggttyggygtyggtttygtttygtttygygtttaggggtttyggggygggtttygggtttygggyggaygatgyggyggttyggtyggagyggyggygggaagyggaggyggaggtgaygygttagggtyggygggtygggttatgtagygttttagggygggygyggaygaggyggttttatttttggtygggttggttttgygggagttggagttygggtgyggttttttyggtygggggyggygggggtygyggtttgggtttggagaygaggyggygttygygttgggtygtagagggaagggtagyggyggtttygaggtyggggyggayggattgagtygyggggagyggggttttyggygygyggyggtttyggagtttagygygtagtttgygggtagtttaygggttagtttggyggggttygayggyggyggyggtggyggtagygttygatttagyggtattagtttgggttaygattagygttayggtagttygygtttyggtygttyggattygygtttyggtttygggtygttttyggtgggtagygttygttttagygtttttagtttyggttttyggggttyggtyggygtttaygttgattttttttygttyggygtttgtttygygttygttygtttttyggagtttgyggggtyggtttttttttygttgtttgtattttygttgttttttggtygggagggyggtttaagygyggtygagyggyggttggaggygtttattygggagttggagygggygttygaggygygtayggygygggattatttyggtgagttygttyggttyggtagttttttgygygtatggttggggttyggggtttygagattgtttygggtaggyggtyggattagyggaggagagtayg

SEQ ID NO: 5973 - DNA, 903 bp, synthetic construct
  misc_feature 1..903: note = Description of Artificial Sequence: Synthetic polynucleotide
  source 1..903: mol_type = other DNA
gygattttagaattygttttttatttygagttygtttttygtygttttttygtttttgggagggyggttttattaattttygygattygggtygtttttggyggttttgatttygttatttygtttygyggygggggtttgggggtgaggggygygttttggggtagaggattgygyggtagggtttgttatagggtagaggttagggtttttygggaaaaaggtaggygtatatatgtttttttttttgggaaaagayggggaggggggttttttttgggagattttaggtttygaaatttttygttttttatttttyggttttygtattttttttttttttygttaygtatttttttttttttttagttatttgttttatttygtagygtygygataaatayggttttagttygttttygtttttgtttagttttttttttaagtttyggggagtgggggagtgagtagaygttttttttttaggaggtyggaatttttgtttttattttttatyggggttyggttggttagaggtaagtttygagattttttattaattattattatygttgygagggtyggtgaggttgtagataaygtttgtaaggaygggagtyggggagggtgtagggygagtttaaaggaygggtagagtaagtttygggaagaggtaggggttttttttttygggtygtygtttttygtattttyggagttagtygtagttaygtagygtygtttgtygggtatattaaggatttggygygtaygtggygtttatttttattttygggttygtttttggttygygtttagtttttttagattattygtaaattgaggatttyggatatagagtgtagagatttyggtaagtttattgaaagttagtygaattyg

SEQ ID NO: 5974 - DNA, 1592 bp, synthetic construct; identical to SEQ ID NO: 5972
  misc_feature 1..1592: note = Description of Artificial Sequence: Synthetic polynucleotide
  source 1..1592: mol_type = other DNA

SEQ ID NO: 5975 - DNA, 382 bp, synthetic construct
  misc_feature 1..382: note = Description of Artificial Sequence: Synthetic polynucleotide
  source 1..382: mol_type = other DNA
ayggattgttygtttagtaatatttgattaygttttttattggttatygttttyggaagttygttttttygttttyggaattttygtaggygttgggtttgtagatggygtttaggtatatagtggygagtgtgatttygtagttttgggttgtttggttaagygttygtyggatatggtaygtygaagggttatyggygtggagttttygtttttagygttygyggttgggaaatyggttatygttayggygggaattgggattygggttgygtttyggtttttttatatyggtttatygtattygtgggygttygtattggtgttgatataattttttgatttttgattygtattgtttygygattaaaggtaaaaaayg

SEQ ID NO: 5976 - DNA, 665 bp, synthetic construct
  misc_feature 1..665: note = Description of Artificial Sequence: Synthetic polynucleotide
  source 1..665: mol_type = other DNA
gygtttttaygaaattygtttayggataygatttyggggttatatttagttagaygaatgtttggtaaatgatagttattttaygttagatttttatagttttttataygttatttttattgttttagggaattataagtataggtatygtttygttyggygtttttttttaaagattggggtattaggatygygggtttttatttttatttagtataaagagttyggygtttagagttagyggtttttygaggatttattattaagttygyggatataggtttygattttatatttaaygttgttaaagtggtagagtyggygygggttgggatagaggyggtattgaggtyggygttgtyggtggttgagagygttataagtttyggttygttatattaggggygaygttttttagaggttttygyggtttattygggygggattggttttattgtttgygygttttgagaagtagattayggtgttttagggtttatagtttygygtaggggagtttagtttaggttttgtaygagyggtttttygygagtttagttttgagagattgggagygtaatttggtgttgagaagaatygaatygtttygttgttttttgygtygaattatattttttagaggttttygyggttttattttttyg

SEQ ID NO: 5977 - DNA, 764 bp, synthetic construct
  misc_feature 1..764: note = Description of Artificial Sequence: Synthetic polynucleotide
  source 1..764: mol_type = other DNA
aygygttattagygygtttttaygtataaattttttttttgyggttaatttgygatttttaatttttygttttggttgttaagggaggygygtagagygtttgtgtttgygtatttttatattagttygtgtagtgtgaygttgggtttygtttttgtgatygggttaggttyggagttgtagggaattyggattttygggttttttggaaggtyggggagaggttagtgtgggaggatttggtggggaggaggtygtgttataaattttgygyggagttgtatygttgttgttagatattgygaygtygygattttttttatttyggattaygttttttagyggatttygygggagttgggtyggyggtttttttgtgtttttygggggyggaggtagttgaggygttttttttygggttygtaagggttgggttttatttaattaagggtagyggtgagattygagtgtagatttttygagttttyggggtaggaaggagattttttattagttttgttttgtaggtygggagtgggttgaggagtggygtgtgggttttyggaagttygtygtaggttatttgtgtgatttyggtgygagtggaggttggtatygtttagtgygaggttgttatttygtgtgtttgtttaygttttgtgtgattgggtgygaggaagttaatggtatygtggaatgtgaggttgtgagttgaggygggagygggygattgttygttgtattttgttgggtygatattygyg

SEQ ID NO: 5978 - DNA, 1394 bp, synthetic construct
  misc_feature 1..1394: note = Description of Artificial Sequence: Synthetic polynucleotide
  source 1..1394: mol_type = other DNA
tygygtttgggttygtagtttygggtaygttgtagtttygtattyggttgtttaygttygggattatttattgtgttttttyggaattgtttagygtgtttttttagattttagatatttattttaaatttaggttttagygttttgtaggggatttttattttggggygtttatttttgattttttttttgggttttttygttayggtygagtttaagtggttgaagygyggaygaggatgygyggggtttyggtttttaattgtattataggtygtatttaygaatttggttyggtatagttattatygttygggtttttaggttttagggttgtagaagtttagtttygggaaaaaaagtatatyggtttgaggttttataggaattttttttttattttggttyggtttgtaaaatttggtttatttygygttttttttttttagaaaagtagyggttatagtggygttyggtttttagttttagttttattygatttagaggatagtttagttttgggagttagyggygttagaataygggagagygtttgttttygtygygaatgygttagygygygggggggyggaggtaagtttygtagttgtttygggtygggaggggygygtggggtygggtttyggyggggatagtygggtyggggagayggagttagaggggtygtagtgtttttygttttaggtttttatttgtaatggtygtttygtgattgattagtgttattaaagataatttaggtttgtttttttgtggatattgyggtttaaaatttaaaaaaataatatttygtttttttattttttatttggttttyggttyggagataggyggaggttgygagtttygtttygtttttagygaygttttatyggaatttttggaaatyggtttttgtttygagtgygtaagygygyggggggygaaygttggggttttttagggagtaagggagaagtgtggggtygtatttgtygaggggtygggaggtttggaggagggtggaggttggttataggatttygatggggatggagtgtttaaatttaggtttgtagtygtgattttggygtgagttggatggaggaaattttagtatygygagtttggattaaggygyggygygtgttgtttgtggtgtttgttgagtgayggtygtygygttttygygtatttggatygagtgtttggtygttggyggagtagtgttttygtgtayggggttgttgygtgygygtgtgtygttttttagygggggattaggatggtgtygtagagaaggttgygyggtggtgtttgattttgaygttggttgtagygggtttttggggtttttgyggtttgtgtttgygtttgtgaygtatttgatatyg

SEQ ID NO: 5979 - DNA, 949 bp, synthetic construct
  misc_feature 1..949: note = Description of Artificial Sequence: Synthetic polynucleotide
  source 1..949: mol_type = other DNA
aygtygtgtttygttattttaaaaaagaaaagttattttygttaggtttttttttttttttattttygtgtgtgtttygaggtygagatgtagagagtaagaaaaaggagygaaggggatttttgygygttttaagtatttattagygtttayggtgtgagatgaaggygtattttttgggygygaagtttttaaagtatttgtttagggagatatttttgaagttgttagggttttttttttgtttttttttagattygggttttgtataaattttggagggttagygggygaggyggttatygtagyggtygttaaygagtagttgtayggaggtgtagaagaaggaggttattgttatttttttgataagttgggggygtgggaggtttygggagttygaagtygtttygagygggggtgggyggtgagyggattttygggtgttgattaggtgtttggtggtagagtagggaaggggggaayggaygtygattttagggattttttattygtttaygttttttggygttggttataygtygtygttttagtattaattggaggtttttagtggaygagtagtygttygagggtagtygtttgagtyggtagatagyggttagttggggtagyggttygaattgttttygtaataygttttttagtatttyggtttgyggggtgtttaggagygygggyggygyggygyggggatttaggaygtygggygyggggtttatggtagggtygaggtygttgaggtygggtttttatttgygtattyggggtygtaygaggtttgggygggggyggggygggggygggagttggattatttgtaattatttttyggttgygtattttaatttyggttttttttttggaggttgygtttaggtatygygttgaataagtygtataggtgtgattygggagygttggagyg

SEQ ID NO: 5980 - DNA, 1365 bp, synthetic construct
  misc_feature 1..1365: note = Description of Artificial Sequence: Synthetic polynucleotide
  source 1..1365: mol_type = other DNA
tygygyggttttaggtgaatttggtygaggtttttgygttaaggayggygygggttagttgaggttaagatygtaggtattgttttatygttttttagattatagtttygtttttgtaaggtttyggggaaaygggtattttttttttagtgagtaaaggagaaagayggagttyggtggttgggtgtttygtttaggattattagygagtttagagttttttttaygatygttttagggtgggtatttttaaaagyggaggaagggagggaatatattttttggtgttgtgtttattttgtttygtatagagygggygtttataggttttgggggtttygttyggatygtagtggggagaggtygttttatgtttygtttygttaaatttaagagttttygtygagygttaggaggtttttagataatyggttttgttygttgttttttgtagaatttttttatttttttygagtttttttttttgygttygttygggtaayggtygygttatgtttagttttaggtygygaggtagttygttattygttttttygggttttygggttygattttygygttttggtygtttttyggygtttaggttttttattggttygaataygtttygygttttyggaygtttygagttttttttttyggtygaggttattttggygaggttygatttttgygygtyggyggttttttagtygtygggtttygtttgygtttattyggttttttggatygttgtttttttgtgygttatygggggtttgttttgggtttgttygatatygtggttgttygtttatttgagygtaggtttttattttgtgttagggtygygygtggttttygtttgyggtttgttgggtttyggygttataggtattgyggtttyggygttygtaygygggggattgggygggggttggagagtttaggtygttattgtyggygttttagtgtaggagagggtattgagtgtgagaattatatayggttggagtgggaaggggttttgttatygtttattttgtagttgaagtygaggatygygatagttttgttgaaaaagatttyggygygaggtttttttygtaygttgttgaggtgggagagggtgggtgtgagggyggygtagygtttgaatgyggtgggtaggaggttagygttggggttgtaaggggatttagttttgttttyggttttygygttttttgattttttygtatatttyggggtagygtttagtgatagagaygttttttaaagyggttttygattygaattaatggttttgttttttttttttayggggtagggggaagtggaygtttygggyggtgttgttgagyg

SEQ ID NO: 5981 - DNA, 2638 bp, synthetic construct
  misc_feature 1..2638: note = Description of Artificial Sequence: Synthetic polynucleotide
  source 1..2638: mol_type = other DNA
tygggggtygygttggaattttataggaaaaaggygyggaaagtygtygggtatttttyggggttttatagatgtttttagtgttttagttygtgtattagttygygtattyggagggattttaggtagggggagggtttygyggttagtatgtgygttygaggttttttygtagggggtagtgtygttygttygygygtygatayggtgggagggggtgggaatttgygyggagttttggaggttttttgggagaaagttaggggatgyggaggggtgggygtaagatttttaggattttagggaggtygtggggagggtygtygagggtgtagtgtgaggygtaggagggggttgggggyggtgtaygttgtagggagaygtagtttttggaagatgygagtgtgaatgtgtgagtgtgagtgygtgtgtatgtgtgtgtgtgygygygtatygtagtttttygggtttygygaggygygygggtgttagtttgtagtyggggttttttttttyggtttttttgtttagttyggyggtttttttttttttttttttygttygttttttttyggygggttaggggttgggaygtttyggyggagtaggyggyggyggtggygagttggggagttttaggttyggygttgtyggaggggttygagtygagtygtttgygtttyggtygggtagygtygggttygtttttygyggggttaygttttgttaaattttgttgyggyggttagygtagygggttygtaagygggygggaggggygtygggtygggtygggtagggygygggyggttaggggtttygagagyggyggtttyggttygyggttttattatgttttagttyggyggygggggyggyggyggyggyggyggtagygggggaggyggyggttttagygtyggggyggtyggyggaggggaygatttyggggygaaygaygagttgatttttttttaggaygaggggggygaggagtaggagtygagtagygatagygtttyggygtagygggatttagaygaggttaagtygtttttggttaaygagtyggagaattagagtagtagttyggattyggaggtaaggaagtatygyggttattttygggggatttyggttttgygttygtttattygtttttgtttttgtgtttttttygtaggyggagaggygttygtagttygttygggatattttttagaagtygygggattatttygtygaaggtatgtgttygttgggatagttttttattttygattttygttgygtttygttgtttagttygggyggtttatygttttttttgtttgggtggaygtatttttgtttttygtttttattggyggtagttttygtggggygygygtggggggygttggggtttttagttttygtttygagttttttgtygyggygttgttagtttygggggtttgggttttatttygttttggttttgttygtagtgagaaggttttaggatagygygttttttaaaggattttygtattttgggtatttttttttgatgatttyggatttgagtagttygtatttttttaayggatttttgtttttyggaggagygygtatygtgagtgttygtygggygygtyggggagggtgggaggtygyggttygtaggatgygttttygggtttggttatggagtgggggatggggttttttgygtygattttaagtagaatttgtttgyggagttgaattattttttggyggtygagygygaggttgygttggttagtgtttggatgaaagtaaagttattttaatttttttttttttgygggttgaggttttggagtttatttttgggattttttttggtttttagaatttttygtttgtatygaaggaaatttggatttgtgttygttttgggggggtttygtttttttttttggaaatyggttagttttttttggtagtggggtaaggggtttagggagttgggttggygaygttgtttttygatttygggtttattgggyggttgtaggttggtttttaagaaatttagttttygtggygggttatttatagttttygtttttatttttagttttygtatyggggttttagtttttttgyggagttagtttygaattttaaattygygtagatgatttygaggygatttaaggtattttttaagttgaggaatttggtttttttttttttttgtygtttgttttttttatttaaagygagygttgygatattttaaatttgttaatgggygygtattgtgtgttgttygttggtatttagagyggtgattaagtaaattgatygggttttagaygaygtgtaaatgagggyggattttttygttttttttttttggttttaaattttygtttttygygttgygaggggygtagttgggggttggygaggtttttgtgttttttaagtygttattttatttttaggttttttgtttaggtgttgggttygatgatagatgttgggtgaaygtttatttattgtgtgttaggttttygygtgttgttgtttgggygygatgtgaatygtagtagttttttgtttttygtttagatttttattgtttgttatttygttgtygayg

SEQ ID NO: 5982 - DNA, 1531 bp, synthetic construct
  misc_feature 1..1531: note = Description of Artificial Sequence: Synthetic polynucleotide
  source 1..1531: mol_type = other DNA
tygtatatygatttttgygtyggtttttgygattygygttygtttttttyggttgggaagtatttgttagyggtttttatttgggtygttttygtygyggggtatttttttgaagtagtygttgagygataggttgtggyggatggagttttgttagtyggttttgttgygttggtagaaggggaagttatyggygaygaattggtagatgtggttgagagtgagtttgygttygggygygttttgaatggttatggygatgagygtygaataygagtagggyggtygtattatttttattaggttttygyggttggttatggatagttagtttagtttttygggtttygygggygyggygggygaggygggygyggygggygygggttgygygaagggtygttgagagtagtygaagtgtyggyggtaggyggtggttgtagaaagggttyggtygyggtttyggggggyggyggyggyggyggagygtttaggtaygyggyggyggttgyggyggyggyggagggygggttttttaygtygggttygttgagttataggtaggggttggyggyggyggtyggyggygyggygtagtyggttagttygtaaggygttttggttgtygggggggygttyggggyggyggyggtggyggygggygggggtaggtygggttgygaatatatttygaagttgtygtygtagtagagggttatgtyggyggtygtgggyggttgyggygyggtygyggygaggggygagyggggttggtttygtygttygggygagagtatttttttgggggttaattttgyggtttygtttttattygygttgggygttyggtgtttygggtyggggtygggygggtgttagyggagygtttgttagtyggttttttataatygagttyggygyggttttttttgggtyggttyggagyggggyggtggtygygggtttgggttttttaygttttygttaygttttatttgttygygygtttaaattyggagttygttygtttygtttttatygtttttttgttygggttygggagygtttgggaggtyggygtttttaggtttygggtaaaaagtagtattttatttttagtttaygttttttaatattataataagtaaagttaygaatattaaagagaagataattygaatagtaygaatgatttttaaaaagttaatttggggtggtygttygggttatttgtttagttatttttttggtttttttatttttttttttttaattttttgtgatygagtygyggaatttaygtttagttttaatygatyggtttttagtygaaaataatygatgtgatttataaygttttggggtatayggtagaggttattaataggttygtttggygtgttttttttttttyggggattttgtgattggaggaayggaaattagtgttgagtttttttaattaaattgtaggttygtttatattygggaagtatttattygttttttgtgyggtttgtaygggttttyg

SEQ ID NO: 5983 - DNA, 2045 bp, synthetic construct
  misc_feature 1..2045: note = Description of Artificial Sequence: Synthetic polynucleotide
  source 1..2045: mol_type = other DNA
gygaaayggtagaggtyggtagttygyggtttaygtgtatttgtttagggaatygttttagygaaatttgattyggatyggaattttttygtagtatagyggtygtgtttatyggaatggaaygttataagttgttatttgtattttttttttagttttgatagggaataygygttgtttttaygtttatatygatattyggatttttatttagttyggttagagttttaggggttagggattagtgtagggagaaggttttttattttagtttttaggatttttaattatagtttattygtttttattttgttyggttttaggtttagtygaatttatatgttttygtagtgtygagygttattatttatagtygttttttaaattgtgatttttatttgggagattyggaattatttaggattttggtgtggggggtagtattttttatatttgtttttygaaaattgttatggagtagtygygtttyggygggtaggtgagggggtygagtttattagygtygtagtttygttgtttattttttttagygtyggttgtygttttygggtagatatygtyggttttgattttggggttgatatygttaaagggtagttagtgttygtttaggttatttygggaggtttaggggtayggygaggggtyggggaaaggygatygtttattatagttygygygtttagattgagggaggagtygggttgtagaatyggyggyggatggagaygggagggaggttgygaggtygttygaggagagattaaggttttagaaayggagaagygggygttttgygggaggyggyggygttgtygttggtygttaagggygggaagtgttttgggatttttattaggggtygygagtttygagygttaaattttygyggygttygtttagygygttgttgtggygggygyggagggygygygtyggtagtgggggttgyggyggyggagggtaygggttttygtttagygtttttatttttttggtgtagttgtttttygygagtygagatatttttgttagggaagaggagygtttyggttgtttttttagagttttttgttggggggatatygtttttatgaagaaaatttttaaataaattttagtttaggaggaggttataygattatgttygygggttgtyggtyggaggggygaggaygygygggyggaggygyggttgtygtgtttaggtagggagtygagtttygggtgttygtygygygtttttygtyggggttatgtattttygtttgygttygatatygygggttggaggygagtgtagyggygatagttygttagygtygyggttygtttygtttygggttygtttttttygtttygggygttttgygtyggggttygttttygtagttttttttagtttttttttagtttgggtttttttagtttygttttagtttgtggygygtttggygggygtttttttatatatgttagtatatyggttatyggttgattttttyggtttgtgatttygygtgggtgtagttygtaggagtttatyggtttgtgttaygtaygggggtttttagtgtayggataygygtttttttygttatttgtttatttttattagattttattttttttygygtygtgttygyggyggaaggygtttttgtagygygtgtattygyggagyggtggygattttagtttgagtagaggagttgtagtgatttttgtttygtttttagyggattgyggagggaattttttattttattttattggggatagggtggtaygtygtagagtgtygtagttgtataaatttggaagtttatagtatygtttgattttttgtgtaatttygaaygttagtttgttygggtaattttgagtgggtttttgtagtyggttatgttagyggtttttgtatatttgtattygyggttttygttgtttgtaggttgtagagaygggggtattttaaaygtgaaagagtaatgaaggaaaatgtagatagagygaggaygtyg

SEQ ID NO: 5984 - DNA, 476 bp, synthetic construct
  misc_feature 1..476: note = Description of Artificial Sequence: Synthetic polynucleotide
  source 1..476: mol_type = other DNA
tyggttygygygggaggagtgtgatttaggtgtygttttttttygtygtygagggttaggagttygggagygygattttttttyggttyggtttggttyggtttggttagttttygyggtttttgttygggttgaygtttaggaatgtggtygaygagaagttttaatagtayggygtggttttttagtttyggtgagtattygtygtggggaagggttttggggatttattggaggtygyggttygtagtagttaggggtygagttayggttayggaygttttggtgtttyggttygtgtygggtttttaggyggaggaggygttygttgggtttagattttygattttagtttyggtttttyggygtttgggttgygyggagtttttgtttygygtttyggatttttaygygtagtttttaygygtttygagttggagaagtygttagttygtttttttagggygtgtygttyg

SEQ ID NO: 5985 - DNA, 455 bp, synthetic construct
  misc_feature 1..455: note = Description of Artificial Sequence: Synthetic polynucleotide
  source 1..455: mol_type = other DNA
aygygggyggygttyggggtttgygggtaggtaggyggtttggtygyggaggttttttygagttttgygtttttttagagagggaggggtttatatyggttggtatagttattaygggtatygaaatttggggaygtgttygattatgtttttttyggtggttygggggttatttygtattgtttagaagtttygtttttygttttttttttttggtttagtttattattttttyggtgattttgggtatgttaygtttattttttaggttttagtttttttatttgtgttgtgaggagtggaaggaaygggatgattaggagttttttaagatygagtattygaggtttttttyggtttygyggagttaggaggtgttagtygagatgygygtgtygygygygttttttagtgttyggttttygtttttgtayggttttygttgggtaagggyg

SEQ ID NO: 5986 - DNA, 749 bp, synthetic construct
  misc_feature 1..749: note = Description of Artificial Sequence: Synthetic polynucleotide
  source 1..749: mol_type = other DNA
tygggyggygygtttaggtgtaggttygttttgyggaggagggygggggtygggtaagtagagggygtttagttygggggygtyggtttgggttgggygtttagagtttatttyggygygygggtygygggygygtggggtagtggtttttttagtygggaagttgttgtttaygtttyggtggttgttgyggtttygttagggttgtatyggggtttygygtagaygttttttygygatttgttgtagtttaggyggtggyggtggyggtagtagyggyggyggtggaggtggygygggygatagttyggttyggygyggtttttgaattgtttaatttttgttygygtygggtttaagygttyggtygttgttttygygttgagygtttgygtatygggtttygtttaggtgaggggygtgtgttyggagttygttgggygtgttyggttyggttyggtttygtygtaygttygtttttttggtttggttgaggatttyggggtttggaygtgttaaygttattttygygygtygaagttgtgayggtttattaagtagagatttgygaggtatatagagagggaatgaggyggaatygttygggggttygttgatattgtagagtttttygtagtatygttgttttaaatttygtttttttaggygtgygygtatagygagttagaggaggtttygtttygatttggggtttttygyggtttttagttygggggttygggttttyg

SEQ ID NO: 5987 - DNA, 1134 bp, synthetic construct
  misc_feature 1..1134: note = Description of Artificial Sequence: Synthetic polynucleotide
  source 1..1134: mol_type = other DNA
tygaaaaataygttttaggygtygggattttagatatttgggaaatagagtgtaygtagttgttgagaggtttygygtttggttttttttattattgaggygtagaggtgttgtggatagtttagatttatayggygttygaggtgaaatagaatttttagtttttttatgaggttattggtattttyggttgtttttagagtttttygatttagagttgaatgtaaagtaagygttygaaatgtagaagtagtyggggtygtttayggtatttgtttygttyggggygagagaagaygttaggttgaggttttagygattttaggtattagtttygaaggagggyggggagatygtaaaggggaagtgttyggagggttaayggttttygygtattttgygtttttttgaagygygtygttttttygygtyggggattgggatttgtttttggggaattygtttagaagayggyggyggattggggtygggtattttttagggttgttaggttttttttagttttgtatttgtygygtygttttatttygttaggaagttttagagatttyggggatggggtgggagygtttttttatygygggtttaaaaagaaggaaggaygtttttaggggtygtagaaggaggattagttttaagttataatttttttyggatttaaggtaggtyggttggggtttygygtttatayggtttttggygggggttygygygtttygggagtttygyggttyggggaggaaagaggagataagagataggygaggattayggggttgatttagtyggggtagggattatygtggaaaaattttggygaggtggggggaygyggaaagagagyggttygygttttgtattttgygtygggtatttygygttagtgtttygtttttagtgtttygygtttygygtttygygttttgtttttatttygggttagttgtatygygttygygtygtaggaatygtggagttggaaagtgggggygtygyggttggggggttgttttagttgygtttyggttagygatyggygggtygggtttaaatttagttaggttgggtaggyggtggtygygygattggggatygggygtttygtttttttyg

SEQ ID NO: 5988 - DNA, 1645 bp, synthetic construct
  misc_feature 1..1645: note = Description of Artificial Sequence: Synthetic polynucleotide
  source 1..1645: mol_type = other DNA
tygygtatygaattygagttaggtttggttttagggtagatttaattatttatttygatygagttttygaggtyggygttttagtttttatgtttatttttyggagaygtttygtggagattttggygtttaaaattgygggagtttatttattgygtttaggtggttagtttttgagttttttttattygtggttttttgtyggtatgtaggtatgtataagtatatygtygagtaggaggatttaaygaatttagtttgtggatatgttttaatttttattttygttttttttaggtttgtttaggtgaggatgatgggagggaaaagyggtgtatagtygtaatattggtattttgtaagagtygtyggggtattgatatagagggatatygtattggagatgyggtgtttayggagatttattgygygyggtgaaatattttaagtatygygyggaataattgggtttagtttttttatttyggattttttttaggattataygttattttttattttygaatttaggggtttttttaygttgygtttatttgttttgtttygtaatgattattttagtttggtggyggtggaatttgagttatagaggtyggttgtataggtagaygtgggtayggaagttagaatttggaatttttaggttttttagtttttygtaagatttygtygttgyggttttagggtayggttygtagagyggagttttttggttgtattgataggtgttygggtygtygttttygtygttgttatygttygygttattgttygtatyggtttttgggtygaattgygttttttygggtgggtatatagtygyggggaagtygtyggggggtagtatggagtygtaggggtagygygtttygttaggagtygggtatataggttygtggggygttttagtygtygtttggtaygggaagagtgagtagggygtagttagtttygatttttgaggatygggggattggaggtagtatygttyggagtttaggttgtttatggagtagygtgtagtggtygtagtygyggyggyggyggyggyggyggttgtagyggyggagggtagtttttttttttygtagggggagtttttgyggtygttygggggtttyggtttggttattgtygtagygttggtaaatgygttttyggygtyggtgttattaagtatggtygygggggtttttgygttggyggttgygggtttttygtttatygtttygtaggagagattgtyggaaaattttttggaygttttgtttaagtttaatttttgaggagagggggtygygttggggaggtggttagygttttygtygttgtygtttygygtattttttagygggtagaagtgygygttaggtaggtttattgagtttattaagagttgtttttttaattgtatgttttgtaaagygtagayggtagttggttgttttttttttttyggtggttttattataaaggtaggatgggggagttagygttttttttygaggggaaggtaattttttttttttttygygtyggggttatttatttgtygattygygggtygttattgygygtattggygygttttgaatttagygtttttttyggaaggaaagygtyg

SEQ ID NO: 5989 - DNA, 4698 bp, synthetic construct
  misc_feature 1..4698: note = Description of Artificial Sequence: Synthetic polynucleotide
  source 1..4698: mol_type = other DNA
gygtttygggaaygttttttygttgtattttataggaggtygtgggyggtggtttaatagttttagtgtagagtttgaattttatygtttagaaggaaaggtgagtgggggattygggygggaggtgaggtttgtyggtagyggtttttaggygtgttgggtagtayggttagtagaggyggygtttggttttggatgttgtagyggagaygttaaggagattgaatgtagggagygaggygtagyggtygyggagggtggggtygttyggaaatttaggyggygttagttttgtagtatttgtaggtygggggygygtataygaggggtaygtgggtgtggaggaatyggygyggyggggttttttttttgtagygtygyggyggtygagtgttygtgttggaggaayggygagtggggtgtttgtttygygtaggyggtattygtygttttagtttygtatatagtaggtayggttagggatygggatygtggtttagygtttggaggygttttttaygygtatttttttygatgtyggggygggaagtygagtggttttgttyggagatgttaggggatgtgggtaggggaygaagaggttttttaattggttaaattttggtttgaggaaagattgaggtggttattgattygtgggagygttttggggtttygagggaayggtagtygagttygggagattggtgttgggtattygygggggtyggygggttttaygtgggtggatttygagttgagggtagggtagggtygyggatygttgatttatgagtttttttattttygtataaggatatttgtatatggattygggtttttattygtttttggttgggttggygtygggagygygtaggggagggayggyggyggagtgyggggtttggygggtgaggtgggtgaggtgtggtygygggggagggggygaaggtattagaaggttgyggtygygttgtygttgttgtttttatygtyggygyggggygyggagggggygaagaggtgtttgttagtygtattgyggtttaggggtgaaaggaaaagggtttatgtaaaggagaaagggtaggtagagatttttgttggtgttagtaggtayggaaggatgtggtygyggggatttggagtttagagggtaaygttgggtgttataatgtyggagatgatttygggtgtagaggygattttagttgggtagagttatagagaaygtggttygagaaggggagtttttttaaattagatatattttgtgttgttttaaatttagtatttatttttttttatttygtttttataatttttagggttttagyggagttatttaagygtttagtattattagttttattttaggtaaaaattaagattaattttgtattttattaattttttygtatttaagttattayggggtagttttttatagttttaaggygtggttattttaagtttatagygagttgttygtgttttyggtttttgtttygtaaatttyggaygatgttatyggaggaygttgaaggtaaaggttggtggggttaggygtyggygagattgtygygttagtatagttttygygggagtygagtgttgaygggtttygygattttttttygagggtaaayggttyggttttttagggatatttggttagtgttattttttttttatygggtgtygygtatttttttaatagaaygtgatttygtagayggatgaattyggaatyggtaaaattygtttgtttttgtttagtttttttgttttattatattattgttttttattgyggattgygtygtgtgygtttygggatygtttttgtatttttgtttatagttttttattattaaggtagtyggaggaagattttttygagttatttgttttaygttagtagttatatygaggyggtttttttygtattattttttaagtgtagagtttttgaaagttygaggtttttgtgttaygtatttttttttttgyggggygatttygygtatgygtgtgtgtgttaygygtttaatygtatagagtaatttttagaygtgtaagataaagtattttaagtaaagatggtttagagtttaaattggaaagtatatttygaggygttgaatttgttttygtygtttgtttyggtttttggggygtygtatttaggagaagggttttaattttttgttagattygttyggaattagtttttttggyggtgtagtaataagtggtttygtygttttttttgtgtattyggagggattatatttttttttttttttagtttttagtttaaaygggagtaggtaatggyggggaaagggggaggtgaygagagyggggagaaggaagtatatattttttaattgtgaaattgtttgtttgygtgttgtgttttgggatttttttgttttaattaattttaattttaaygtggtygtaaygttaagattaagatttagaaatgaaaaygtatttattttttttattataaaggtygtttgttgttgttgtttttttaaaatattaagtaattttttttttttttttttayggatttatattttgtttatgagatttttttaattttggtggtttggagaaatgaggtgggggaggggaggattaagggtagtaagaygtttattaygaaaataagatatttattaatttaatagggtygtttttttttatataagatgtttttttattttttattaatttataataggtaaattttgagtttttttaaagtttygttatttagygtttatgttygaagttttaygaataaattttttttttaggtaaatttgtttaatttttgttttatgtttagygaagtttaggtaygatgggttaaggatttttggtttttatattgtttgagttaygttttagttggaaaggttattttgggygagggaygtgttgttygattggtttaaataaggaaagaaagtggagtattaaagaattaagggtttttgtttttttttatttygttattattattatyggttttygggttttgttgagygttgyggyggttttggttgaaaattgygttttygtttaaatygagygtaaaatttttttggatagaagtttgaaagaatttagtgtagaaatagattttttygtttaatttggttttaattagtaattatataagtatatttatataattatttaagtggagagtagaygtttagatttayggtttttaygtgttgttggagttggygtagaygygtgtgygggtatagyggyggaygtgatatygtatttttttygaatttttgttatttagggtggtgtygttttaagagggggtygtggggaggtggggtaataggttgygtaatttatttgttttgggggagtttagggtttagagtagagygtaatttyggggggttgtygtatagttttatttttttatattagaagagtaatgttttttatggatgattaatagtygggttttttttgattatgyggygygtttttgtyggtattatttagttgttttaatttgatttttattagtaaygtgtttttagaggttgygagttggattygtattaygataayggttttttttttttttattyggtyggttttttgggaaggatyggggattgtagttttygygaygttttttttttttgygtagggagtaggtttgagtttttttaygtaatgatttgggagattttaggtatttyggggtttggtyggagggttttygggttttggagttgggyggtgtttgtagtgtatygtygtgagtttttttygggtataatgtgttggtgtgtagagaggaggaaaggaaaaaaaaaaaatttaatattatttttaagtggtattggtatttatgaagtggtagtggtttatattgagygtgtttttgtttggaggtgtagggggyggttattgtagtygaggggagggtattgyggttaagggtagggygagaggatagttaaggtyggttggtygygtgggagtttttttttttygggtttagyggtyggaattattagtattgyggttaaaggggttggtaggtttttttgtatttygygtgttttttygttttttttgtgtttttyggtttttttaggaggaagatggggtgtttatygygaatggggygygtygggtygtttggtygggyggttaygtgttttttttttttygttattgyggygggagttttaattagagygygttagggggtttttttygggtaggaattattyggttyggyggyggagggtgggtygtygttatttgatygttygttttygtttttygygagtaaggggyggtggtagygtttgttyggttataaatggtttttttygttyggttygttygttygttygggttyggygyggattygtttgggygtgtttttttygtyggttttaggygttttatygttttgttyggygttagttygyggttttagttatttttgagggygygtygggtatttagygygtaggttygtttayggaggtygatayggaagtttggatygtygaggygtgtggttygtttatyggtaggtgagygtgtatygygggygtgggatgttgtggggatagtgygggggaygtgtggggttttyggatgygaaygygagttygtgyg

SEQ ID NO: 5990 - DNA, 462 bp, synthetic construct
  misc_feature 1..462: note = Description of Artificial Sequence: Synthetic polynucleotide
  source 1..462: mol_type = other DNA
tygttgggattttgtgygyggggtaygttagygattataaaygtgttttaattttgttgagttaaagttttggtgttaggygttgttttttttttgttygttygagtttygtattttttggtttttttttagttggtgttgtgtttagttttttttgggtaatttatttaggaattygttgyggttatttttygttttttttttaatttgggtygagtaataagtggagttagaattaattttatgggygagaggagtayggaggygagtggagygygttgtygttagaggttgttaaggaggyggggtggttagygyggggggtggaggatgggggtaggaygygggagggaagggtagggggtggggggygaggtttyggggattagygygygagagtgtttagttgggaaatgtagtttygaattaatatygtatgttttataattagtttaygagtyg

SEQ ID NO: 5991 - DNA, 300 bp, synthetic construct
  misc_feature 1..300: note = Description of Artificial Sequence: Synthetic polynucleotide
  source 1..300: mol_type = other DNA
tygaattggtttgttygtggygggtttgtttaaagtataggggttttygttttyggtgygygttgtttttaggattagtgttgttgggagataaagagttttagatattygaggttgggagygtyggagagtttttaggtttygggtattttttyggagtaygtaagtatagttttaggtttttagggatagatgggttagagtygtttgtatttgttygtattttttgggaggttgygatgatygtagttagggtggtygagygttyggtttattgtattyggyggttgttttgtagyg

SEQ ID NO: 5992 - DNA, 554 bp, synthetic construct
  misc_feature 1..554: note = Description of Artificial Sequence: Synthetic polynucleotide
  source 1..554: mol_type = other DNA
tygagatatttygggygygagyggtagtgttgtttgtttgtttttttttttttttagtttttttttttygtgatttatttattttttgtagttttygttygtattttttttaatatttyggtatttttgtattatttgttygggtagtttyggygggttttgggatttgttgtgygygtygagaggaaggtaagttttaaatttttgtttggaagaygggttgtygyggttgtattattagtaggaggaggaggagaagaaattatttygygatattttattttgygggtgttttgtygttgtygtttttgttgtygtygattygagttygygggttygaatatygtagyggtggggayggtgggttyggygggygtygggaggaggatattagyggagttttgtattttygtgtttygtttattagtatttatttgttttttygttttttttttagttttttagagaagggattatgatttggaaaygtagygtygtttttygtttttatagtgtttgygggtttttgttataaggtaattttygtttyggyg

SEQ ID NO: 5993 - DNA, 1153 bp, synthetic construct
  misc_feature 1..1153: note = Description of Artificial Sequence: Synthetic polynucleotide
  source 1..1153: mol_type = other DNA
tygtttttttygtagagatygttagttgaggttgtaatatttgtttyggtaaagygttttygtagttttttyggtttgttygattyggtttttttygtttttgtttyggttgyggtattattttttggagttaygtttyggygagygggggtygyggagygagggggtygttgtgtygttatttattygagtygttygggttggtygygagtygggattygygagggttggygggttttggttttygaggaygtagatatgtggtttgaattttygtttttttagtygttgtttttgtgtatttttttgggygtttttagygaatgygagyggygaggygagggygagygygtygaggaagggygggagaggygyggagtttggtygygtygygttgygtygagygtygggtttttttygygagtttttygggttygygygygygttttttattgttttygtttttygygyggygygtgttttttatttttygtygygygttttygtattygttyggttttaygyggygygygtttgttttggyggtagyggyggyggyggyggygygttttttttygaaygtygtttttagggttgttggttgygttttttattgtttygyggttgttgttyggggtgggyggygaggygggggggaggtgtyggtttggtygtyggggagggtttatygttygggyggatttttattgygagagygatgygggtttaggygyggygygygggggttgtagggygtttagtattgggggttgtyggygygygggggtttttttttggtttttaggtattygttgttgttgggygtttttygtattttyggttattatggatatttygttttttygtygtttttttygygtatttygggaggtygtyggggyggtagtagyggygyggtttygygggtgtttaggtgatyggttyggtagyggtagagtagtggtagtagtygttattgtygttgttattgyggtygtygtygttggagagaggaggaygaggagggtaaggggtagaagtaggttttgttttgtttgttttagaggttatttygggtttttttttattaattaagygatttygtgtttatttygtaggagaygtttyggtagtttttaatttgtgtgygtyg

SEQ ID NO: 5994 - DNA, 1603 bp, synthetic construct
  misc_feature 1..1603: note = Description of Artificial Sequence: Synthetic polynucleotide
  source 1..1603: mol_type = other DNA
gygatayggtttttttgaygygtttttaattaaggygttaagtttagtttgatagtattttttttttttttyggtttttggtttgatgagtygtttttatttgygagyggtgtaggtatttttgttgtygattaattttttttagygtygaattggyggtattygagtygyggttgttaggtygggagaaggttgggtttggtygggttttgtagygtttygggtttygtttttgttttgggygttygttttygtygyggggygaggtggtggagatygyggaygtygagggtttttttagttagtaygtygygttgtttyggttttggggygggggtygyggagttttattaagtggttygygtttyggttttygggagattygagygyggggagggagtgggtgtygygagggggyggttygygyggggagagtygttagtttayggygtttttgygttgttgtggatgtggttaygygttattyggtttttggattgttaggagagygyggttygaygttattaygtygtggaygttyggggatttttgaattttagygttaaggttgygaygatgttygtgatttttatygygaagttattttygtaaggygaygtaaggatttyggygatttygggygtygtatattygttattttttagttttatgtaattttttttttgttgttttttttyggygttttgtttttttataattggaagtygygaaggyggttattgygttgagtygttygttttgttggttaagtttgggygattygygyggaggagggtygggttgattgtygtygttgagttgttttyggaygggagygtttgtttayggtatttattttttttagyggtggaaatgtggagaagtaagtgggaggyggtgtygggaattgattttttttaaaayggtyggygtygttgttttgaaatgggyggttaagtgtttgtgggattaagggyggttttagagatgttyggaaaatygttgttayggttagagtgyggygtagaygyggtagagttggaggtgttygyggtgtaggttgttgtttaygtygtttaggttaggtgttgagggtttagttygygtttyggtygaattatttttagtttygttgagttatttygttygttyggtttttatygtatyggttagaggaaagttttygyggtttttaygtttttttatagttgtagygttttttttgtttttggtttygtaagtgtttatttgagtygggagaggttttygggtygttttaattgttygttttatttggtagttygttttygttttygttttygyggtgaggygtttttygttttttygttttttttttttaaattatagttygagttygtttttgygygygygygtttttttyggtttaagtgaatagttttygygtaagygggatattgtggtggatgtaatttttttygtttttagtygygaggagtttttyggygtygtaggtagygttttttttygaagtagttgtatttgtaattgggtagtttggattttygtgttttgttttygggatttygygtagggggygtttygggatattttttgygggtyg

SEQ ID NO: 5995 - DNA, 1411 bp, synthetic construct
  misc_feature 1..1411: note = Description of Artificial Sequence: Synthetic polynucleotide
  source 1..1411: mol_type = other DNA
aygattagygttttyggtgygaggatggaaagaaattttagaaaaattttygttagataattyggtagtatttggtttyggaatagagaggagagaaagatttgatygtygtatttagggttattygtygtattaagtttgagggttttttttgtttttaggtttttgtygttygagtttaggtttttttaggtgttttagggtygggttgtattygagtttygaggaggttttgttagygttagygyggyggtgataatygagggaggtgggtgagaggtgyggttgtygaggtaaaygtagagtattygtttagttttttaagggtygagagtygggagtttygaaygtygtttaagtagttttttgtttttygtagttygtttatatttttgygggatttttggaygtttygttyggggatttagggaggagggagagaggagggagggagtgggtagtttgggygtaygttatyggttttygtaygttyggtatttttygtggygyggygagttaatgggatttgtatattygaggtgtaatagtattattgtattaattattatttttattttaygtttagattgtttatttatttgygggaaatatatgtygggagaagtttatatttyggattttgtttygttgtttaaggtgtaatttyggggaggyggygaggggggaggggagggttttagattttttattatattttttagttttatttgtygttgtaaattatgaggattttttattgagyggtatatggagattatatatttttttgaatatygttttttaaagtttgtagatttttattttgaaatgaaataatttttygttggttttttyggggataggygttttttgygttttttygygyggtttgggggatttttttygtagagtaggygygtattttaatgtygtggtyggygtttagtggagattttttttatagggtttagaataatttttygyggaatatttatttatatgtagtgtttgagaattaaggtagtttttttgttttgtttttttgygtttagttttyggatttttgtgtygtttgtagtttttttttatttygaatattygtatagaygygagtttatttttgttttttttttaygttgggyggttttaaattygtygygagggttgaggtgtttatatttgtttayggtagtttgtttygtttttaagygttttaaagttttttaagygtttatattggttttgggatagtygattttggtttttttgtttgtttgagggatygyggaagtggyggggaatgtgttttygtttgagatygtttattgtgagtttttaayggaaattttgtayggaaggtaatygttttttygttygyggtaagtaggatttattygagtagyggggatyg

SEQ ID NO: 5996 - DNA, 2629 bp, synthetic construct
  misc_feature 1..2629: note = Description of Artificial Sequence: Synthetic polynucleotide
  source 1..2629: mol_type = other DNA
tygtyggggttyggaggtgttygaagygaygggattgatagyggaggaaaygtagttttttttygygttygttygyggtgtaaatygagtataggtygtggagttaggttgtttyggttttygttgggttttaattttygtttygtttagtgggtttygyggtaagyggtttttgaatagttttaagagggttygyggagtaaatataygtattggttygtttttttttygggtagygyggtttygttattagttttgttyggygygtttagttatggattgtayggtagtygggyggggaaygyggagagygagygtatygatttgtgagagaaggttaagaggtttgygttgtygaygttyggtygtattttygtttygggtttttttygyggtgaatttgggtaggagaygttggggtttyggaaagagaygagtttagtagaaagygygtagagaggtagttttaggttaggggagtgtaaggttatagaggttagggaggtgagtataggaggatataaattgaggggataaagaggagygataggagtttaggaaagygaaaaagtatagagggattttgggygttggttttagaggygggtttagagggtgtgaggttaggttggyggyggygtygtyggttgygatyggggtyggygtygygygtttttgtattttygtattygtttgtatyggtatgyggtgggtttttagagatygaggygygaatgtagygygtyggttttgttgtygtggttttagtaagagtaatgtattatggygagttygggttgtygggtataagygaattgtaggttyggygtattggtgggygygggygtygggggygyggyggtggttgggttggtagggttgagttggttyggyggyggygyggyggtttygtggtgyggtggggtaggyggyggtgyggyggtygygtgtagatggtgtgygtgyggatgygggtgggggtgyggyggaggygggggtgyggtyggygggttttttaggttattgtaygagtttattaygtyggggggtagygttatgttttgtaygygtgtgtayggttygtaygaggyggtygggttygttagttttttgattatagyggtygygttagggttatyggggttygyggttgtagtygtagttgttgtagtygttgyggttgtygttatttggtaggaggtatagggtatgggtgagggaggttgyggtagyggttaygagttgttgaggaagttagattgtaggtatttggggggygttaggtagtygtagtygtyggtttyggygttygttaygtygtattygtttgyggygttttyggtttygaagagttttttgtygggttggaagtgygygggyggyggtyggaagggtttttttatgyggyggyggygtyggtagttgtttttttygaatatgttttygtaggtygggtttagygtttagtagttgtttttgygttygtygtygttttygygyggtattttgatgaagtattygttgaggttgaggttgtggyggatgttattttgttagttttttttatttttttygtagaaygggaatttygygatgatgtattggtagatgtyggatagygtgagtttttttttygygttttygyggatygttatggygatgagygttaygtaygagtaygggggtttttgygtygggttyggttttttyggggttgtttygtygttatttttatygtttttgtttgggttyggyggyggtttttttggttttttgattgtgygatyggtttttggggttagtagggttttygtygygttttygggttyggggtagttggttattatgataaagtyggygygtygyggtygggtygtttttgtttttygttttaggygttggygyggtaaagagttggggygtaygagttygtttayggttaagttttaaatttttggagattgyggatgtygttygygtttgtttgttggaggtttgtygttgttttttttttttttttttttttttttagggagyggtyggygggagtggagtttagtttttggttatggggagttygtttaatagagaggggtttyggtttygtygttttttttygtttaggttagttttygttttggtgggtttttttttttgygtttttttttttttttygtttttyggtttttygaagtaygattygygtttttggyggagttgttttttggagtttttagtgygttaggagtttygttttgttttgattygtatgggttttatygagtttygtttgygttaggygttttygtttttatagyggggyggttagtygygtaygggygagtttatttttaagttattttttgtaaaygtttygtatagtttggatyggtttgttttygtttagygagttttaggggtttagtygatagttaggtttaygygtttttgaaatttgtyggtattygttttgygggttgggttgggagatgaygaggatttyggtggggtttgttygtattyggttaaagtttaggaagttygggttttagygaggaaaggygttttaagttttttygyggtttttaggtgaaagaaaaygatttttttgttttgtygtttgttgtyg

SEQ ID NO: 5997 - DNA, 1686 bp, synthetic construct
  misc_feature 1..1686: note = Description of Artificial Sequence: Synthetic polynucleotide
  source 1..1686: mol_type = other DNA
tygyggttgtttttgtttttyggagatgaygyggagttttgttattgttatttaggtttaaggttatttattttgttygataatttttagtattattaggygttgttttagtgtgygtttggygttttttttagattagtygaygtagaaygtttagagatttagttaagggtaagatttttagygaygttygttagtttttttygtttagatattagtttaaagggtatggtaggttagggtttttygygttattttagatgatttttaggtttygggtggttattttttgggggagttttttattttttgyggtagttttttygagagtyggagtggaggygyggggttggagggtttttyggagtygtttattagggttttttgggggttyggtttygattgggtagggggatttggatagggtttyggagygtggagayggttgaggaaagttgggggtyggggttttggggyggggagygyggaattyggygtygatgttygygtttatgaatatgtaygagttattttttttttttygtgaygttaygggtygtttyggggtgagygtttgagtygtttygggttygygttagtgagygyggttgttgtyggygagttagyggygtagyggygggaattygaggtygagygtygyggyggtagygttagaagygtatttatygggtayggygaggyggtttayggtgyggtaggtatygggaggygagagtyggygyggatagtaggyggyggttgtagttygttggyggttgttgygaggatgttgtttgggyggttgtgttgggtgtygtttttgttggygttgggygtggggagyggtagyggyggtggyggggatagtyggtagygtygttttttygyggttaaaggtgggtgttggggaagtttgttttttttttaggagggaggtagggtaggtttgagggtgaaagyggtaaggatttaggtttaagttggatttgtttatttttttttgtygtagtttttttggtttttgtgygttttggattttygaagttagttttttgygtagyggattagagaggtttattygyggaygttaatttaatttttgggyggggttygggggttgagtagaaggygaggtttggggagtayggataattttgagggttgtttgtgtyggggtgggagygtagtgggtgagtttygagttttggtttagggayggttagagtagggygttggygygtygtggggataagtaggtgtttgtttttgtttgggggaaggattagyggyggtgtttttaaggagggagtygagttgtgatttgttttttagttyggggatggagtggaaatttgtaggttttagggaaggtttygttgatattttttaagtttttttagggygtttttgatttttyggggaaygtgtatttttygggtaggyggyggggttyggaagaagygygggatgtgaggtttttygttgttttttttatttygttttgattatygaggatygaggagtttaatttggtattatttttttgtttattttgtttttttgaagagtttgattttttygygtttttygttyggaaggaagttagatttaagygaaygtttggttttgttaggygagtttggaagtyggygaatttyggattttgatagttgtttgggagygtyg

SEQ ID NO: 5998 - DNA, 1686 bp, synthetic construct; identical to SEQ ID NO: 5997
  misc_feature 1..1686: note = Description of Artificial Sequence: Synthetic polynucleotide
  source 1..1686: mol_type = other DNA

SEQ ID NO: 5999 - DNA, 2132 bp, synthetic construct
  misc_feature 1..2132: note = Description of Artificial Sequence: Synthetic polynucleotide
  source 1..2132: mol_type = other DNA
tygagaaagtgggtgyggtaggyggygtttggaggaattggygtaggtttttttttaygtagtatatttggtygtagatgttgaggaaggtgaagatgtggaagagttggtggttgtggtygataatgtygaaaagattyggttggatgygttyggggattttgtttaygttgaagaaggyggttattattagttagaagtagyggyggtagaagtgtaygaagagtgtggggttttttttaygtaggtygaagagttagttttygagtataatggggtaggttatgttgagyggtatgaygaagaygaaggtgygtagygygaaygggtaggtatattagtyggtayggtttttgtagtaggttatagtgtaagttatygttagtaygaaggttataggtagtattagggygyggtaggyggygataaggygygtgtagtttaygtgttagtttaggygttgttgtaagtatggagttatgattttggtatttagtaagttgaggtttggtaataggtagtagtagtaggttatygtgttgtygaagtygtagtagttgatggaygygtagtttaggtagaagaaggyggygygtagaygtagygataggtagttgaataygtgygtygtgtagtttatggygaaggttagtagtattttygaygygtagtattataayggtagtagttaygggtggtggaagggtaygtygtygtygtttaggaagaatagayggtagaatttgtttaggaatagtagtagygggatgaagtgygtttagaagttgagygtttygttggtaggttttagtatygaggttaggtatttttgggtygtgtayggtagaygtyggtagttygataggatgaagtattttaygaagtygtygggtatttygttttagygtagtagyggtttggtagaygttggggggtttygggaggyggtagagtgggagtttygggyggttttygaagttgtyggggtyggggtyggagggttttttgtgttygygtttyggggttgtaggygtygyggtatggtgttyggggttyggttagggygygygtaggygatttttggygtyggttttygggygttgggtagttttygtyggtygtygtyggagtttttgtgtttaygtygggggygtygttgtaggtttaggagaagattygtgttttygagtagtygtttttaaaaattaaataaattaataagagaattaattaataggtagygttgygatygttaggagygyggagygygygaggtttagyggttttttygttaagtttttgttatyggygygyggtygttygygttgyggtagyggyggyggygyggttgattgyggyggtagygyggtagyggtgattgggtatygygyggtgygggtgttttygtygtygtygttttyggagygggaggtggggatgtgygagtygaggygyggagggagggaygggygtatygaggaagggygggggttttttaggttagggtttygyggtygtttygggggatagagttgttttttgtttygagtttygtattattttttttttygggtygtygtagttygggtygtttygttaatgattgatgygggggtygtaggttggtyggygaygyggyggygygygygtygagtattagagtyggttttggggttygaaattygatagttaygygggygttttggaggatattggggagtygygttygyggggggyggggagttgyggttgyggggggaggggagggygtyggagtygggtagggyggagagatgygttagyggtaattttyggaggtygtyggggaggggggtatttyggaagtyggggggttttaagttygygttyggatyggggtygtgttattgttagttatttggggatgygtttttygtttttttattgtttttgygtgtgtgttagtgtgtgtgtgtgtgtgtgtgtgtgtgtgtyggtttgtttaygtattataygaaggtttagttggttttttttygtttagtgggygtatttaggtgygttattattttgtygtttttttygtttttgttttgttygaaagaatygttygtaagttgttttgtggtygygtttattagtttttygagtyg

SEQ ID NO: 6000 - DNA, 2954 bp, synthetic construct
  misc_feature 1..2954: note = Description of Artificial Sequence: Synthetic polynucleotide
  source 1..2954: mol_type = other DNA
aygttaattatagtggaygtagtatygygagyggaaatgyggagagtatyggggtttygtatgtggggtataatgaaataagagtagtttyggttagaggtttagtaaagyggaaagayggtttygttygtatattttttyggaaaattgaagygttttttttgatttttaaggttagaaagatttattatttttttygagagggygtagttatagatttattagagagggygggtagggtgtyggaagttagagaayggygtttygygtttttttatygttttagggygtagaggtgtttttagtgttyggagaggttggtagtgtyggtttygagggaagygtggagyggayggtygataggggatttttgtttaaattttattattaattttttttgagagtaaaaatatggggtygagttyggtagttgtaygtagaatttaattttttggtagttttyggtatygaygagttttagatttygygttygtatttyggygttttgygygtagagttaagttttyggattygtggattgtagttttygygygtygyggtaaagygggtygygtttttagttttygaggygtagygayggtgggagtyggttyggygttgggggygggggyggggtyggygaagggggagggttgygyggyggaggggaggagtygyggygatagayggyggygygtattaatygggygtyggttggtaggagtygygtagaggttggttygagygygttgygggygttyggygtaaggggagtygggtagtagtatttttttgggygtygttttygygyggyggyggyggttgyggyggggtttttttttgtttaaatatttygttggttagaagygttggtatygggggygggttgggtygggtygggtagtgttgtatatttgggtttttttgtttagagttgtgtgttyggggttttttggtttagtyggaggttgyggagyggygggggttgtttgygttgttygttygggtattttttyggtgatggaagtagtygtygtygtygttgyggggtygygttgtgttttatttatygttgttagagaggtgggaaaattygtygtayggaggtygaaagygagaggggttgygtygttatgtygggagttgagttttatataagtygtttttagttatygtttttagtyggtttygtttttttgagygagataggaagttgyggtttygagaaagyggaggagaygtygttggagtygggaggygtygggttyggyggagygyggagyggggttttgggtygygtgaaagttttttttttygagtygtagggygttygttgttyggaaattgtttagggataagtyggtygattttttagatttttygaaggtgyggggatttttagyggaagygagagggagygaaatygaggaaygagtgatagtyggatagttygtygggyggtgattyggggtygttttygggygygttttyggttttaggtgagyggaggaatygggtagaatygagggtgggygttatttaggaggaggaggttgggagggagattggggygtattygtttatttygttttttttygtaggttttattyggagtygttgttatgggagagttagttttgggygttggggattagtygtygygttygtttyggagtygyggttygagtttyggygttagtagttagttygttgygtttttttttygggttgtagggttgttttygtygygtygtyggttyggattgtgtttgtgatgagtygtagttygtagygagttttgttttygggygygttttttyggttgttttaggttgygtttgtagtygygtygygtgttttgttttygtagtggtttyggygtttaggaygtygttggttygygttttttttyggaatgaaggtgtttygtaggaaggygttggtgttgtgygygggttatgtattgttgttggtgtttattatgtttaattttttggattataagtggtataaggagtygttgtagtagtgtaatttygatgggtygttgggtgtygtagygggggtagtyggaggtagttgggggygtttagggtygttttyggtygggtygtttygtgtttatgttygtttggattttygtattttttatygttttttygttgtygtygtyggggyggtttttgtagtygyggtagggatggygggggttgyggtttttttaggtaatggtattyggggtatygggggygtyggggataagyggtagttggtgtaygtgtttattaygtggygttttggttygtygtttttyggygagttatttaattagaatttygaggtgttttttttttaygagttagtgtggtatgtatggtaaaaattgtattygggggaygtygtttttttgtagggggtagygygggatatgttgagygttttttatygttgygatttttttgttttttagttgtatagtttygygggtagyggggggygtaattttattaygttgggtattttyggygtagttattaataaggtggtgtgttygttattattttgtttygtttatygtaaggaggtygtggggttggtggaygatygygtgtgtaagaagtgttygttatagygtttggygygtttygaggaggagtgtygtaagtatygtatattagttataaagggtgtgygygttttygaygtggyggttttggygttattgttgygagattyggttttggattttaaggttatttatttggtgygtgattttygygyggtggygagtttayggattygttygygttayggttttattygtgagagtttataggtggtgygtagtygagattygygagtttatygtatgttttttttggaggtygygggttataagtttggygttaagaaggagggygtgggyggtttygtagattattaygttttgggyg

SEQ ID NO: 6001 - DNA, 2954 bp, synthetic construct; identical to SEQ ID NO: 6000
  misc_feature 1..2954: note = Description of Artificial Sequence: Synthetic polynucleotide
  source 1..2954: mol_type = other DNA

SEQ ID NO: 6002 - DNA, 885 bp, synthetic construct
  misc_feature 1..885: note = Description of Artificial Sequence: Synthetic polynucleotide
  source 1..885: mol_type = other DNA
gygtaygtttgygtgtttattttttagagtttttggtttygygatygtgtattgattttttttagaattttaggttygttttggaygtggaaggtagtygtgtygtttgggaaagtggagtygagttygggaygttgtyggtttaaatggaaygtyggtttyggggttygtttttyggygggttttygagttaaattttttaattgttttatgaygttatygggttttttttttttgtttyggttygygyggttttagygtggygttaaggagtgtggyggttttygygygtatygtgggttatttttaatttaggatttggttagtaggttgtttttygagtygaggttgygttgggyggaattagggatttatagttyggagtggggttgaaatagagtttttggttygagtagagagygtgtataygtatgaaatygtgtttttgggtgygtyggyggttaggtgttygatgtyggttttggaagtagygtyggagttygtttgaatttaggttygggaggttagaggttgtyggttaygtttaattgtgttttttttgggaagataatttttttagttttggtttttttttgagttaygggtggttggttggtttggtggaaggtaggtgtataggtaatagagataaggttaggaggtaaagtatatttatgtgtaaatgagaygygttagggaatttgtaattttttgtattttygtttttgatgtttygatttttataattatagaattttaggtagaggtygtygattttttygttttygttaagagggattyggagtatygaagttttttagtyggtgtyggygttttygygtttttttttttttttgygtygtgattttaaaagggyggygggyg

SEQ ID NO: 6003 - DNA, 2174 bp, synthetic construct
  misc_feature 1..2174: note = Description of Artificial Sequence: Synthetic polynucleotide
  source 1..2174: mol_type = other DNA
tygttttatyggttttttgyggtygttgtagaagygtattttgttgaatatttygaggaygtgtttttygtatagggagygttygtttttgttggggttggagyggygtttggaggtygatattyggtygttgttggattttttygtttgtygtttttgtyggattaaggagttggttatygtygtagttatagttgtttagygagggttttaggttttagtttttattgygtttttyggtttgygtttygtyggggygagggtaggatttgggyggttagggaaagggtagtygyggggaggtagtgttaaaatttgaggaggttgtagtatygaaaattyggygtttataaggttagttaaagtttgggtagtggygataaaatgtgtgaaaatttagatgtaaatttttttaatttttggyggtyggggggyggggyggggyggttttaggtttttttgygaagtagaygtttgtattttaaatttgtattttaaggygatyggygtttaaggggtagtggggagtttagttatattgygttyggggtattaagtggaaggggaagaaygatgtttaaaataataagaygtgtttttgttggagaggygtaagygttgtaaggtgtttaaagtatatttatatatatatatatagaaaattygtttataaagtagagtttggatttaggygggtagygygttttyggtagaaaatattaaaaagtgaataaaaygtttttttagaaaataagttattaatygtaygagagaaggagaggaaggtagtaatttaattttttgyggttygyggttttgaagattaggaggttygttttagtagggtgaggtttatagaatgtatygygtyggttgyggttttttaggggtyggttattygagttttggaatttygagaggygygaagtgggagyggttattyggagtttgggtaggggygyggggygggggtagttgtttttagttgyggtgagagtaattttyggttagtagtattgtaaagagagtgggaggygagggaggggggagggygygagggagggagggagattttygagggttaagtatttttyggggagaaattagygagaggygatttgyggggttttaagagtgggygtttttttttttttygtttgtttttyggtaygagaygggtatagttggtgattatttagggaattttaaatttggaatgatttagtagtttaaataagtttttttaaaaggtagygatgtygaaggtgttttttttagttyggygtttataygtttttaattggagtttttygttatggtttattyggggtygtygtatygagttggttttygtataggtttagagggagygagggaagggagggaaggaaggggygttttggygggttygggattaggttatygtygygttgttgttygtgttttttaggttygygygtttyggtagttagtagtttataggtagtagattagatggggattattygtyggaygtaaggtygattatttagtttygygtygtttatttyggtygaggaaggaagtgattygygygttgygaatattygygygttygttygggtggggygggggttggttgtaggygatgttggttygyggyggttgaggtttttggtyggagttgtttattatggtttggygttaggggygtaggyggggtttttaggttttttggggttatttygygaggtagtygagggygtaattygggygtttggggtyggaggyggaattaggggtyggggttaggaggtaggtgtaggyggttgttaattygtttaatttgttgygygggtggtygtttagagtygygggtttgyggggygtttttygtygtygygtygtygtttttttaggttygggagggggygtttagggtggagttttatttatgggttgaggttttgggygygyggagtygtygtygttttttyggttggtttagttggagtgttagtttygtaggaaattyggggttygggygagagttatygagatggtaggtgggaygtagagttygyggtagttagagtttttttygtayggttygtygatttayggaagagygaaagagygtttaggtggggtygagttgggggtygggtttttggagygttgggaagtatagygyg

SEQ ID NO: 6004 - DNA, 873 bp, synthetic construct
  misc_feature 1..873: note = Description of Artificial Sequence: Synthetic polynucleotide
  source 1..873: mol_type = other DNA
tyggagagttgttatygatttttttaaygttttaagttttagttttgtygttygygtttttttttttttttgggttataattttggttttttygggtyggttttaygtagttgygtaggagttygygggggaagatttttygtggggatttygagtaygaygtgygattttaaatttttatattttttttgtygtttygtaggttatatgtatygggagtygggyggggtaggygyggttygtaaggattttygygatggagaygtaatattgtygygattgtatttggggtagtttygtygygttttagtygtttttyggtaggaagygtaggtgtgtgagtygattyggagygagtygygttttygggttagygtgggtagggygtygtagtttgygtagtttygaggatttygygtygttttttygagttagggtttttaggagygggtygygtaggagaygttagagggggttgttagyggttgttgggagaaygggttayggaaatagttttttttaaagtyggggttatygtggggtgggygagttygtttttttaggtygggggygyggattagaggggaygtgtgtagayggtygyggttagttttatttygttygggyggagaygtatagttggagttggagggtygtygttygttgggtttttaggggtttgaaygtttaggggtygyggygagtttattyggagygagttaggtgagtaggtygttatggygatgyggtttyggagagygtaygtttgtygyggtyggtatggaaaygttttygttaggttygggggygtygttgattggtygatttaatagaygygggtgggtagtttagtygtatygttaagttyggtyg

SEQ ID NO: 6005 - DNA, 2174 bp, synthetic construct; identical to SEQ ID NO: 6003
  misc_feature 1..2174: note = Description of Artificial Sequence: Synthetic polynucleotide
  source 1..2174: mol_type = other DNA

SEQ ID NO: 6006 - DNA, 510 bp, synthetic construct
  misc_feature 1..510: note = Description of Artificial Sequence: Synthetic polynucleotide
  source 1..510: mol_type = other DNA
gygggtatttygtaygttaygtaggygttttttygatgagtttttttttattttatagtttagggaaggtgyggggttgygggygtagagttgtataagtagggttgtaggttgggttaaagtygttttgyggggatygatatgaattygggttttttatyggaagggattaaggattgagggttgagyggyggtagyggagatttygttygtagatttygtttygtygtygttatttttygtyggttyggatgaggtttttttagttttgggaygttttgtttttatatttattatttttttattttaggggtgtagyggagttttagttaygaattatttaatattygtaggttatagagygayggaggttgaggttgtgatygaattatygaygtttttttgaggggtgaaagtayggtygtggagattttaatygagtttaygttggygtaaaaggtaaaagtygygttagatttyggatgtygttttttttttttyggttgygyg

SEQ ID NO: 6007 - DNA, 511 bp, synthetic construct
  misc_feature 1..511: note = Description of Artificial Sequence: Synthetic polynucleotide
  source 1..511: mol_type = other DNA
tyggagtttggggtygggttttttttatttgygtgttgttttygggtttygtttygtttygtttyggagggatttttaggtygggtttagatttaggagttatttggggatttyggggtggttgygygtygagggggygttagyggggaygtgagttggygtygagatagtttyggttttttagygttagggttattgttaggagattttyggttagtatttaygtggggygttttygggagttygaggggtttatygtttgtygggattygttattttaaagyggygggtgtygtygagtygttggagttttyggattttaggttygtttygtygtygagtatgtttagtgygagtygtygtygaaagttttttggaataaatattygtatttggggtttggygggttaggaggtgtyggaygggygtgggagggggagagygagttggygyggtttaggygttyggyggttaggtttgggtttgtttgygtttaaatygaattagagyg

SEQ ID NO: 6008 - DNA, 417 bp, synthetic construct
  misc_feature 1..417: note = Description of Artificial Sequence: Synthetic polynucleotide
  source 1..417: mol_type = other DNA
tygygtygtygttttggyggggayggtgtagtaggyggygggatgyggyggggyggtagtttgagygtttyggatggttygyggyggggyggtttgtaagagygaygygyggttgttgttggggygggaygygttgyggtyggygttygttttgttggttttygtygtgttgttgggygtygygttyggtttyggtttyggtttttggtttggttgtygygygggtygttagygtaygygatattaggtgggtyggtygagtagatagyggyggggyggggagygyggggygygtggtttttgggttttgygggttyggagtttyggttttgygattttttgagtttggttgggaatttygtaygtaatygtttaggygtygggttttttttttgttttaggagggaggtggyggyg

SEQ ID NO: 6009 - DNA, 1748 bp, synthetic construct
  misc_feature 1..1748: note = Description of Artificial Sequence: Synthetic polynucleotide
  source 1..1748: mol_type = other DNA
ayggaaatattygaatyggtgaaatgtaaatygtgtttattgtataagggaatygtgtagggagagtygttttttataaggagttaattagygtttgtttyggatattttygyggggtttttagyggggtttaaattggyggyggtttagtagggggygaggggtgttgggaaaygtyggggttgygaatttayggaagaaaatgtattyggtgtagttgttttagattttgtygtygyggtattggttgaygaaggyggyggtgttygaggagttataygttattatgtggaagtyggtttyggataggygattaaaggtttgttttaagtaggtgaatttgaggtagaagygggaygtgtattttttyggttgtyggtyggggtygyggttttygttgagygtgttttygaagatttttttggttagygygatgygttygtatattatgatgygygttataygtyggaatttggygtyggtttggttgtygygtayggtggtgtaggagtttyggtagtttagygtgaggaagttygagygtttgttttgygygtygtygtygtygttattatygtgygttttygggttygagggtayggyggtygtygtttygygtagtagtagygygtygttgttattttgygagaygttgttttttaggtygttttggtagttttygtygttgagagagttttgtttggtgattttgggygatagtagtttgattaagtyggtgagttggaaatattyggtttygygtagtagtygttttttttyggggaagtgtttyggtagygygagttgtttgtttygtagataatttagtaygtatttgaaaaggaagtygtttyggtygatgaagaagygygttyggttgtttttgggtagttygtttyggygtygggygtygttayggggattagagggygagaatatgttggttaaagtattgttygggaygttgagtagygtygagtgtttggttatataaatttggtygtttaygtttagttttattattttagggaagggygagggtgygtagggtttyggggyggyggyggtygaygygtygggygagttggaygaggaaattatttygttaatgggtaggatggtgttgtygtygttgttygtgttttttagagttatagttttttygtygtyggtttagtgattygagagagttgtattttttygttttyggagttygygttttagtttttygygtgtttttggygttttgygttttyggattgggyggygygttttttygatyggggyggtttygtttagggttyggggtagyggyggygtyggyggygttygagttttatyggaggagagaygygygagagaggagtttygtyggtgyggyggyggtaatggagaggtaagaaggagttgttgtttttttggggygagggyggggaagtgtgagagagatttgygagaggttttagggttgttgttyggtttttygtggggagggygggaggaggggtygaagtaaagaaaattygtygtttyggtagtttgtaagygtgtygygaggtyggagygtygayggtggygttaattatttttggtagtaygggaggaggtattgaygttaagtttyggattgggattygagttttagttgttatttaaagagataggttgtagtygyggttttygggtttygaygttagggggyggggtygagagtygagtttgtaagaggtgtagtttttygattygyg

SEQ ID NO: 6010 - DNA, 1748 bp, synthetic construct; identical to SEQ ID NO: 6009
  misc_feature 1..1748: note = Description of Artificial Sequence: Synthetic polynucleotide
  source 1..1748: mol_type = other DNA

SEQ ID NO: 6011 - DNA, 648 bp, synthetic construct
  misc_feature 1..648: note = Description of Artificial Sequence: Synthetic polynucleotide
  source 1..648: mol_type = other DNA
aygaaaygttgttatatygagygaatgtaaygygtatataygtttatattygaatagtataagtaagagatyggttgggtgtggaatagaggygtatatygygtaaygtatttatagtatgtataygygygtatttygatttygttttttttygygygtttttatatttyggygtttaagattttyggtttaygaattttattagatagtygggtaattttttaggtgygtagtttgttatttyggygyggtygtttttgygttttagygtttttttttaygtygttttttttagtygtttgyggygtyggagtttagygtaggttagtttagttagtttygtygtgtatayggtgygtagygtgggttyggggttgtyggtttagtygtttyggttaygtgtgagtygggggygygggttagygygatgygggtaggagttgyggyggygtyggtgttgtygtttggtttygyggygggggtyggtgtagaggagataygtagggagggagggaagagaggagggaaggaggagggagggggttagtyggggttattgtttggatagttgggygtyggtttttttaaaggtggggttattygygttygtaygtatattagttygaatttttattttygatatagtyg

SEQ ID NO: 6012 - DNA, 863 bp, synthetic construct
  misc_feature 1..863: note = Description of Artificial Sequence: Synthetic polynucleotide
  source 1..863: mol_type = other DNA
gygtataggaagggyggaggyggtattygggggggattgtttttagaggaggtygttgtgagtyggygaygygaggttgggggagtgggaggtaaattygttaatttgtygtygaatggttatttttagtttttygtttaygagggtggaaaggtagaaggtttgaaggtaaggygtgagggagygtttaggaygttttyggaggggtygggtyggggtttgygttgtagttygtaygtattttattttygygtygyggygttyggtygttygtttttttttttgggttttttttggtygtygtygtttttttttttttagtttttttttttttttttttttttggtttttygtttttatygttgatttgttagygtttttgttygtttttttttyggygttygttgttttttttgtagygtgtttttygtttttatttyggatggggatggggtagggggygyggggtgagttattaattttagtygtttgtttggtygygtaaggygggaaagtgggggygtttttgygttttaygttaagtttagggttaygagtatttttgtggagatygggagyggttgggttagggatgatgttttttttttttttttttttttttttttttttgttttygttttttttttgggttttttyggggattattttttatttttygttagagtygttttgggagagtygagggtttgagggtygattattaagggtagagtttattttttggggagttgttggaggagataggtagygtygggaggtggtttatatygtatygtygagagygttttgttttygtatygttgaaatttaattayggttataggttataaygttaggggtyg

SEQ ID NO: 6013 - DNA, 1288 bp, synthetic construct
  misc_feature 1..1288: note = Description of Artificial Sequence: Synthetic polynucleotide
  source 1..1288: mol_type = other DNA
gyggattygagagyggygattttygtttggaggtygttggtttttatatttaggtataggtaagatattayggttattattgataggagggtygttaggayggtataygggggtatggttygggtataatgttgttyggtaggggtygggttttyggatttgggttttyggtttttttttttttttgygtgtttttttagtagtatygtggyggggtyggtygtttyggtttygttttttattttttatattttaaataattttaaaaggaaagaaaaaggtygatttttttaaagtttagtttttgtggttgtataattagttggtggagttaagtttaygagyggatayggatttttgttttgtttagygtttagattygtaggygtgtattattttygtttttttttttttttttagttggaagtgaaaagtatttttygttyggggattgggtggyggtggggtaaaaagtaagaygaaatttatttagatagttttttygatttttagaggatygatatttttttygagggttttaatagtggtygtttagggttygagggtaayggtygaggygttaygyggggtygyggttygttttggttayggaggatyggatttgttgygtttttgtgagtttgttttatttttatttattyggtgtttttyggtaygtygatttgttttttatttgtatttagtttaaggtaaaaaggttgtgagagtaygttatagygtagygygaaaggggygattaaggtggagaagagagaggaaaaygaaataaatttaaggaattaatgttattygygaagtygaagtygyggttgttygaaggattttygtagtttygygtgygygatttttaaatatttttygygatgttygygtgagtgtgtgtgtgagtgtgtgagtgygygygygtttygagtaygaygtttttttttygattttttttyggygttyggygttyggtttgtygttttygttgttgygygtttttttttygaaggtaaagtaggagttygttttattattataatgtatttattttggtttagttygygggtyggttyggggaatttttaagggaggygggaagtttgggtgggagyggggtaggaggtttgttattagtataatgtatgtaaatagttggagyggttatygtgattggagaggagtttggygatttttttttttgygyggagtaattttagtattttygagggttatttttttggtttgggtyggggtygaagyggggtyggttgygtaagaggyg

SEQ ID NO: 6014 - DNA, 1275 bp, synthetic construct
  misc_feature 1..1275: note = Description of Artificial Sequence: Synthetic polynucleotide
  source 1..1275: mol_type = other DNA
aygyggagtaaaatttaatyggtttagggaatttagataygtttttygygtygtayggattttttagaaggagtttggaggtaggygttggatttttttaggtattttygttttygtyggtttttttttttygygttygttgggttatttattygygtggggtatggtgatggtttygttggtgttggagtttaygttgaagatgattayggttgaggygttttgtaggaaygygtttyggattttatttttgtaygtgtagttgtttttggggatgagggttatttagtttttgtygygggtyggggyggygaatttggtgttggggtygtaggttaggyggtygtgggtygagttggttatgattattttttygygggygttttgtttgggygagtgtttttygtagygttygtatttygtttttttygtgtgtagtttygygtygtygtygttygtygtttyggtttyggggttyggygygggttyggygtaggtgatgtttaygaaggyggtgtattatttttttttttyggttayggtaaagtttaggtagagtagatgtaygaaataaaaggaaagtagttatgttgagagagttagattgtagtaygtttggatgagagatattgttatttttattygtyggggtttttttttygttttygygtttttttttygtttygttttttttttttagtttyggttaatttygggtygttgtttttttttttgttgttgtttattttygggtyggaggggtygyggtygggaygygtagtygtygyggggatyggatttygggygagyggatggygttggttttttttttttttagttgtagygyggtggttgtattttgttttttgggygttyggggggygygggaatagagggttygyggggtttgyggaggagttttgttgtygagygttttgttttttygttyggtttygtttttttttataagggtggtygggggtttaygaatttgtagggtggyggttttgygttttttagtttyggyggggaygggtaygattgttygtagtttggggtgttgyggtgyggggtgttgtttagggtgtttyggtygtygttattgagygttggggygygygaatttagttgtagtygttgttgttttgygtyggtttttttaggttgygggygttgygtttttgatttygtyggtggttgygtttgggtaygtatttgtygygggyggggygggtttggggatagtgggagygagtaggtagagyggagtaagyg

SEQ ID NO: 6015 - DNA, 1071 bp, synthetic construct
  misc_feature 1..1071: note = Description of Artificial Sequence: Synthetic polynucleotide
  source 1..1071: mol_type = other DNA
gygagyggtggttygatttygggtgtggtaggaaggggtgtttygygttttagagttagtgttagtttttattttttygggaagtygagatttagggggaataggttttttagagtttagtttgtagggaygyggagggtaggagtygtyggygaggagtagttaatttgttatttttggyggttgtatttttyggyggttataggttgttygatagyggattttagggttttygygayggtatttagagtgtttagaagggaggtyggggtyggggtgggtygggaaaatygagggagggaaggagtttggagaagtttygtttaggyggggagggggygattyggggygtatttttygattatgatttttatagattttggygtygtaatttgygttttttgaggtygaagatgygtattttggagaagatatttattaggttgtygttgtagagttygyggtttttgttggggttgtttygttttttgttggtagayggtyggttttagtgttgttttygygtttgtygtttttggyggattaagtygttagygatggtygyggttatggtggtttygggaaygggttyggggagggagggygygggaggayggygagtygggggtatyggaggggaaggyggyggygtagatygtggttygttttyggggtagaggagggggtgttaggygggattggggagaggggaaggggggtttagttttgatygggatttatygtttttttygyggggygyggggttaggygygtagatgygtttagggygtagtyggaygatttygggaagtyggaygtygtggtygtygtygtttggttaygttygagtggagagygggatygyggttgygggygttgttggttatygttygtygtaggaatttyggygggggtygttatygttattygygttgttttttygttttgttyggttttygggygggaggtagagtyggtyggyggtttttygggygtyggttggagggygggtttyggtagggtttttgygygttygtyggttygggtygygttgggtaggatttagygtyg

SEQ ID NO: 6016 - DNA, 694 bp, synthetic construct
  misc_feature 1..694: note = Description of Artificial Sequence: Synthetic polynucleotide
  source 1..694: mol_type = other DNA
aygttttygaatttyggattttagttgttattttatttgygtygtttyggaygttatttggttgttgaygtggtttygagttagtaaataaygttagtagtttttttagatttaygtyggttygttttttygtyggtttttttttygtagtggttttttttgtagtttttttgggtttygyggttagtagtgtagttygtggagtygyggttttgttygttttttttgggtggttttagtgygygggttgatatttatttagtyggggaaggtgaggygagtagaggttggtgyggaatttgtygtttttagtagygtyggygggttaagtttagggtygggtagataaaagaggtygttygygtaggaaggtayggtyggyggyggyggagygtagygatggtygggygagggggtagygygttgttggttttgtgyggggtattggttgtttgygggtggtttttgggygtygaagtttaggagttyggggygttygyggygggtatgaggyggygtyggyggttgtagtaagaggayggtatttttttygagtattatygttatttygagttgygygaggygttygtgttygtgtggttgtagtgtatygttattagtaggatttatayggtggggygtagtttygagggtygggagtttttggttatygagttgttygataattttggyg

SEQ ID NO: 6017 - DNA, 694 bp, synthetic construct; identical to SEQ ID NO: 6016
  misc_feature 1..694: note = Description of Artificial Sequence: Synthetic polynucleotide
  source 1..694: mol_type = other DNA

SEQ ID NO: 6018 - DNA, 1424 bp, synthetic construct
  misc_feature 1..1424: note = Description of Artificial Sequence: Synthetic polynucleotide
  source 1..1424: mol_type = other DNA
tyggygggtaygttggggatgtattygygtagttyggygaaggygttgttgatgttttgagttttgygtygttttttgyggttggyggtgtttyggygttttatygggygyggtttttttaggttygggggttyggygttyggyggtattttttygtaatgggagtggtttaggtyggyggygtygttggtatattyggggttgtaggatagggttatgttgtagtyggggggygatatttyggggtggtygatgagttagttatggaagtaggggttttttttatggttgtagyggttggyggyggyggyggtagttgyggyggyggyggyggtaaaygggtagttttygtggtgtattatygggtggtggggaaaattatttattagatttatttygtttttygygtttttttaygygttttagygtgygygtagtttygtygygttttyggttygggtttttgttttagygttyggygtttttttttattttttattttttagttttygggygttygggttygttyggtagtygtagagggggttgttgtagttygggtttygttttttygtttggttagtygggttygttttagtagygttgyggtygtyggttttttatggggygyggygagttggttttggtatygtgygtttttggtygtygtygtygtygttttyggttttygttttgttttayggttygygtttyggtttttgtttttygggttgttgygyggaggtagaattttttygtgtttatataaaggtgtyggggttttygygaggttggtaygyggagtttygggaatttaagttygggtygyggttttggtatygaagttaattyggaatttaggggygagtttgagtygyggttggaggagtyggtttagttgtgtyggggggyggyggggtygattgtttattgtaaagttattttygtgygattttttttttttygtttttttttttttttttattagttygatttgggtttttgggygtttattgttttaatgaaatttttggttgttgttgttttggtttttaaatgtgattttagttgygagtaaygtgttttygtttttttygygttttttyggagggtttttagagaggttttagtgtatttatttttttagatttttttttttyggggtaaggatttggggttttgaatgagttttggagttygaagatygyggttygggttttyggagggttttgygyggtggtygaggaagtttyggggtgayggyggtggtttttttgggttggaygaygtgaggggagtaagyggatttttttagtaagatttttatgtatagttatatttttagggtygttygggttaatatatgtygttagaggttttttaygttaatttyggggyggtaggggyggygtttygagttttyg

SEQ ID NO: 6019 - DNA, 1215 bp, synthetic construct
  misc_feature 1..1215: note = Description of Artificial Sequence: Synthetic polynucleotide
  source 1..1215: mol_type = other DNA
tygygtaggttttygggttygtygtagattttaaygtaaattttygggtttttygtaaattttaaygtagatttatygtggtttygttygygtygggtttygygttygagaggtygagttyggattygaaggyggyggyggyggygggygtttygygaggattygggagtagygtagyggygagtagagaataygttatagagaagaagtttagtaagtgtatggtggaaggatygggggtgggggatyggttygttggygggggtaggggtgggggygygggygtttttgygaggtygygggttttttttggtttttttttttygggtttttttyggygattttttttgggygagtyggaggyggygggagygggttyggggtttygygtttttaattttgtagggygtttttttagttagtgtyggggaaaggyggygggtgttaggtaaaagttttataggaaatyggatattygagtttttygtattyggagttygygaggtgaagygagggygagggaggaygtygtygyggttygygtyggtgtagttttttggagaggyggggygggggatattagaatatttygygatgtttagtttttttaaattygttagagttttygtttttttttttttttttttttttygaagtgagaggagtygggtygygggygttgyggygggggygttggyggyggtgtygggggygggaggagggyggyggggyggttggyggyggyggggttygggagygtygyggygtaggattttttagagygygtygggttgagyggyggyggyggyggyggygggygtaggggtagggtatgattgaygygttttttgtttgygtttatgtgagagaaagyggtygagggagggagygtgtygagttygggttgttttttttttttattttttttyggaagtygtttttttggagtttttygtttttttygtttttttttyggyggttttatttttttyggtttttttttggattttttttttttygtttttgttttttgyggggagygggyggtyggaggggtaagtttagtttyggggttggyggttggygggatyggttttagaggtgatgygattattttggattaygtgtagyggggagaaattgggtatygtggggtggagggagttttygttttattttyggttattttygagtttttgttttttttttygtayg

SEQ ID NO: 6020 - DNA, 1184 bp, synthetic construct
  misc_feature 1..1184: note = Description of Artificial Sequence: Synthetic polynucleotide
  source 1..1184: mol_type = other DNA
tygtttttttttttygggtygygatattgattygttaaygttaatgggggttygygattgttgyggggaygagggygtagagtagttttygttaygggtyggtttaygtaggggtygagaaagtggyggagaggyggtggtygaggtttaggggygagygygggttgagttggtttttgttgygtttaygagygatatttattttttygttgyggaygtttygygggygttaggttgggggttttgygatygatttttttygttttygaggtatygtygggttygtttggtaggtagygygtttygygagttggagggtygagtttygyggggtygtggggygtgtgggtgaaggygatatttyggatgygggaygtatgaatggtggtagagtaggggtygggattygtttatgggttgggagagagatgtttttgtgagtaygggaaagtagygttgtyggagaatagttttgaggygggattaaaagtygtyggygaagtttygtygaggaatayggtygttgttyggggyggttygygagygtgygtgtgtggaggggaggatgtygtttygyggggttttyggagggtgtygggagygggtttttagtgtagttttttygttttygttgggggtayggttgtttataggtttyggttygygtgtgtggagyggggygagggggtgaggygagggggtgaggyggyggtygagtyggggygttgggygyggggttggygggaggyggyggtggyggttyggygygaaggggttaagyggygtatygttttttyggyggtygggtgtaaatagaggagttttagtttattatgtttggtygtygygygtagttygagttyggagttaggygttgtaataygataygttttagatttaggtaatttggtagygttgggttyggttttttayggttatagygagggygygtygyggtaaggtgggtgagyggyggyggyggyggyggtttggggygggttggyggagygyggttttyggtgaggtttttygygyggtagggtygttygttygtttyggggattgyggyggtggyggtggyggtggtggyggyggyggyggyggyggtttygttttttttttttgtggtgtyggaatgggaggaggttyggygygggtttgaatyggtgyggaggtaatattyg

SEQ ID NO: 6021 - DNA, 5820 bp, synthetic construct
  misc_feature 1..5820: note = Description of Artificial Sequence: Synthetic polynucleotide
  source 1..5820: mol_type = other DNA
gygagtagaaggyggaygttttygagtygtaggttaygtagttgttatagttttgygattygttatagggatttttatagaygtttagygtygyggtygagttgagttygtggygygyggtggttagtagtyggttttygtagatygggtagtagatyggygtttgggtygaggyggygggttyggagttygttagygtgyggttttyggattygtagtaygtgtttagggagttggtggttattaagaattgtagagagaggtygygaggattggygggaagtygggttggaggttggggttttgggttttgttaatttygygygtygtttaygagggygtgtttygagtattttygggtttttygtygtttatattaggatgttygtttttttttattagtttgtgygygtttggtttttttygttaygtggggtttagtygagtatttatattttttttyggagggtttttaaggtttttgaygttatttgygygttaagtttttttttttaggggttttttggggttttaggatttttttggggtatagtttgagttttgtggtttaaatattagggaattygggttyggttygtyggatttttttagygtttyggttttttttygggggtttggggagtaggggttgggygtgaggggygygygatttaggttttgttagttyggaagtygtaggtagtygtaggtyggatattttttatttttygttttygttttattygttttatyggtatttgyggtggtttgggyggggyggggtttygtttatttggggagtygaggagtaggggtatttaaattgygggtaggatatggygggygyggttyggggyggaygggyggggtttgtagggttttgygygttggggtyggygtggygyggttattgtttyggagttgtaggtttttaggygttgggagggygaagtaggagagtyggttagtttattttygygtttygtaaatttttttaatygggtaataaagtgagtagyggtggtygtygygatttttttaatttygtatttyggaggttygagggggttttgggatygagyggtttygtagyggygatagaaatatatattttaygaaaaagaaaaaaaaaaaaaygagtygygygaattygttaagttagatgtgygyggtttgaagyggaggaggttttgaygttagttttatttygygtagttyggtttggtygtagattygtyggttattygtyggyggtttaggtygggaggggttaggatagtttyggtygygyggtggayggaggggttattttttygggygttagtaaataaattttattygagttaatatygtttagygaayggtgtttttttttagttattygagaaygagaggtatttttaattagaaattaattaatgagtagttgttttttttygttttattgtaattattygttttaattataaatgagatttatgaaaggataygttgaagatgtaattaatagttaaaattagttyggygttgygtaggyggtyggttyggtttygygttggygygttttgtttygagtggtaggaaggggttygtaggygtttygtaygygtttygttattattgtttaatygagaattagtaaygtttttygtyggtttttattttaygtyggaatggatttttagaatttattgyggtygtaagatagttygtaagagttggttaaaatgtttttaggtgygtgggggtttyggggttttagttggagttygatattttgagattggyggttygagggttgtagggtygtttygggygtgygtttatyggttttgtatttttgggtagtygagtgtygyggagaaygttttattttttttatygyggttttttaagttttygtttagtttatygtttttatttygttttttygattttttttttygatttttttttygtyggtygtgtttygtyggtttttttttgtttttygyggttaagtyggggattgtygggyggttttgygygttyggaagagtaggttttttaatttaggtttyggtttttttygttaagttygtttttttyggygtttygtagggttggttgygagggagggggygttgggtgtttggyggaggygtttttttttgtttattttgtttagttttttgtttggggygtayggagtaatyggaagaggggatygagygtttattttaggattttttyggttagtattttttttgggattttgtttaagtttaaagyggaggttagtgagtaggyggtaagggggyggtaagggggygttygggttatttygaattygtttttygttttttgygttatygtttttygggatygggattygtttyggttgttttygttttttgggtyggtttttygtggtaagttgggaaggaagtygtgtaaggtagygttgtgtagatttgtttagaaagatttttgggtttagatttgtgaatygttttagggttattttttaattaatgatgaygttttygttttttttttagttgtaagtttgttttttagaaaygaaatttgtttgtttttttgatagttyggttgaaggtgattgatgattatttggagattatagtatatattatataatatttgttgygtaattgttttaatttatagatgaaaataygagtttttygatygygttggatyggagygggttaygttygagttgtttgtagagggaaattatyggaaataatgaatagtygttttatgtaaattatttagatagtttagygtyggtagtygygagaaatatataaagaataygagttaaatgatattaataattgtttttgaattttgtattgatttygyggtaggtygygttttttttttttttatttgaatygttaatattatttttttgtaaataataagaaattagttatyggggtttttygttagaaatgaattttttaatttttttttttttttttttgtttttttttttttttatttttttttttttttttttttatttttttttttttttattttttgtagttttttggtttttttygagtatttttttattttttattatttattgtttataaattattygttttttttaggtaatgaggttyggttgaaggaggggtgtgagtttagtygggttaagggttgggatggggagtagagatttttagaggggaggtatttagttgtggtttgttttttttttatttatattyggggatttggtttyggygattgtgagtatttygtyggttgagggggagagttagggtttaggggtttagttatttatgttttgtatttttgggttttagtgtaatagtttagtttatttagatttgaggttggtgtatttttttttttttagattyggyggggtttaattggagtygaagttttagaataggyggttatttattttttgagtagagtttgggagaagtagtttttattttttagggtagttagtaygtgggggttttttygggggttttttttgattattatygttatttttttttgtttttttttgtttttttagtttgtgtgtataaatygaygttttagtttttattagygggygatttttttttygtgatttagaaatttggtttttgaatyggtttttttaggtygtygtatatataygttttattttttgttygttagtaggttttagygtttggggttygggtttagttatagttattttgtttygggaagttygtaattgtttaggaggttttttgattygttyggttttatttaggttttattatttattttaggatatagggttaatttagtttgtggattggygattatygggatattttattgaaattttgtagtttggtttaggttygtttgtttaaatyggggatttttattgggttattttttttttatagataatattggaatattttttaagtgtttttattaaaaggttaagtttggagyggaggtatttagtgttttttttattaaygataggaygtttagtattttaggtattagttgaaygygtttgtatagattyggagtgttgagtttttttttttttagggattttyggtattaaatatattygtgagtaggtgggttagaagttagtyggttttyggagtatatagtatyggtttagtttyggggagatgaggtgttttygttggtttggagygtttygaagagyggaggattagggtyggagtaggtygtaggggaggtaggggatggttagtttttaaygygaagygtaggygggtygtttattttgayggggttatygttggtygtyggaattatggaaggttttyggggagataggtygggttttgattttttttyggttagtttagttttggtgttttaggagttattttgggggttattagtttttygtattaagagttygttyggagggagttttttttagtttagagaagttaattttagttaaaggygaagtygggagttyggggtattaggtaagggtttttttttttgagatttggggttagagattttgggggygtttgtgttygtttatygttygggatattyggttggggtgtgggtttgagaggttttayggtygttgaygtygtattggygaatttygaggttggtaggttatttttttatagtttygaggttttttyggagttagtggtaggagaaggagttatagggataagyggtgaatttttggatttttaatygttttttatgggggttygyggtttttttttttttttttttygttgygttttygtygtttgttttttgggtayggtttgaggttggayggagygtygttygggygtttaggatttaggtttggttatttygagttttttatttttygtttygygtyggttygygtattttgtttttygtaatttgtagtaaaygtagyggtttttggagagtttagygaygggtagtaaattttgtttttttaagygtaagagtaattttygtaaagtttgtgyggyggagtttattttttatttgagttggggaagttttygttygygtygtgtggttgtyggggtygyggggagtagttygtagttygggaygtatyggggagtygtygtagtygtygtygttygtttttttyggyggtygygyggagttttygttttttyggaaggggggaggggtttyggaatttyggggygggggygggagygggggattttatttatttgyggtggygttgggtygttttyggtagttygygagggtttygygyggaagttyggygygygygttttagyggggagtyggygataattaatggagatatttttaggyggagtatttggygagyggagygygtyggygtttttaggygtygyggtygttagtygagttygtatyggygtgaygtgggygagygagygygttgtttttattyggtygtttattaaygttttttttygygggygtygygtttttgttaattttttttttygttyggtttgygygyggygygtygggtgtaggagttggggtgagggygtttygggtgttagtaggggygttgggagttgtttgggyggggaygtagggtttygggaggttatatagttttaataggatagtgggaaggygygygagttagatttggttaaaygttaagttygttgyggtttygggttttyggtttayggggttttttttttygtttgggttgttttatttagggaygtttgggtygggygygaagagttyggaaatagttatttttgtygtyggttyggttttttttyg

SEQ ID NO: 6022 - DNA, 1233 bp, synthetic construct
  misc_feature 1..1233: note = Description of Artificial Sequence: Synthetic polynucleotide
  source 1..1233: mol_type = other DNA
tygygttgggttgygtttttgtaggagttaggtttttttatgttttgyggygatagtygttggggtggggttayggggaagtygygttgtttttygtttgagygtgggttagggtttaggtggtgattaaggttyggygtagtggtttyggagygtggaggggtagttgttgggyggtttttygggggagggtgayggttttattygttaaygttgttttttttttgggattaggtyggaggaattttggatygttygaggttggtgtttagttttttttttttattttatttttattattyggygattttygtagatttgattggtaggttttgtttygatttttatttttttaggttttygtttyggtgtttyggtgttyggtttygggttatttttgtaggttttgtttagggtagtyggyggtgtttggaggygggttygtttyggttgttttaygtttaggtyggtttttggtattttagttagtgggagggygttttygtygttttygtgttttttygtaggggttgygtygygttttygggttttttttttygtygtggtttggtttgtttgttttagggygtagttgygttygttttagygtttttygggtttgygtggtttgttyggtttagaggtttttattayggttygttttttgtyggaygtygygttgttgtggtygyggtggttttgtggttgtgagggtygtttttgttygtttatatygttttttttttgtaggtgaggaatggggtttgtttygtttggaatgtgtttttgtygggttttgtttgatttttattttttagtygggaygygygagttttttygtttggttgagttaaaaagggatygygygtatttygtygttttttattaygaagygtagatataggaggttgtagggttagtgttgyggagaattttagayggttttatagtygtygttattygyggggtattygttygggttttgtygaggatgtgggggttttggttttygtagagttgggattttygaaggttttattagaaatttaggagtagttttagttttgtagagttygygagggtggagaygggagattygttgtggggtttgaggttgagatgtyggtttgyggtgaagtyggygggaygttttaattygtttagattygtttatttygtagggttygggtttatttttyggtttgtggtttgtgttgggttgygtagtyggyg

SEQ ID NO: 6023 - DNA, 2865 bp, synthetic construct
  misc_feature 1..2865: note = Description of Artificial Sequence: Synthetic polynucleotide
  source 1..2865: mol_type = other DNA
gygagttttagttygttgttygtttagagtygtttaggtgygagggygtttttattagaaatyggtgttttygygygttttatttttyggggttttgtagatgtygggtygggggtygttagtaggttttttggtttttgttggagatattggaagattaggygattaggatagygggtygggttagtgyggtgtgataygagggttygagyggtttygtagtttaaaygtgtttttattttatattttttayggttgtttyggattyggtgttttygtgttttttagtttgtttagyggtaygtgggttttaagtttggtttttagyggttgygttagtttagttgtgtttattttggggtygygagggttttttatyggttggtagttggtggataygttgttaagatygggggaaaaaaaggaaggaaggaggttagggggatatagggttggtggttttygtagtttttgatttgygaygggygygagygtattttygygtttttgygtagagatttttttttaagattggtttaygaygttttttatttygaagttaagggttttttgtggtaaatttttataygtttttttttttttygtttattttyggygttaggattgayggggagagggtaaggtygggttagaggggttgtgggtttggattgyggttgtygttygyggttttgtttttttgggtagttagaygtggggttagygtttagtygtagttttygggggtgagttygtagattttygtaygtgatataggttaggtatggggayggggagtttttygtygttygtttttatttagatgttttttgaggtttyggaatatttygttttttattttaggatttgattaatttttaagttayggtyggtttyggtttygygagaygggggattttgaggattgttttttttttygggttgggatttttttatagtagtygatygtttttagtttagagtggttyggttygtagygtttttygggtataggttttaggtggayggtttygttttygygttyggtttttttgttygttaagygtttyggggatttttyggtttttaagyggtygyggtygggtggagttagtttygaagttygggatttttygaagggagaaaattygttttgtttttttgaagyggygggagaaatyggttttatttaggttygggggttygaygttttyggyggaggtyggttttaggggttygaggttttygaagttggaggtyggtttygtttyggygttttttygtygttattttygtttttatttygygggtyggyggagggaggggyggggtygtttgtygttygygattygggttyggtttttttagtgattgtttttgtttttttygygttagttgtttttagttttggggtaaygttgttaggtgtttagttttygygttygagagagygtttgtttggttttgaattttggttaggaaggggygygaggggaaggtttygggggaaggygtgttttygygtttygtttygtttygtttyggaaagttttygyggtttygtttattttaggggttygtttagttttyggagatttttttttttgagygtagtygtttggtgtyggttttygtygagttggagygygygggttayggtttttttggggaygtagaagygagaagyggggatttyggygygygtttygygtttygttttttttgttygygtttyggttttyggttygygtttyggtygtyggtatggtgttgttggtygggatygggtyggagggyggyggggygygttgtatgattttattatygtygtttttatttyggggygygtaggtygaggaggatttygttgattaygaagagtttgaggatttttygagtttgttagatattygtagtatygtttyggaygattttttttattttttygaggaygaggaggagtayggygtygagagygyggagagygtttyggagggygtttyggaaagygtttyggagayggygatttttttgygygtygtttgygttaataaygtggggttgttgyggaygttggtgyggygyggggtgagygtygaggaggygtaggagattgatygtaayggtagggtaagygggygttttygtaggatttgagtttttttattgtttttattttttttttttttattatattttygygttttttagtttttggtttyggatyggtttttyggttatttagtygtygtttagagygtttttttttygttgtttgggagygyggtgttttgggtggttttttygttttaggttgggggaygyggtgyggggagggagtagtygaggtgttagygyggtagaaaygttagttyggygtttttatygtatttttttttygtttatyggttttygtggattttttgattgaattygygttggttgttygtgttgtaatttaggatgggttttttgyggttyggtttttttttgattattatttttttttaggtttttggtaggggattatttttttttttttgtaggagatagttttttttgtttagygttttatttggtttttgggtttttygygtygtttttgttttaataygttggggygtagatyggtttttttagtygtaatgatttggaagtaatagttttttttttygtygggatagtttggttttttattttattttygttgagttttgtggttygygtygygattagttaaygtgatttttgattggtttgttygtaggttattttygygagttaatgttagtyggggttttttagagttagggtatagggagagttttagagtygygggtatttattygggtagggtaggaggyg

SEQ ID NO: 6024 - DNA, 1154 bp, synthetic construct
  misc_feature 1..1154: note = Description of Artificial Sequence: Synthetic polynucleotide
  source 1..1154: mol_type = other DNA
tygttttttttygtatattagggaygttatgaatgtatygagtatgtttttagggtggyggggagtagtattgtyggtgttgttttaaataygttttttttyggggagatgggtggtagggagggggagtaygtagggtagttatttggtaatygttttaagaaaggtattaatttyggatttttttttaggtatagyggttttygagggggatttggygygatygyggtttttttygaggtaggtagaaatttygtagtagtygtygtygtygtttgtyggtygggagtttaggattatttttattagyggtaagaggaggaggayggygtygggaggaggttgygttyggtttyggtygtttagtttygtaatttatttaaaggygyggygttyggyggttttttygtaaatatgtatttttygtyggygatagttttttagttygggaagaggygtgygyggygtygttyggttttagggtaaggttttgattttgtttaattgtagtatttttygtttttgttgtttgagygyggtygygggataagggatgttggygggyggtaggggygagygtygygggygagaggyggttttygaygygagtgygtagygttyggttyggyggttttttygagttyggygagygtagygttttttgtttggtttygygggttttaygggtttttgygggtttttyggggtttygggygtygtygttagtyggtygggttgagagagtagtygtygygttygtagtttygtttagtyggttgtygtygygggygygagtttggggtygtygyggygttyggygtygagygttttygagttgygtttygygygyggttygygttatttgtgtygtygtygttttagtygtygagggygaggtttttttygyggygygyggtagttttagtttttatttaaatttyggyggtyggttygggygttyggttagtgagggagygttygtttygtygtygaaatyggtttygggtgyggagtatgtttagtgtygtygygagagyggygtttygtygygygygttttattttttttggttttygyggtagtagyggtagtygygggagagaggggaggaggtygygggttgggagagggtygagtatttttgggaaygtayg

SEQ ID NO: 6025 - DNA, 1154 bp, synthetic construct; identical to SEQ ID NO: 6024
  misc_feature 1..1154: note = Description of Artificial Sequence: Synthetic polynucleotide
  source 1..1154: mol_type = other DNA

SEQ ID NO: 6026 - DNA, 396 bp, synthetic construct
  misc_feature 1..396: note = Description of Artificial Sequence: Synthetic polynucleotide
  source 1..396: mol_type = other DNA
tygttgggaagggaaaaayggtttatatygaattggatgtyggatggaaatttttttgygttattagattgygtttagtatagtagatggtaygagtaygtgyggygtttagtttaggttttyggaggtagttgagttggaaatttygayggaaagtatttataagtttttattttgygttggtttattygygtgtaygtttattttttaygygygtttttggtttagaagygtatagatgtttattgtttagagtyggtatygttggggagatygagygatttgygyggygtatagtgyggygttggtagggttttgggttttyggtygggggttygagyggttaagggatgggggtgggggyggggagagtggggggagggygaaagatygtyg

SEQ ID NO: 6027 - DNA, 438 bp, synthetic construct
  misc_feature 1..438: note = Description of Artificial Sequence: Synthetic polynucleotide
  source 1..438: mol_type = other DNA
tygygtggagagaaatgagttggagagttatatygagttaaygygggatayggttttyggttygggtygggttaggggtgggaggyggttttttatygtaggyggygggatttttatgygtygagggatttaagtttttattttatttataygtttattyggygtyggggygttgyggtttygttttaygagtttagagtaggtygtagtttgggttggggattyggtatttgggtagggtgagtttggtyggatatttttttttaggattattygtattttatagtygygttaaaagygttttatttttttgtttttygtygygtaggttttttatygaygttygttyggaaggygagagtttttaygtggttyggygyggygyggttttyggggatygygagtaataaaagttyggttygtagtttttgtttttyg

SEQ ID NO: 6028 - DNA, 438 bp, synthetic construct; identical to SEQ ID NO: 6027
  misc_feature 1..438: note = Description of Artificial Sequence: Synthetic polynucleotide
  source 1..438: mol_type = other DNA

SEQ ID NO: 6029 - DNA, 411 bp, synthetic construct
  misc_feature 1..411: note = Description of Artificial Sequence: Synthetic polynucleotide
  source 1..411: mol_type = other DNA
gyggtggtgtygatttatttgagtagttgtttygygtttagttygtygygygtagtggygtgygtyggttggatggtttggtttatgattatttygtygggygtyggtygttttatggttagggygagagygttaygtttgyggttttygatattttattatgttygtttygttygtttygtttttttygtttagttttagagggtattggygtygttygttygggtygygaatttttggtygttaggtggtgggagttgygagtgagggggttygtattgttattttaggattatygygagtgggggaaaattagygttttygggttttaggagaagtttgggaagtgygyggggagggggttttygggtagataggtttggaaggyggtttttygagagtyggagygyg

SEQ ID NO: 6030 - DNA, 1137 bp, synthetic construct
  misc_feature 1..1137: note = Description of Artificial Sequence: Synthetic polynucleotide
  source 1..1137: mol_type = other DNA
tygyggttaaaaygtttagygtygggtttgggtttgygaayggtttagtttaggttttgygttagagtatygtattygggggyggayggttttgtagttttttagttttttttygtattaattagttgaygttygggygtattggtttttttygttttygttygtaygaaagttttgttygaygtttgtagttagtatygttygtattgtttagggagggtttgygtygagatttagtggtygagtgagttatagagtygttggttttggggaygttgttttttatygttttttatygttttttttttttttgtattttatttyggtatttygtattttttttttygttyggtttygygtattttgtttagattttataagtattttttyggggtatttaggattygaygtttttttygygtygttagyggygttygttatttttggtaygtyggagggatygttttyggttttttgygyggygttttttaggggatttttagtttattttttatttagttgttygggtttygaygttttatttttgtygaattgggggatatygaggttgagttygattaagagttagayggttatygagygttttatgatttygtttttyggaygtgatttyggttggttaggggtygtygyggagggtagtgtagtygaggtggtagygtagggtagtagtagatttygtttttattaaagaatttaagaagaygttttttttttttagygttttgttaaataaatttttggagagggygagagtggtgattaaagagaggagttttttttttttttttgtttgygtttyggygygyggaggtgggtgagtttyggggagtygtyggygggtttagtttttygttgygggtgggtttyggtagaggygyggygggyggggygygggttttygyggtygtttygggtttgttgygygggtaggtagatttatyggtagataggyggatygggygttyggttgtygttgtttttygygyggyggttgyggggtttttgatttggagaataatgaagygtgagttggaggggagygagygggtygtygggagygtattgtgtataaatagaggyggygtgygtgtgagtttgagtttggtaggygyg

SEQ ID NO: 6031 - DNA, 2383 bp, synthetic construct
  misc_feature 1..2383: note = Description of Artificial Sequence: Synthetic polynucleotide
  source 1..2383: mol_type = other DNA
tygaygtgttaaggaaagygygtygtaaggtggagygttygggttgaygatgagaaggtgagttgtgaattttgtataygtttttaaataaaaggtttaygagyggyggtttygaygtggggagtaagtaggtttttttggtttttgtagtaggyggatttaggttygtttgtygtyggatatttagaatttgttttygtagygygagttttgtataygttttgygatyggtatttttggattttttaattattygtygtttaattttyggagagagggtttttygttygttgagttgyggggttgggaaggaaaagggggaygygtttttgggggtttttggatattttggtaaagggggttgtagttttaggttttagttaaagggtttgggayggagtgggttagaaagtygttaaattgaggattttttttttttttaagtyggagttttaggtgyggagtygtttgtttatttattttyggagtaygttttgttgttttygtyggyggaygyggttggttattgyggtatttttttygygatattygggygttagaaattygtttttagagtttgttgtagyggatygaatttgttgyggyggyggttggggtyggggyggtttgggyggaggaggttgaggttggtyggtygtgttttgygtttagagtattatatagtttagttataggaagtagagttggagatatagttttygttttttttttatygtyggygtygaaagygygyggtygtagattygyggagagggagtgattaaagataaaatttgygygttttagaaaagagttagggtttaataagtttttygtyggtttyggggattttttygggttygggttttttgttttagttggagatttygatagagygtyggttttttgattgtttgygaagygagaygyggggygtygggtttagygtagtgagyggygaggygyggyggaggtgtagtyggtagtttygagyggtataygttgtataatyggtttaaagtttygagygattttaggatygttagygggygggggaggaaattataaaagttttggygtaaaattttaaaaaatgtgaattttaaaagaaaaaagggtttgtaygtagagttyggyggattttygtgygtttygaagayggatattggaaagttgtaaaagttattagaaagaaataggtaagtaaataaaagtygtttttagaagaagaggagggtttttttygggttygttyggagttttatagggtaaygaagygygggtagyggttgyggagtygggyggaggtgygyggggtyggggygtgyggttagtaagagagagggygggaggttgggygttggagaagatgyggyggtggagggygyggygygggggttttagaggttyggyggggygyggggygggtyggygggyggyggttgttagtgggggygyggtygtttataygtggggtttaattyggattgagaggtyggygtagagtgggyggggatagagtaagggagagatygggattgaggaaygaggggaattagggttgggtgaggggaagaggaaggaagggggggagggygaagggagggaagaggayggagattggggagaaggggggygaattygagaggaaggtygggttggaagagggatttggaaagagggattggygagttygggtgygagaggaaatgagygggggatgggggygaagttagggtaaagagagaagtgggaaaggagagggagggttaaggttygggygtygagaggaggggttyggggggtyggttggagggggygaggygttaggyggttttgtttttygttttygttaattggtygttagttttgttttgattgtttgtataaagygagtagayggygggggatggggygattagggatyggatttgggaaaggaggtagtagttttttttttttttttttygttttygttyggtygyggattagggattagggtgtttaagygygttaggtttggtyggattygtagttgaattgattygtagttgaattttttygtyggatagaggtygtaaggttgaggatgagaaygggtttttttgtagggtttyggtttttgatttgggatggggggattygtagttagttaggaatagaggtttayggggttgttggttgtagttttaatttaagaaggaggagattttttttttgtttttttatttttatygttttatygggagyggygttagtttgygggattaaattaggggttgggagtttttagattgaaatgygttttttattattaagagggagtttaygyggtygyggggggtygaggtagttagtyggygtygyggttttggggagttyg

SEQ ID NO: 6032 - DNA, 2367 bp, synthetic construct
  misc_feature 1..2367: note = Description of Artificial Sequence: Synthetic polynucleotide
  source 1..2367: mol_type = other DNA
gygatttyggttttggggttttgtttttgtygygggagaataggttttaatttaygaagttggttaattttagaaattygagattyggtttttgagaagygattgygtgtttygggattttgygttaataattaaatttgggagaagtygygggaatgtttttattggaygttaygaagggaattggggttttttttttgggaagaaaaagttygatttgtgtyggygagagtaggttgttttgggttgggggtattttygagygttgyggygggaygtyggggttyggggygaagagagttagggygyggatygaygtttgttgtttttttgyggtattgttgttygaaygaaygaaygaaygaaygaaygaagyggtttygtttaggaaaaatatttttttgaygygaagttayggttgaagtttygggttaygtagaggggttagtaattttatgggtggtggggttttttatttttggaygtagyggggagtagygggyggtttttttttttgtttattttttttgggggtgggggagttttgtgttattygaygttgygaggggttgttaygggttttttaggttgtgtttttygyggggtygtggttygtgttttygaggttgttatttttttgaggtgttyggagttaaagtagagggttgatttygtyggttgggtgaggtagtattyggtgayggyggttatgattgtgttttgggygtaggaaygagtttttygygttgtttygaaggtttttgatttttygygttttgygttgtttygygtygtygggtggatttatataygttaggagtaaattgygtaggattyggtygttatttttttgygtttttttatygyggagattttgygtttttagtttagygttttttattttatttgggtagygttgygtttgyggttygtgggtttygggttygttygtygyggattttggtttaggtttyggtttyggttggggtttyggatttagttttggttttggtattgtayggtttttyggtttttgttggttygttatattttagygygygaggtyggggttttttyggttyggttygtttttttygtygtygtygttygtygttygyggggaaggyggggatattggtygggaggygggaagggtggggggaggggaagttaggtgttygtygggatttgyggggagaggggyggygygtagtttygtyggttaggggttttggtttttttyggggygtaggttggggttygygyggttggyggtygggtttygaggtyggggagygygttttgggattttygtggaggggttttgtygtatgyggaygaagttagagygggttttagtttggttttggggtattttttttttttgggtttagttttttatttgattygtgaggggttggttttattttygtttagaygggggttggtggtygagtttggggttttgagattggattttttttttttttgtttagtttgygggagggagttggttttgygtgttggtagggagagttygttgtttagagygtggtagttagggaggtttgaggatagattttaggttttttgtgtttgggggtagggggtgttagggtggggtaatygttygatttgttttggttgggggaattgtttttttttttttttttaggggttgggttggtgaggaaagggtatattaattttttaggatagatatttttggggttttttgtttaatttttatgtttgtatattttttagygattattttgttgygggtttgygaayggtgaygtttttatttttgtggtttygtaggtygtttttggttggttgtygttgggagaygggttggaygtaagggaattgggagtttgttttttgtttatttttaggttatagggttttttagygttgtttygtggttagataattttgtgygygaagttttatggtggaaattagttggtygaatttatttttggtatttygaagtgtttagtttgagtttgtttgttgttgggattatgggatgggattatagggtaggtygggttgtggtttgttttttttagggattggagyggttaagtttgttygtygayggttaygggttttagagygatygttttyggygtaaggtgtygggagatggtagygyggtagtygggtttgaattttttatgagatgtagttagtagyggygtttttttgtttggttttygtygatagttgttgygggagaggtygygattygygttatttyggygttttgttagttygtgtttttagggtygtttggtttgggaaygtagagatttaygattttttttttaattttygaagygggaagtyggttyg

SEQ ID NO: 6033 - DNA, 1235 bp, synthetic construct
  misc_feature 1..1235: note = Description of Artificial Sequence: Synthetic polynucleotide
  source 1..1235: mol_type = other DNA
gygttagygygtgttttgtttagagagttyggygttagtttatttttygtgtagttattggttgggattttgtgtgtygttgtyggttaatgaagaygttggagatygggtttttgttygttttttttttgygtttygggatgaggtagagattgaatagtyggygagtaaattaayggtatttagaaagttatgtyggattyggygtttagygtttaagygttaattygttgaaagttttttagygaaattttagggaygatttggatttygttgagaggaattgtttttgagtgagatggttttagaggtttggaggagyggattggtaagtatygggagggtagtgggagttttgtttttgtttggtgttttgaataaggtttttayggttatttattatgagatttyggaggaaagagagaagggtttygttgtgggtaaygtggtygygaattttggtttggatttyggtagttttttagttygtaggtttygggtggtgtttggagttagtygaagattttttgaggtgaatygggagatyggagagatgtttgtgaaygatygtttggatygagaggagttgtgtgggatattgtttttttgtattgtaattttggagttggtagtggagaattygttggagttgtttagygtggaagtggtgatttaggatattaaygataataattttgttttttttatttaggaaatgaaattggagattagygaggtygtggtttyggggaygygtttttygttygagagygygtaygatttygatgtgggaagtaattttttataaatttatgagttgagtygaaatgaatattttgygtttygygtgtagaygygggaggatagtattaagtaygyggagttggtgttggagygygttttggatygagaaygggagtttagtttttagttagtgttgayggygttggayggagggattttagtttttttygttagtttgtttatttatattaaggtgttggaygygaatgataatgygtttgtttttaattagtttttgtatygggygygygttttggaggatgtatttttyggtaygygygtggtataagtttttgtaayggatttggatgaaggttttaayggtgaaattatttattttttyggtagttataatygygtyggygtgyggtaattattygttttagattttgtaatygggatgttgataattaagggtyggttggatttyg

SEQ ID NO: 6034 - DNA, 3043 bp, synthetic construct
  misc_feature 1..3043: note = Description of Artificial Sequence: Synthetic polynucleotide
  source 1..3043: mol_type = other DNA
gygagggtttyggggtggtgggggtgtyggttttagtatgtggaggygataggattygtaagattttaygygtygtyggggtaggatygtatagggtygttatttatttatttggggygtttttaatgggtattygtgtattttagttygtgyggtgagygtaygtaygtygtygttgtygygtttatayggttttttaaagtygggggaggggtygtggagygaaggagttgtaggtagatttttttttttttttygagttgggaaaagggttagtttygtgttttgtaygtttggttttgttttgtagtttgtyggtgagttaagagtyggtagagtagaggaggygtayggttygggtygtgttattattttttggtttgttgatttggttaggagttggggatggyggtagtatygyggaggtaygttttgygttgtttttaygttttttttygaaagtagtgtttttagggggaaagttygtaatgttatttgtttygtyggtaaagttttgggatgtygggtattttttgaggagggggaagaygyggtatttttattgaggtyggtaggttaggaagagaagtttttygggygtagggygtagtttagtttyggggattttttgggtttttygygtgtyggtygggatgaagygygttttgtatyggattygggattygggggygggggttggygttggtagygttagaygttgttttattttttttygattttggggaggatagtaataagttttgttttagttattttattattttgttagtaygtgtagatttygggttttyggagttyggygyggatttygttttgtttygygtttttttttgtaygtttygtgttattttaagagtttgygtggttttgggtgggygtttggttttyggygaaaygtttggggygygtygygtgggtgtayggtgtttttttttagtagttttyggttgygggggtatatgtatttatttgtattttgtagggataggyggtttttttgttgggagtttttgttttggggattttygggtgggttggtggygtyggtttttygygtygggttaaaggtggttaatattaaagttagggttatgaattggtttagtygttyggtatatatggtttttggtattaatttttygtygggagatttggattttttgtgttttttttttttttttttttttttttttttttygtygtttttttttttttttttattttttttttttgttygttttttttttttttttygyggtygyggttyggatagaggttatttagygttttttygtagtttttyggagagtatgtgattaggtygttagtagygtygygagtgttyggtaatggtagggatggtgttttaaatatttttggaagttttggtgttatttgaatgaaggagtygagtaggtgttgtttyggyggttggattaattygagatttyggtttttttgataatayggtygggaggyggggtttgygtttaattattataggaggaagtygagygtygttgggagygtyggataaagttgtygatttggyggyggttaygygtttgygtgygtgtgtatgagtgtgtgtgagygyggtyggagatgygtgygygtgtgygggtgttttagggtaatggtygaaaggattgtataatataagagygaatttaagttttagttgttgttaaagggggayggtgtgttttgggatagtgtttttggggtttttggttygygttatatttatatygggttgggaaagtttttttttttygtygtttggaatttagtgagatttttagtttagaggatttgataaattgaagtagttttttaggtataatgatgttgtgggttaattgagtatatatgggaatttttggttttgtgatattttgtattaaaaagaattttaygattgaagataggagtagaagtattagatatagtatttggtttgagtaattgttttattttttygttttggtgggtygtgtaatatttggagtgtygtttttygttttttttttaatttagaygtattttaggttgggttgtagggatttaggtgatagttaggatttgtattatttttaggagggtggtagggaggtttaaggtagttttgagttagttygtygyggagtatygygtgttyggaggttagagtttgaaaggtaattttaygygtttttaaatatatttttgtatttttttaaagygttgttygttatttygtttygggtttttttttattttttagttattygatggaagtggtgagaataaaaataaagataaaaaagttaaattyggggaagttatttttattttttttttttttttgttyggttttttttttaagaatygtygggtygggatagttttyggttatttttttattyggttygtggagggaaggagaaagttgggygtygtttggagygtttttttttttgttgtgtgtgtaygtgtgtaygtttaygtttttttygygtyggggtyggggataggaattgttttyggtttygttattttayggygtagttyggggggttygtagggttgggggagggyggggataygagygtygygtttaagygttttagggtaygtattyggygttggygygtattygttttttttttygtttttattttttttttggagaataggtgagtttyggtattagttttygattttttattttygtttygygtttygttygygttttttgyggtaatgygtttgggaagttttattatttattgtttaggygaygyggttttgggttttygyggyggggygtattgttygtttggttggggtygttatgtgatayggttgggggagggggygaggagataygygggtaggttattttttggtyggygtttgatttttaaagtttttttttttygtgtttyggttgtaygygggagtggggaaggyggaggyggggggttaggatggttayggttggtygtagttattyggygtgtygagtttttttgagtyg

SEQ ID NO: 6035 - DNA, 864 bp, synthetic construct
  misc_feature 1..864: note = Description of Artificial Sequence: Synthetic polynucleotide
  source 1..864: mol_type = other DNA
tygtaggygyggagttgyggttgtagttattagtttagaygtggygygttygtagtaagtggttggatatygtagattaggttygygtttttagtagygyggatttyggggttagtygtttaggtagtaaagttaggyggtyggtttygttagtagtygatgagttttattttgtggattgtttagygttagggattaggattyggagaggtgtttaggaggagtagatttttagattaggtaggttgtgtattyggtgattttgaygttatttaagggaagtttygttatttygygttagtgtttgagttgtaattgtaaattgygygttttggtaygagtagyggtgggggygggtgggggaaggagygagtgattttttaggygtttttygttatttgatattagttaggtagtttttagggttagagygttagygtygaagttaggtttattygggaagttatttyggtggtygyggggtgtttatgttagtattagattttttttyggaaggaggagyggggygggttatayggttaggygggttttttttttaaggyggggtgggtygygygtttgygatttttygttygtggttttggggtagttygggttagttaggagaattygygagtttagyggygtttgtatttgyggttttygggagtygggyggttttgygaggtttattaggtttgagaggtyggaggtygttagtgtygttgttgaagggtggattaggygggatygyggattttgggttagatygtagatttggtatygyggattgggatttggatyggggattttgagttggattayggattgggggttggatygyggattgggggttggatygyg

SEQ ID NO: 6036 - DNA, 2071 bp, synthetic construct
  misc_feature 1..2071: note = Description of Artificial Sequence: Synthetic polynucleotide
  source 1..2071: mol_type = other DNA
gygagagtagyggagagaaaggagttagagaagtgygtatttattagtttatygtagttgttgagygttatagaggaggtttyggttaggtyggttaygttttygaygtagagatagttttygagtaggggttttaygygggtggtgtttttttygttttgttattttatagtggtttygggygttaygaggygggygttgggtygtagtygtaggtgtaggtttyggttaaagatygtgatattgtagaagaggtgattgttaggttttttttygttgttttyggggaagttyggggttyggatyggggyggttttgygggttygtatttttgttttggaygtagttgtygatattaygtgggatattaagyggttttgggygttagtgygtaygggtatygttaggatgygtttygtttygtgttttaggggttygtttgtaaygggaaggggygttagatyggyggagattayggagttttagtgttttagagattygtyggtaagttaygtttttttagatttygttttattgygaagggaaggggtatttygttaggygattttagaagttagtttgtattttttyggtttttttgtaatygggaaggggygttaatagggttattatttyggggtttygttattttttagtygttttttttttyggagattttgtttgttaagagttttgttttttgtttygtttagggttggggttyggtgggaattttttygtgttygaagggaygatttygttagagagtttttygatttttgtatttatygtttttggtaggaygtggagttgttyggaagttatttygggttggtttttttattygtgtgttaygatttttyggygggtttttgtygttygagtgtttttatygttagttttyggagyggyggagtttyggttttttygagtaygagyggtttgttttgtttgtttagttttygtttagttygttgtyggtttygttttttygagygttygaggattgggaggggtggaatagggttttttygattttyggggattttttgyggggygttttaattaatttttagggtttaaggttaygygttyggtagtyggttttttyggagygttttyggaygygagtttyggygtygtttygttttggtttttttttyggattygttggggttgattttgygtttttggtygyggggtttttttyggtttttygtttttatttttygygatttaggagtygttagtgtttygaggttttttyggtttaaggygttygggggyggtgyggggygttttttgygygattaattyggtttygaagttggttaatttggtttygggyggggygygyggagtttgtttaagttaggttggaygaygtttggggagggggyggyggggtaygygggatagggttaggtyggygggggtttyggggagtaggggtygggtygtatttatttggggggtyggyggyggyggygagtttggygttygygggyggyggyggyggyggtaggagyggyggyggtagtagtagtagtagtagtagtagtgyggggtagagtaggyggygagyggttttygtyggyggatttatggtagtyggattgtagtyggggtttygtattygtagtyggygygaaagtttttygygagtygtttagtttatatttgggggtagttggagtygttygtagttgtagtatygtagggygyggggyggaggaggygaggygyggaggggygggygggggagygtggagggaaggyggggagagggaaggagygagygagygagggaggtaggygggagggagggaggygagygagggggagggyggggayggygggygttttagtttgyggtgattyggygtattttggygyggtygtygtygtygttygttttttttttygygtygtygtygtygyggtgtygggttygtagygaagtagagatatttygaggyggyggtagagaagygtygygggtygggtygggggagtttygtygttagttattttaggggtataattttygaggagyggygtyggtygaayg

SEQ ID NO: 6037 - DNA, 1170 bp, synthetic construct
  misc_feature 1..1170: note = Description of Artificial Sequence: Synthetic polynucleotide
  source 1..1170: mol_type = other DNA
tygggttggygggtattgagttggggttattaygtttttttagagygtttgyggaggtggygaaggtttggagagtataygaggyggaattyggatygagtgagttttttgagtygtttgygtgggaygtagggagagggygaataaygtttttaggygttgaatgtaggggtaaggagttagygagggtggttggagtaggttttgttagttgttattaagtttttttataggtttgggggtttggggttttttggaaagattttttygtygygttgattagtayggggttygttttygtattttgaaggttgtygyggtttttygttatttataattaagtttaagattaaggttgtaagttgaggtyggggtattgataaygggaatgaagttataggggaagaggataattgggaygggttggatttatatttgatattygggaaatttttagagygtgtggtgtttttgttagyggtagttattggtggagttgaggttatygttattgtygtygttggygttttgtttttggaattttttagtaagatggtatttattgtttgttttttttygattagtatttttagtygygttttttttttttygggataygtattagttatatattgtggggagaagatgggttatgtaaatgtaagttaaygygtttttttagttatttttgtataatgtaataggaatagygattygygygtaygaatygggtagtgtgygygtgtgtgtgttygygtgtgtgagygygtgtgttagygtgygttttygygygggygtgygtttgggtggatttttgygtggtttgggaggtaaatygggygtttttttaagtygttttaatatgatttaggtttttaaataygtgaaagyggtagatataatagggatgygaaggaaataaaaaataattggggaagtggtgttaagttatttaggttttgaattgaggaygagtagtgyggtygygtttggggygygttyggaaattatttttagtttgtggyggttattgttttatttaaatttttttgyggggagagttgagyggatttttggggggttggttttgggttagttttaaatttttyggttgtatttygygtggttttatygayggygygtttyggygtagtttttggygygggttyg

SEQ ID NO: 6038 - DNA, 2168 bp, synthetic construct
  misc_feature 1..2168: note = Description of Artificial Sequence: Synthetic polynucleotide
  source 1..2168: mol_type = other DNA
tygygttgtagttaggtagagtttyggggtagttygtttatygyggaggagttattttggagttttaygttttttttatattttatttatggattggaaaggatgtttagttattygygagtttgtttgatattgggatggaaagttatagttygtaggttggagtgaggygygggaagatgtttggtttttgtttygyggatttggtagtygygttttgygggtttgtttattgaattgttgaggattygttygtgtgyggggattygagtgttatttttyggagygttattttgygttttagtttttaggttagataatatttggaaggtagggtagggttgttttygtttttattttttgyggaaggatggtaggattyggygtagygaygtagtagygggagggtatagygatttgtatttttagtttttttttaggatataaggttgattttatttttyggatagttgtaaagtttttgttagaattaaatygaattygygtttyggagaggggtttttggggtygtttygttgtagggygtggggagtggagagagggaaggggaagtttggggttgggtgtgygygygtgggagygygtttyggagygtttygtatttttttattttattttygggggtagtttgggaaggagggagtggtagtygygggaatgagggagtaagagaaatttttttaaagtgaygttttaaataggttyggatttagaattygaagttaaaggttgttagaaattgggatttttyggttttttttgtagttttttttttttygtttygaagttygggyggtttgttggttgtttgttttttygttttyggtttagaggtttttggttggygggygtttygtyggtygtyggttttttttttgaaattygtyggygtatatgaggtygttgttttygtygtaggygttggyggttttttygyggtgttygtggtgatgttatgtttygttattaygygggaggagaggagggyggygtygtygggttttgggtgaagagyggygtagyggyggyggyggygggyggggggygtttgggtagyggtatgaaggatgtggagttyggtyggggtagggtgttgttgaattyggtagtygttaggggygayggtttgttattgttgggtattygygyggttaygttyggtggyggyggyggtggtttgagggagagtygtyggggtaagtagggggttyggatgagtttgttggggaagtygtttttttataygagtagttagagttgtyggygtaaygttaagtatyggygggtgtagaattatttgtataaygtgttggagagatttygyggttgggygtttatttattaygttttygtgtgagtattygygttttttgttatgttygttgtaggggattattgtttttggttttttggggygtgtttygygttygygtttttgggttttygygygygtgtataygtggtggtttttattttttygtaygtgttygtggttttttttttggagtttttttttttttttagttttattttttttatttttatagtttgaatttttttttygaggatatttaatgaattgttyggtagttttaggttttyggggygagagttaggtagaygygggatttaggttgygyggataattgggagtaattaggttttaagataygtaaattttaatygaayggggygttygggagttagggaatgtaaagggaggataggygttygtgtgaggtttgagagtatattggagaggttaggaggtgatggyggggtaggayggggagaagtgagggggtatygagggttaggtttttagttttaggggyggagtaggggaagttgttatttggagagagttgttaggttttaagygygttyggaaataygtttygttattatttagttattattaayggaaaatttgttagtgtatgtagttttttttgttayggagaaggtggttaaggtttagaggaggttagtaggttaggygaagtaaygttttygygttgtagggggyggggaggtagyggggaatttggggygtaggaaygygggyggaggtgygatagtagaagygtaaatgggtygtttttgatagagatygggtagtgggttaagttttygtttgtggygyg

SEQ ID NO: 6039 - DNA, 2053 bp, synthetic construct
  misc_feature 1..2053: note = Description of Artificial Sequence: Synthetic polynucleotide
  source 1..2053: mol_type = other DNA
tygaygtaygattygtttatayggaataagaattttaygaaggatatttggggattatattggtygtattygagggggygggaggyggaaaaagtatttttaaaygtaattttgttaggttttatttttygtattttttggttttygggatagaagtttttttggtatttttygtttagtttaggggttggttgttygttagaaygaaatattttttattgattayggagagttttgtagggagtygaggttttygttygggttaagggaaggygttggygtygygggagataagaagaggyggaggyggaaaagaagtggagaaggaaggggtggtagagggagtagygtgygggaggyggygtyggygtygggttgttggygaggyggggtggggtggagtggggtgtgttttyggygggyggttagtaagttagttygttygagygtyggygtttyggtttttagygttygttygygatagygatygggattggygtttygttgtttygatygtyggygagtttygtttttttttaggttttttattgggttttttygygagtttygtttggttyggygtggggtygttygttttygttagttygggygttygtygtttygtttygttygygtagtttttgtygtttttttygttygygttgtttttggttttttttygttttagttttatttatgaagygyggttttattaygtgttaatgagtttttgttttgttttggtagyggyggyggtatagatttygtygagggaattgygyggggagggatttgagygtagygttygtagttttaaattttgtttggggygggggattygtygyggygttagttttggggttagaggggataagttttttyggttygygttatttatttttttttttttttttttttttttgtygtygygttttyggaggttttygttgttatgatttygttgtgttttyggatatttttatattttgattaggttaagaaggggttggtgtatgygtygtttaygatttyggggttattaattataygttttygggtagygygtatygttaatatttttygygggggttaygtttggggtagygggttgagtyggaaggggaaggggagygggagtttagaggtygaggygygtygggttygggggtgyggtttygygtttttttttttygygtaaggtygttttygtggtaggyggtagygagttgggttyggggtygggttgagttttgggatygygttgygtagttttygagtygttygttatttggttgyggtygygyggttatttgtttttygttttyggggygtygtttagtttygygttaggygttttttttagygttygtygttttttttyggygagattattygggygygtttygttygtyggttttygatgtaaatagttgggtttygtaggyggttggtttygygtttttyggttyggygygtttttttttyggttattyggggtttygtttttygtattttttygttggaggaggaygttttattttagggtyggattgggggttttgggattygggggyggtagyggygggygtttggggagtygyggtgtgtttagtagtygyggtaggaattaggggatatgttygttaattgtttttattattagtygtygtttgttttttgtgtgtayggattaaattttaattggtttttatatttattatggtgaattgygaatttttaaataagtttgggtygtygtttttgtygaggaggygtttttttttttttygttttyggggttttgtagggtgtgyggyggyggtygtggttatttagatatttttatttttygtgagttggatygggagaggatygtayggtttttatttgayggagttaygttaygtyggttataagggtttygtgttgggygttgggttyggttttyggtygtttttttgtggtygttttggygtttattttatgatattttgtyggtgtttttagatattatttygtatygtttygttttatygatttttaggttttttyg

SEQ ID NO: 6040 - DNA, 1679 bp, synthetic construct
  misc_feature 1..1679: note = Description of Artificial Sequence: Synthetic polynucleotide
  source 1..1679: mol_type = other DNA
gygtttttattgygtgtttagyggyggtggaggyggygtttttttgtattaygaataygyggttygttaaggygtygttttagyggttgatggtttyggtttttttttaaaattttyggygttygatttygtygygtttttttaggtaggaattttgygattttattttttgggttygttattagtttaggtttgyggtgygygggagggtattaagygygaggtttttttygygttttyggttatttygtygattttaggtaagtgggggtagtttaagaagggtaaggagtagttggatygtgttttggatatgagyggagtygttygaggataagggtattttttyggtatygtgggyggtttttyggygggggtyggtagtttggttttttatttyggygtgygtttagtttttaagttygtyggtttagygagggyggyggyggtygtttayggygatttttatygggaggagagtagtagtaagtaaggagtyggtttygttttgggtaggttgttgggygggggtygggygtgygggygtttygggagyggggagaattyggyggygggyggygygggttattattattattattaygygtattattattattattttaagtgtttgttygttggggattygtygtygtygtygtygtttggtttgttttgttttggggttttgygyggtttttttttgtttttygttttttyggaagaggygttygtttttaagtaygtggagygygtttygttygtagtygtygygttgttaggagygygttatgygtagttgttttttgygtyggggttgtttttygagygttgygygttgtygtttttygattygggyggttttaaagtttattygggtggtgagtgtagttatttgttygtygttatgtyggtttttatagtttataayggggagttgttttayggtttatyggttattatygtttattattygtttaaattgtatttyggygggttgttgaagtattyggagtttattttttattttagygggtttgtagyggtygttttaagtttygtygagttggggtygttggttagtatygatygagagatygttatgtataattagtagttgttygagatggttgtygggaagggtygyggaygtttggattyggggaygttgttatyggtygtygyggyggygggaggtatygggggyggyggtagyggaggtagyggygtaggtaagtttaagatyggttatttgtgtttttattgtggtaagttgtattygygtaagtatgggtttaagatttatatgyggaygtataygggttataagttatttaagtgtaaagtttgtttgyggtttttyggygattttagtaattttaataagtatattyggttgtaygtygagggtaataygttttatygttgygagttttgyggtaaggtatttgtgygtygtygggatttggagygatatgttaagtttygttattttggttagagtttgttygttaaagygggygayggttygggtgtygagttyggttatttttyggagtttggggattttaagagygaygatagtgaygtggaygtttgttttatagaygattagagygatttygaggttgggggyggyggggagygygatttgtaaygagttttttygggaaggggyg

SEQ ID NO: 6041 - DNA, 1474 bp, synthetic construct
  misc_feature 1..1474: note = Description of Artificial Sequence: Synthetic polynucleotide
  source 1..1474: mol_type = other DNA
tygtttttaaaggttyggggaaggaggttgygggtgggtggygyggatttygggtttttagttatyggygttttttyggggttttttgatttygttttttaaaggaggagggttygtggtaayggtttttttyggttaggygttttygggaygygggggtgaggagtgagygtygtggtttattttatttttygagyggggayggagtgggygatatygygygttyggttgtaygtaggttttgygyggttygaggyggttttatagggggygaggaggaatttyggagattyggyggagagagtagagayggagtttattaaggggtttgtygtygtagagygygggagtyggtattyggtggggtygagggttyggggaygttggggttgtttgatttgagyggyggtygttgatygttgagggtttttgtggtygtagygtttagattyggggagaagggyggtttttaagggtygggagtttttygagggygyggttagygaggagggatagagggyggygttttyggttgttygggygygtagaataagtagttgtygttagggtygataaagttgtttttygaggggttgagatttaattttygtttttygatttagttaggggagygygaggtygtatataattyggygyggggggaaagtyggttgtagttgygttttttatttttattyggttggtttttggyggggagtttgggtagygtygattaaagttyggagyggtagtttyggggygygggaygyggggtataygggtttagttgttygaygggagttygaygygygtttttyggygggtyggygggttyggaagtttygttgttygggtygggtttttaagttygtagtygttttgattaaaataggtatygygayggyggyggtaggyggyggtagttagggttggggtygtatygygtaygygtatgygttygtygtttygygtttttyggygggyggagttyggygtygyggttaggattttttatttygttttygygatttygttgygggtttgtatattygaggattyggtttgaaaygttygtttatttatttttttgtygtttygttataagattttatttttgtttgggtatgagtggggggyggtagtttygtgggatyggyggtattygtygtttttttttayggggataattygagaagtgyggttygggtagggagagaaattaggagagaaaatgagaaagagaattttygtttttttttaaagttggaygatttattygtatattttttttttgggagattygtttataatttagtataaatagggaatagttyggaaagygygygagttttygttygattgtggygggggaggttgaaygtttggtttataygggtgtaggaygygggggttaggttttttgttgyggaggaagagggggaagaggtygygygggagggatttttgataygyg

SEQ ID NO: 6042 - DNA, 675 bp, synthetic construct
  misc_feature 1..675: note = Description of Artificial Sequence: Synthetic polynucleotide
  source 1..675: mol_type = other DNA
tygyggtgygaagtttyggattygttgggaatygtatagttttyggtatttttggtygtatgtttgttagaggtgggtttygggaaatatattygttgtttttttaataagygtttttygttttttattggtttttyggttttygttttttatygttttttttygtttygtagttttygagtggygttagtaygttygtygggtatgggttttaaatgtttattagygggagtttaggygtttttgttttggagygyggtygggagtaaaatygtaggagtgggagggtagygagttagttggatttygagtygyggagygygttggttttgtttygtttgatgattttagagygygggtttaagygtygtttatgtagtatttttgagtttyggggaaggagagttaatgaaaaaatatttaatygttttygttgyggagagttatgagttgtttggatgttatgtattaagtttatggtttttygtagttttatttygtagtygtttatattttttattattaggtaygtgttttttttggggattttgggaaggagtgygygtttttygtttgyggyggtatggtttgtaygttaaggtttgttgtgttttygygygtttygggygttygattaygatyggygtagtygggatgyggggattgtyggagtyg

SEQ ID NO: 6043 - DNA, 1133 bp, synthetic construct
  misc_feature 1..1133: note = Description of Artificial Sequence: Synthetic polynucleotide
  source 1..1133: mol_type = other DNA
tyggtttygtagtttttygygtttygattttttagattttygggagtttaggggagttaggtgttgggyggtgygttyggtgtygtygygttttttttygttatttttggttttttygttattygggtttttyggtygttttggatgtttyggttgtatttttgttttatgattttagtttttttttttaattttttttttggttttttttttttygagygygygygtatatatatattyggttygttttygyggagtggttttgggagtaygatygattttagtttagtaaatygyggttatgtygtttagatttttygtttygaggtttyggttttygtygtygtygttttygygtygttttttttygtttagatatygtygtttgyggtygtttgggyggtagtttttgyggtttttaaagttggttttttgggagggggyggtagggagtaggatgaaggatttgttgtaggaggaggatttatatatttgggygaagggaggggtagygtygttgttgggaygyggygyggattygtattattgygygtagtagtygttgtagtagtygtyggggatygyggagtygggaygttttygttyggttygygtttygtttttygttttattttygttygtygggtttagtaaygtagggtgtttaggagtygygggttgygtagggaggygggtagyggttttygygygtttttgtygttttyggagtyggygygyggygagygtagggygagygygygtygggyggyggtygygttggggggygtgaggygagyggygyggagagyggtaggggygaaatttygygggttagatgttygagggygyggyggygttgttaggttgtygttgttgtttttgygggtttygagygygttttygtaggyggtattgttygyggygyggygtgtgtatygagygagtgaaggtatgtgtggygggygyggttggagttgtygtygtygtygtygtygtgttagtaggttttaatgtttgttattttttaggaygttggtagtagtagtagttyggagttttygagttttyggtaggtttgygtgttttttttygygatttgattggataaagtgggggttygayggtggtygayg

SEQ ID NO: 6044 - DNA, 1808 bp, synthetic construct
  misc_feature 1..1808: note = Description of Artificial Sequence: Synthetic polynucleotide
  source 1..1808: mol_type = other DNA
gygygtyggygttggggatggggtgggggygttggggtataagggygtaggggygtayggttatygatagtygggtgygtttagtttgaggtygyggagaggagtygaattgggatgggtggggggttttyggttttaatattgtttgttagttttagtgygtttaagttttttygttagagttgtttttttggaggggtttttygtaygtattgttttttttatttttttggttggaatttttyggtygttattgtagtgtttagagatgttgygttgtagattygggattttttaggygttttttttygtttttttgttaaagygtaaygtttgtatttttttagtttttttttttttttttgaaattgaaagttattgaggtygtttagggttgttgttttagtagttttttttttygttttygagttttttttygttttttatagttatttttttttttttttttttttttgttttttttttttttttttttttttgtttttttttttttttttttttatgtggtgttttygggagtttagtttaatattggagygttttttgttygygtaygttagaagtagttyggggttttttygtygttttttggttatggtygttgtgtygayggygttygtttttttgygttttaggggttttygtygttgtagtygtagtygtygtagtttttgagtttaaggggtygtygttgtagtygtygtygtygtygttygttygttyggatttygtttgyggtagttgtygtataatatgttatttgyggtygtttyggyggtttttggaatttyggttygyggygatgttagttattttagygaagtygtygtagtttagtgtttggataatttgaaagtataatagttggtttttttgtttattygttttatttygtttgttattatagtaygtttatyggatgtgagaggagaagtttygttgttygggtattgtttatataygtttaatatttatatatattttaaaaatattaaatataattaataattaaaagaaagaggagaaaggaagggaagtattattgggttattatgtatttgygattgattttttggttttttattattttgaattttatggaatatatyggtagttaaaaygtttttyggggaaggygttagygaagaagtaagtgtagggttttttaygygtttgttttttttygtygygtttatttgtygggtygttttgtttgttyggagtyggtttttaattgtagyggttttttygttttgygtttygtagaggagatgtaggttygggttttgggggtatggayggygttttttatttttgtttttyggygtttttgtttttygtagtattttagtyggtgygaggggygggyggaygyggygttaaggtggttttygttttatggtaattttaggttygygggaaagttyggttttgggttagattygtattygggatttgtgttttttttttgaggatyggataggggtatttagtygaaggtatttgggatttttagaygtaggatgtttttgatygttgagtaaatgataagggaggygyggtygyggtattygtttatttagygtaatygtttygygyggggagatttyggttgggtttttaggttggatttyggtagtygaaygttygttattyggttaggaagttagggagygagygtttgygyggtygtattttygataygtattagyggagttaaagggygygygaggygatggggttygygtgtttgygygtttgtagagttgtyggaygtttttygttyg

SEQ ID NO: 6045 - DNA, 1323 bp, synthetic construct
  misc_feature 1..1323: note = Description of Artificial Sequence: Synthetic polynucleotide
  source 1..1323: mol_type = other DNA
tygaatattygtattgtttatygaagattttygtgttttagttttttttgttttttatttttttygtttatggttttygtttttttaagtygtttttyggaattttttgtygggtyggygggaagygtggatygagygggttttggtygygtttttttyggttaggtttggtttagttygygtagygttygygtagttygttagggggatttyggttygtygggyggtatttgaggagaaagygttygaggggygtggagttagggttttgyggtgtttgtttygggaatattgygagtyggttggagttttttagtygtttyggagaattgggggagtygggtttttggttyggtaatyggtggtttygyggtagttagaggygggttttaygggtgggtgtgttygttttygtaygttagttttttagttygggaagagygtttgtaagygggtattttgtttttaaagatgggttttgtttgygggtgatttgggttttygaagtgtaattttgtggtygggaygyggatyggtyggtttgggtttttgtagagtagattttgtttgygttttttaggaggagtgggtggtaggattggggttttttataggttttggggyggyggygagattggtayggttyggggtygtaggygygtagttaygtttttggaagttygtttyggttttygtttttaattygttttttyggggttttatggygtgaggtttggggttgggatttatttggagtygagtagaaaattttttttttttygttttyggttttttttgttttttttggaygyggtggyggygtygtttgagyggygatttttttttttttgttyggtttgttgygttyggtgtttttygagggtaggygygtttggattttgygttyggatggyggyggttttttgtgagtatyggtagyggygtattttttgtttygaggttttyggtgttttttyggygygggtataggggygtttttatttttygttygtttgtattttttgttattygttttttygtttgatttattygttygyggtggtygttygagttttgggatggggagggagatygyggttgttygyggyggtygagattttygttgaygttttygattttgtygtttttttygttygtttttagaggygttygaygtttygatagtttttggagtgagattaggattgagaatagggagaggygattygatttttagggttyggtgtttaggataggtgaggggaaggaaagggtgttgaygggagtggggaggtgggtgggyggttatygtagtygaaatyg

SEQ ID NO: 6046 - DNA, 1501 bp, synthetic construct
  misc_feature 1..1501: note = Description of Artificial Sequence: Synthetic polynucleotide
  source 1..1501: mol_type = other DNA
tygatagtggtttttyggtttagggaggagagygyggtygygggtttttttttttagtttggaggttgtagtygttygagtyggttygggtgggggyggggtgggggyggygyggagggtayggagattayggyggygttattygggatatttagggtttygaggttttgggyggtttttaygygagatygtaaattatgataataggtagttattygaggttaaataaaaayggagtgggtttttygygygtygtygtttttygygtttttggyggtttttttygaggttttyggyggttttaygagttygtagtagtyggtggygaygtygttttygttttatttttttgygtaagtgygaggttgtyggtagygyggygtaygtttyggtygttttyggttttygygtaaaatttttattttgtttaygtgaagttgtygttgttttagagagggggaaagagttgygggaaaagtyggggagtgaygattgyggyggttgggygygtttttttattttttttttttttttttttttttttgtygtagttyggagttttggttttttttttttttttttttttttyggagtyggttttttttttygtttygtttttttttygtttgtgtaygttatttgttgtggggtggtygaaggggatgttttgtttttattagaggtatagygygaaggggaaatttygatattggaaggaaygagaataaatatttaattayggaygtattgaatygyggttgggatagatatttygggaattygaggyggatygggygaygaggtgagtgatttttttttttaattttygttttagggttttygggggagtttgagttgagagaatttttaaatttttygggaaagtgygygaggtttygtyggggaygtygagygttgggtattgaggaygygtagttggayggtgygtgggygtttgygttttyggggggygtttggaggtygggtgttttaygtttgagggttygggtygttyggatygtagyggtgttttttgttttagaagaygtttttaagttttaagggtttttttygagtttgtttgtttttttyggggtyggygyggagtttgygygtaayggagtttatttagtagtttagygygyggtttttatttgtatttygtttttatttggtagaggygygagtatyggggttttttttatattttttttatgaygtgtattattttttgatgattttttagatggtttaggygygaggatgttgatttagagtttttyggagggttataggygtttgggttttttyggtgtygggtgygtgtgtattttaaaggttygygttttaatttttaggtattgatygggttttttaattgyggygattttattttaatagtttttatgtggygtggattgaatgttttttgtagtttgttagggtyggtgaaattagaggygttttgttagagtagtygygtttattggttygagtagyg

SEQ ID NO: 6047 - DNA, 1744 bp, synthetic construct
  misc_feature 1..1744: note = Description of Artificial Sequence: Synthetic polynucleotide
  source 1..1744: mol_type = other DNA
tyggtgggtygggggygtggygagattttgttttagtggagggagggtttatgtattgtygagaygtygattattagattttgattttgtygtttttagaaaaattattggtagaagattyggattatggttaatttgtyggttataagtttttttaagaagygttaygtttgggtgtagttggtagggtatattggtgagtagtggggygggtgggygggtgttygygaygggaaggggttgggyggygttgayggatgtyggtttttagggagttttaaggyggygggtattagygggttgattttgaagygttgttyggagtyggagygttattgtttggygyggttgatggttgaygygttgygyggttgygtgtttgttttttayggygtggtggagygygayggygaaagttatttgtagttgtaggatttgttygatggtttygayggattttgtgtgttygattgtaaaatgggygttaggtatgygtgttttgttaggtyggttggggggattaagtaggggttyggggtygggatagttgtttgagggggattyggggygagtgttygaaggggttttygtgtgygtttttttatgttttggtygttgtttgygtttttataggatttatttagaggaggagttgattaaggttygtgagyggtttaagttgyggaaggatatgtataagaaaatgttggyggtggattttgaagtttttayggaggaggagtaygygtagygygtygttattaagtygygttatatgtagtggygggaaggtattagttttagtattattttyggttttygtatygagggtattaaggtgaggtaggygygtttygttggtatygtygtagttttattgygygttgtttttttygatttttygttttygtttygtttgttttttygtttttttttatygtttygtygttttttgtaattgggaggtatygttgttttaygttgtttttttttttattggygggttyggggtttttgatatttttgttttatatttagaaagyggayggtttttgtagtatygattttaagattaygygaagtygagagtaggtgtttygygtttttgaagagtttgtgtaaggagatgaggaagtgttggtgagagygggattttaaattttgaggtgttggggagtttgaagtygaggattgtttttgttatttggtttagtgttttyggttgtgtttttattatggtttttatygygttggttygtaattgttttaygtttttttttttttgggttaygttgggyggggttttgggttttttttttggyggtatttgttaagtatagygtgggtttyggttttttatygttagtaggggtttatttggygtttagttaatttgttttttttttttattttattttttgtagaggyggtatttgaatygtttgtagtagattygggatattttggaggtattygagttttttaggaggtaygaggtaagyggyggttgttygggtgttygggtygygagggttagggygggaattyggtaagggygtttttgggtagggtygyggtttgayggtgyggggttygtaggtgatyggtagttygtttttttttgtgtaygattattgttatygygtyggygtgtggtttatygatttyggtaagattaygttttttttygatggttagattttggattatyggyggttttgggaggagggtaatygygaggayg

SEQ ID NO: 6048 - DNA, 1801 bp, synthetic construct
  misc_feature 1..1801: note = Description of Artificial Sequence: Synthetic polynucleotide
  source 1..1801: mol_type = other DNA
tygttttygggygataggggtttttttaygtgaatygaygtttygggtttygggygaggygtagggtttagggygtagggygggtttygtaygtagggygggygygygggtatttttgtggttaggygatttyggttygttttttyggagtttagggattttygaggttggygygggttgttygygataaggtgttagtagtttygggttygygaggagtagtttttattygyggttttygagtttagttttgttttttygttattttttagtttttyggtatttatttagggagatagggaggtagagagaagaggagaaagyggtygtgtttgtatttagtttttgtygtagtattygatgagggatagtagggaggttggyggggaggtagagattaaattatgattttatygattayggaaagattattattatttatagtaaaggaggtttygatgygtttattygggtagygattygyggttggtgggygtttttygttttygttttttyggtggttgtggaatttatttygygtygtataygttaggatttttttttttttgattaaggggaggggaaggaataaaagagattttttattttttatatatatatatatatatatatatatatatatatatatatattttttyggtattttattgttggttaaaggatttattttygtaatttttttttygaatattttttttatttgagtagtgtatttttttaaaggtaaagagagataagggaggaaatatagtatttaaggtgattagtygattggatattgttgatggtatatttttttygtttttaattaatygtataaaattygtaatatttygygttttygyggggtttttygygtttttggttyggttttttyggtygtttttagtaggygtttygtttttygygggaattttgggatttggtygagygtttttyggygggtaggatattygttyggttttttgtagtagttgagggyggygagyggatygygtttaggtagygaygygggatttaatttttyggattygyggygyggttttygttttygtttagggygtygyggttatagttgagattttagygtygygtagtygttttygtyggggtatgggyggtygygtttttygtttttttttttttttattttttttttattttgaaaaaaatttatttattggtgtaaagtagatattttgatgttatttatttagtatygtttgttttggaggtagygttttattyggtygtttggaggtgtgggtagygygtygatgggttygggggagyggggttgggyggttyggttttttagyggagtyggtttgttgttattygtttaattttagtatttagtgggygaggagagagggagagyggygaggatgtagaggagggggagggggaggagggagyggtgggyggggagggagygagagtygttyggtagygygtatgygtttygygggtyggygtagtttttygttyggygyggtyggaggggtagttttttagtttttgygygyggtygygagagtttyggtttygtttttttttygggyggttttyggtttygttygatttygygygttygtttgggygyggygtttatygtgyggaggggttyggtygggattttyggtttyggtgaygttygttyggagtttygygggaggttyggagtttygagagtttttttgggtgatagyggtttttygttygggtttttgtaattttattygttygtagttygygygttgttgttttgggttgygyg

SEQ ID NO: 6049 - DNA, 1801 bp, synthetic construct; identical to SEQ ID NO: 6048
  misc_feature 1..1801: note = Description of Artificial Sequence: Synthetic polynucleotide
  source 1..1801: mol_type = other DNA

SEQ ID NO: 6050 - DNA, 1684 bp, synthetic construct
  misc_feature 1..1684: note = Description of Artificial Sequence: Synthetic polynucleotide
  source 1..1684: mol_type = other DNA
gygttgggyggtgagtttagttaggttatttttgygaggatatyggtyggyggyggatagtagtaygyggygtttaggattyggtttttttagagtttaggttattgtagtttttaggggygtttygagtttatttggagggtygygaggtttttaggttggaaggaggaatagggagaaggaggaatagggagatttggggtagtgttataattatagaaaagggagaggygaggttygttgagtttttggtttgggtaataaggtatattgaaaattgggttttttttygattygtatygtgygygttttagaaatgatagttagayggagtagggtttaaggaygttgaaaatttttgaygtgggygygtygggtgygggtagggaygtggaaggattgggttagttataggaattatagygttgyggatygggtgaggggtttyggttygagtttttatttggggygtagaggtgtttttgtaaggggataaagggtatttttyggygygatgggygatttttttagttagaaaatgagagggttagaygaggggaggaatttttttagttatttggttyggtatagygatygttttaagtttagaatygttaagttagttyggggygtttyggttttttygtttygygtttygttygtttttagttygggtttygtygttttygtygtttttgtygttygggtygttttygtyggttttggtttyggtttygtatatyggtagggggygttygagygtagttaaaaggttyggygggaggtyggyggttttagtggyggagygyggttgtyggtgtgyggtygggagygatygtygyggggtaggggygyggygggtatygygtagagygygtagaatagayggayggyggyggggattygayggyggygtttyggtattttttagatttyggttagygtttttttgttagtygtaagtatttagtttyggtttatttygggttttygatggttttygaggtyggggygattttgygygygtygygtyggttgttttgggyggygttgttgtttttggtygygttgtttttygtygttttttyggyggyggttttaggtaygygtygygttygggttttyggygttttttagtttttygygtatttttttgygttygggtttygtygtttygtttagtgttggttaygggtygtgttattagtttgtgygttttygttattygygggtyggggtatttggygttttgtgtgggtggygggagyggggaygtttyggtgttyggggatygtagygygttggygtttaattttgtygtygttygttttggagtygggaggttttagtygtttaagtgtttygggagatttaggtatagyggggaaaaaaggaaaagaaaggygatttttagygtgyggattggggtaatgtttttttttgtttagaatttttygggagygtaggtggttattttatttttttygygtttatttttygygaggtaggatgaygggygtattygggagatyggagggaggtagagtagggttgttttagaaggtygtgggggaaaggttgygagttgtygtagggygtygggtgtttttgygttttagaggagaagygttttagtgttagttyggttttaggyggtaggaggttygygygttyggggggaayg

SEQ ID NO: 6051 - DNA, 6657 bp, synthetic construct
  misc_feature 1..6657: note = Description of Artificial Sequence: Synthetic polynucleotide
  source 1..6657: mol_type = other DNA
tygggttyggttygttttgtttttttgttttttggaggtttgggygttttygygtagggattaagggttggatagtygtaggtaggggtttygtttttggtttttatttttygtgtttagtaatttygggagtaggyggyggtattttttttatgtttyggttttaattayggttttagtttttttaatttygttttgtaggaataagtgtggtagaggttyggggtyggagggygggyggtygtttygygggttggayggagtttttgggttgyggagaggtygttggatttaygttyggataggagtttygygygtttattttyggttyggttattttyggggygygttgtttgyggtttttygygttatttttatttttgtttygggatttttttygggaaagatattyggggagtagtttttttttttttagtagttttttttttttttttttttttgtttttttgayggtgtggggtttttyggtyggaggggygyggygttggtagyggggtttagagtgtygygtttagygygygttgggggtttygggtttygtagtttygtaygyggtyggtttgtgaagyggygygygggggtttagtygggygagggygtttttgagtttggtttggaatttttagtttataygaaagtygtaggttggggaaggggygggtgggagygggagaygttttgggaagtygtgagatygttyggygagggttygggattattagggagygaygggggatttttyggtttagagttygagggygygatttyggattygttgggatttyggaggtatatgaagggagagggaaattygttaaatygaatttttygggaatyggaaggygtygggtygtttttaygttttttttttttttyggtygaaaggyggggggygaygygtaayggggagggaagggagggaggggtyggygattttaggggagggygagtttttggggaygyggggtygttaggggttygaygattttttygttttattttttygtttttaagtgtttygtttttttttygtttygtaaaygygygttttgygggttgtgttttggttttygyggaygygygygtttatagagggtttgatttggggttaatttttaygaggttgtygggygtttgtgagtatagtygtgtttttatttaggggtttattttttagygttattagggtttygatttttagattttyggaygttttttttttaaatygaagtttgggagtttttgggtggtttggggygggggtagggggygagyggggygggttaggaggagggggygaggtygttattyggttttttaygtygttttygyggttggttttaatttttttttyggagttttttttyggttattttttagtttatygaygtgygggtagygatttygtttttygttttttyggtygttttygtygyggttttygttttttttttattttttttygygygtttttttatatgaaattttttattaygtttagaaagaatgtgttataatttyggygttgtygyggtygttattattgygttygygttygagttygagtyggagtyggagtygtygttttttygtttgttyggttagtttygggtttygagygygyggttttygtygtygtygtttygygttygtttygygtttgaygtagtgagygtygtagtttggttttygtyggtttygttgggtttygggtygtaggtygagtttagtygggygggtttygggaggggtyggtagggygggagggggaggagggttgtttggagttagygagttyggaggaggaagaggaggaggaaggaggggaagtygtygtygtygtygtygtgttyggggaatyggggtgygygygttttgttygttygygatagtgtttttagttyggggttygtatttyggtttaggtaagaaggggtttgaggggtagggggttgttyggggtygggggatttttttgtygtygttgygggatyggagggttttygtttttaggggaggtagggaagaggatgttttttggggggggyggyggggggtagygtagggtttttagyggttttygtagttygggttattttatttttggtgttttgatttyggygttygygttagggtygagttttttygttygyggggttttggatgyggygttyggggttygyggttttygggygtttttatttatttatttaggttyggaggygggygtattygaagttagyggtygtygagtttgggtyggataaattttttttttygaygtygyggttggaagggttaggatttyggatttttagggttagggaggygtygyggggatttygaaatttttyggagygygttgagagtaaaaagtyggttgggtagaaagagggggagggggttgggygygttttygagtgygttggggtagtygyggygttttaagttgaattatagaygaatttttttttatttgaaatttggtttyggagtyggaggtggggagggagtgggttgtgggtgtttygatttygtaaagtyggygtgggggggygtagygtttygtttygygtygtttgaattttyggagggggtgttaygggattttygtttttattttagtyggtggttgggttttgtygatygttgyggagttttygggaaggattygttygyggttattaataggygtyggtgattttagtttttttyggttygggaagttggygtggyggggttgggttgggttgggttgtygagtggggygggatttyggggtttagagyggatttttagtttttttggtttttttttygtygtttttttttttttgtygtttgttttttttttatttttttttttygatttyggggtgtyggttttttttygaattttttttttttttaaattgtayggtggttattyggttayggttttgggtygtattygygtaattttagtattattttygatygagtttttygtygygggttgagygygagttttyggggttaggttgtttagggaggagtagggattttttataattygygtttttttttttaatttayggygagygtaatatattygttygtttttgyggttttatttgagggyggggagaggtygttgggggtagtttygggggttgtggagggtaggggggattygygaagtttttggagygtttagggatgtagttygggyggygtgtgtagggaggaagtagygtttyggygttttttttttagygtygttttygygygtttygagggtttaggagggttyggttttttttattttatttggatatttaggtttgagtttgagtggatttgaggatttgggggayggggaatayggagtttttttttttgtttyggtgtttgtagagtttagtttttaggtagygtggggatttttgtttttagggttagygtyggtttygtttttygtttygttaatttygggatttygtygttttttaggttttaattttttagttttatygtygygtttttttttyggttttgggtttgggggaggggtagggggygtggagygyggygttgggtttyggatagatgttttygyggyggyggygtyggygttygggtaatagtaggtygttaatyggygyggttaygggggaggggygattyggtygggatttyggggattyggtygtagtyggayggygtagttttygttyggggtggggggggggggyggtygygaggattygatttttgtygtgtagttyggtttttagttttttgtygtttttttttttagttttaggtttygttttttgttggggttttggttttttaggttgygggatttygttttttayggtttygygygygtatttttattygttttttaagttgatttttgaggtttttygtggattttagatttygagtgatygtagaattgatttttggggttaggtagtatyggttaagggygttttgaagaggttttyggttttagtttgtatttygaggaaatggatttattatgtttgtttttgggaagtagtaggaygttttggygyggttttttygggtaggygtttagtatagygtagggtataygggggatatttgygaaggtaaaggaggtttattttagagtttyggttgtatttggttagtataggtttgggggaatttgttggaaatggggatttagtattttttttggggtttatgtttggtaggyggagtggataggttggggttyggagttyggtggttattttttgtataaggttggttaggttagaagttggagggtagtttattgggattttttaagygtgattaaggaagttttgggggtygattagtttttttttagtggagttgtagttggggagattttatagataggtagggaggagagggtgtttygtttatygtyggtttygttttataggtttaggtttggtatattttaggtttgtagtatttatttggtgggtaaataaggatttgtttttggtttgyggtttggttttgatygtggtttaggtyggggtagagggagaaaggttatagtttaggtgttttaaattatyggtgttttttttgtyggtttttggggttgtgttgggtttttagggtttttgttttttagtatttgtatgaaatygtgggggygtattggttttygttttagtatttttttttaaggttttgtatttttattaygggagttttatttagttagtygaaggaggttataagttttaaattattaaattygggttagtgttgggggtttgggagttaaggtagtttagagtttatttttygattttggtttttggagaattttaggattygggygtgttaggttttgtagtygggttaggtyggtttatataggattgaayggygtygtgggygtttatttatatttttttttyggtttttatatattataggatttattttgatttgttgtttttgaattgagttaatttttttgtatgttygttgaattgtttagttgttggyggygagyggagagygtgtygggggtattgaggtygggaattagaggygggygggggataggaagyggggagggggygtyggyggggaygygygggttgygyggggattggagagggtttttaggygtyggtygttttgygaaygygggtttgtttaggtatygtyggggtttgttyggtttgagygtggagtttygaggtttttgtygggggtttaggttgtttttggggttttgttttygaygygttgtgtagggttagattttgggttttttttgatttagtttttttttttgtaatatgyggaygggggttttygtataggtaggttgttagggtgaaattgagtygaagagtgttttagaattttttgaagtttttatagaggttggggtgaatgaaggaaggaagyggggttagggttgggtagaggaggttyggtttgygttttgygtttttygtttttaggtttttgttttttyggataaggggyggatygaygggaggatttgagaaygttttggttttgtttgaggtggtgggagtygygggtagtttgtttagttaatagttgtygtttttattttttttatttatttatttattttttttattttttagatgtgggyggggagggtyggggayggatygygaggaygttttttgygttttttaggattttttttttttttttagtttttgygygtygtygggagagggaaggagygggttgtygyggggagtygaggagagtagggggttygggaggttagggagagaaggggagggttagaggtttygagtyggattygyggyggaggaagagggggtggaagggagygygtaggygggtgagggagygagggagggagagaaggagggagggagggagggaaggggggygggagggggtagggygagtttgaattttttttyggtygygyggygaggggyggggtygygygygtagatygatgggygaagttggggaggaattttaatttygggagygaagttagagtttgaaggayggyggyggttgygggygtagtttyggaatygaggtygggygggtaggtaagyggygagygyggtygggygttgaatttgggggatttgggattyggattattttyggggagyggygyggttaagtttttygttatttygaatttygggygttttygagtgygtagygtgygtttttagtttttgttgygtttttaggtttggygygygattygagygtagygggtaaagttggaggaatttggyggyggyggagygggygtaggtttagttygataaagttygggggttygggtyggggtygttgtygtagttygtaygttgtttygtgttttygagaggttttttttttagygtttttttttttttygttttttttygtygttygtattttgttyggygttttttagaygyggttttttgttttttttttttyggaaattagggggttgtttttattttttggtygagtygttgatttttttttaggttygtatygttttttttgttgggtygtttttttttygaygttgygagttttttygtttygygyggggatygtttagttaygtayg

SEQ ID NO: 6052 - DNA, 546 bp, synthetic construct
  misc_feature 1..546: note = Description of Artificial Sequence: Synthetic polynucleotide
  source 1..546: mol_type = other DNA
gygggygtttyggttattttattttagygagaagaygaggttgtttgggttttggttttttygggygggggttaggggttygtygattttttttagygtttygggyggyggggttygagaattaaggtggttttygyggttttygtygtygygygttttttttttttttttygyggattttygyggtygtygtttatttygygtatttygttttttggaaatttagtagtyggggggygaatatygyggygtttttatgggaatttggtttygggtttagagygygggtagttggtagagtttggggggygyggyggyggtagtagtaggttggagggygygyggygggggttaaggggatttggtyggygttyggagtyggagtyggagttygagtyggagttggaggygttyggagtygtygaygttaaatttygagtagatggtggygggggyggggygggygggggtaygggggggttttygggttygygttgttaatygtttaagttyggttttttttttttygygatttygtygttttyg

SEQ ID NO: 6053 - DNA, 288 bp, synthetic construct
  misc_feature 1..288: note = Description of Artificial Sequence: Synthetic polynucleotide
  source 1..288: mol_type = other DNA
tygygagaggaagagagttgagtygttgtaattttgggtttgggattgyggggaygggaygggtgggaagyggttaaaggygtagyggtttttggttagagtygtagaggtttgagaygtgggtygygtttyggtttaggagatttygyggtygygttttaatttttagtttttygattgygattgygattygggaaaaygtttaygtttttggaaaggaagttttattatagggagttgattyggtgttagygygtagtaygttttyggttygtagtgygtygygyg

SEQ ID NO: 6054 - DNA, 947 bp, synthetic construct
  misc_feature 1..947: note = Description of Artificial Sequence: Synthetic polynucleotide
  source 1..947: mol_type = other DNA
tygtatttgtttygyggttygtttttttgtatataygttttygagtygggagagttttygtagtatttagagaagagatyggaatataaaggatgaaygaatggggagggggggtttggggggttgggagaaygaaaatattagttgygtttttaatatttaaggaaggaagtggtagyggggayggggagaggatgggaaggggatgttgattgygagttggggygggaygyggtgatgggaggggatygggtygggaatgygggaggygaggggagygaygggatttgtygtttyggyggtygggtagttaatygattygttttttttaggaaggagygaggggagggtggtttagagagaaagygtygygyggtttyggttgttttyggttygggatatttaaatagattaaagaggattyggagtggagttyggagyggatttygtagttygygttygtygygtatttattygygygttygttgttgggttttyggtagtygygttttttgygttggyggagtyggaggagtttgygttgggtyggyggggggygggygtttggggagggyggagagagggttygttygtygggatttttgttyggttygggygttttagagtygygggattggtygtyggaggttgygggaggggttygggttagattttttagaagttttagagagagtygttttttttttttygtgtgattttttgggagtygggttgttgayggtttagygtttagtyggagttttygygygtttttygggatttattygggagatgtyggggtttttygggaagagtgggttgygtttgtttttygyggtygtttygttttttygttgygygggatygtggggtttgagagyggygttttttygyggggtygaattygttatttatagtggagtgtggattgatatygyggttttayg

SEQ ID NO: 6055 - DNA, 1313 bp, synthetic construct
  misc_feature 1..1313: note = Description of Artificial Sequence: Synthetic polynucleotide
  source 1..1313: mol_type = other DNA
tygtgttatayggygttgggttttgtaagttgttgtttgygtagtygttttygtygttgtygttttygggygggtgtattagggttygygtgggyggggyggggtyggggygggatyggggyggggtttgttttttygaygygtyggtttygtttttygtttygtttttttttagyggatygtaatgatttagaagtttaggaattttaygtgaygttatygggggggtgatgtaatgtattttaaatagaatgtattgtaatttttgtttagtttaaygtggtttttttattygggtttygtttttgttttttttatatttgtttggtaagtttttaaaaatayggttyggttatttttggggtttttgtatttagttatttttgttgtatttgtygtaggagttatttygggagtgtatttgtttgtaggggttggttttyggtagtagtygygaggttatttggtttagtgggtaggttatagggtaaggagtagggaagatgygatgtatttttttttggagggtgatttgtgtttgtaaatattttggyggattagagggaagttyggtttygagtgttggtagattgtggaattyggttgtgttttgaggttattttagagatttygygtygygtgagtgtyggagygttyggtggtygtygygtygygygtttggagggatgttaaygtggagtyggygtygagttygttyggygtgygtgygtgtgtgggagygygygagttttttgaygyggggattagttatgaatygggggtgtgtgtttgtttttagagatttggtaaggtgyggagttttttagaagtgyggttaagyggtagyggagayggygagttaggaattttttttygygtttttagttttttagygtggyggyggaattttyggagaaagtttgtaaatttttagygggygyggygaggaygtygggttatttagggggygggtgggygygygygtagggggttygtttttttyggtgyggagttgtagttgttatttttttygtygggttgtyggttgtagygggtgggygygygttyggggaggggaggtygttttyggagggygtttggttttygttttaggygtttygggttggagagyggygaggtttygttygttttagtttattttttyggtygttttttgttttygttgtttttttgttggtatygttattttttttyggtygttgttttaaatgatagtttyggttygagttttggyggygtttaggtaatttttaagatttggyggyggagtttttttttgyggtagattttyg

SEQ ID NO: 6056 - DNA, 848 bp, synthetic construct
  misc_feature 1..848: note = Description of Artificial Sequence: Synthetic polynucleotide
  source 1..848: mol_type = other DNA
tygttttttygtttagttygygatgtttagttaggygyggygygygtttgttyggtattttttyggygygtttttttttttgygtttttagatttygatttagagyggatttygatygyggtaaattatggttttaggtgygtttyggaggtagttgygggaattagttatggtttygggttaatgtttagggataagtatagggatagggatagagatagggattgggattggattttagttttaagagaaagtatttygggtttattygtattttttttttatttttaaataaagttatagaagygattagygygtagttaaagggtttggaggtgaaaaggagggttgggtggggaggagagaaagtgagaagggagagaaaagyggyggttgagtaaagygggagtyggygygggyggtggggtttgattyggaygtygygtattyggtttygtttygygtttagygtttygtttattttttggtygygtttgttttygygtttttttgtttttttttatttattagtagttttgttgataagygagaaaattgataagtgagaaaagtygtttgttagygttygggttggtgtttgggttgttatygygggygyggagggaggggygygygggtatygtygtttgtygggtataygttgggtttygatttyggtygggtatatttattttygtagggtagtygyggttattatygatttgyggagttgygtgggttttyggaatttttattttaataagagttyggtttygygygtaagtaggagggaagggaaatttttattttttyggggttagggtaygtagaagtygygaggtttygyg

SEQ ID NO: 6057 - DNA, 2406 bp, synthetic construct
  misc_feature 1..2406: note = Description of Artificial Sequence: Synthetic polynucleotide
  source 1..2406: mol_type = other DNA
gygtagygttatagtygygattgyggyggyggyggyggygtagggggygggggaggagagaagygtttatttygtttygttgttttygtagtagttttggttttagtttyggygtattagagyggtttttgggaatttttgggtttgttgtttyggyggtygttagttgggagtttattatygttygatggtatygaatygattygtgtagttttataattttagtttaatttygaggagttagygtagatygtttttygtttttagttgyggygaggtaagggttggtagygttyggaygttttygttttgttttttttatgtttaagygyggggaattataygttttyggtgtagaatagaygatyggggttattagggttgggyggtgggagtgggggttgggagtattatttttggttggaygtgtgtttagatttatygtttttggtttttaggattttatttttttttgtatttttaggtgtyggtttttttgtattygttttttayggggttygttyggygaagggtagtygtagtttatatttatttttygtttttaatttttgttttttttgttygtygtagttattygtttggttgggagtaagttttttttttygttgagggtgtagagagygtttagggygttaagagtagaggggttaaagtttaagygttattagttagtygaaggttttgagtttttagggtygyggtygggaygtagggaggttaggaygygaygttygttttatttgtttttttagyggttttttggtygatagygtyggtttgggggagggygygyggtygtagaygtagttttttagtaggtaaagtttygagggtygygagttygagtygttttygaagtagaagagtaggttttgtagtagygygaattatttggtttgttattttgtgttgttygaatttygtttgtttaggtagtttttgygygtgtygtttttgygygttagtagttttagggaygygaygtggttattatttagtyggatttttttttgtatggtgtttagaggttagygagattttaygygtttatatttttttygygtagtagtttttygttygtgygygttgygygttgtttttttttggygttygttygttygttttttttagtttttttttttttttaaatatttatattttaggatttggygtygagtygyggttttttgaatttagatatattatttttygttggaatttttttttygtttygtagagttttagtattyggaagatgtygttygattttttttyggtgtygggtaaattgagggattggygatttgygygttggygaggggtaggyggagttatgtgaygtygatttttygaagagttygttttagtagygyggatagggatataygtaygtagtttygtygaggygtagagtygygygtaggttgtaatttggtgttttttttttttttttagatatatatataygtataygtataygtatatatttaaattttgttttttttttttttatttttttttttttttttyggatgttaaaaagtaaattagattaattttygtttaatttaatgaaatttygaaggttygttatttygggagtttgygtttttgygttttatygyggygtattgtagatttggggttaagtgttagttgttatttttttttttaaaggttygttttttttttttattttatttttaataygaggtggaaggaggaaggtgggtggygaaatagagttgtaaaagygtttagttttagtttttgtatagttagtygggttatattgaattttagtattyggttgtattttyggyggtttttttagttatttgaggatagtatagggggtgagatggggtggtggttggtgaaygttggttattttattttatattattttattttgagagttgttataattatyggygttatttttygtgtattttgaggtttggttggygagtygttgttgggagttttttgtaaatattttttaaagtttgaaggygggttttaaaygtaggygtyggggattatgggagtttttaaatagttgygttggygtaatgatattttaatgatagatttttygtttttatttttagtttttattygtttatatagttatayggtatttattygagaaygttatagygttygtatgttgtatygggagggygygygggtygtygggygagtygggagttggggyggggagygygtatygttgtttgtygtagagggtagygagttygtttygattyggagtaagtygygtttggttygggygttttgtagyggggatgggtgttygygtagttttgtgaaggaaagatattattttttygtayggaaattgygtatatttttttttyg

SEQ ID NO: 6058 - DNA, 1218 bp, synthetic construct
  misc_feature 1..1218: note = Description of Artificial Sequence: Synthetic polynucleotide
  source 1..1218: mol_type = other DNA
tygygtttgtagttygtgtattttttttyggagttgygttagggaattayggaygaattggaaggggtygagaagggttttggttattatttttagttttaagttttttygtttttttagatttgggatttttttyggggaggattttttggygttttttggtagtttttygtygtttagggtygatttttttatttttagttttygggygggggaggtttygtayggtygtttagaygggttggggygggaagattgtagyggttttgggtttattttttgtttttttataatttttagtggagttgggttaattttaggtatagtttattygagttaggygaggtttagaaaggtttgattygtttggtagttttaayggatttgttttygtagtygttgattagtygttgaygagyggatttttyggtygttatggygattgtgaaatgtagggtggagygtatgygttygaagttattygygygggtagtttttgygtgtttttttgygtgtttttttaygtgttttttagygygygtagtatttygtttttgygttttttygagygtgtagttttyggtgagggtagttttaygtatagtttttaatattttttttagygtttgtagttttyggtgygygtagtttttaagtttatatgygtagtttttattttgygygtagttttaygtatagtttttaataygtttttagttttattggygtagaatttattatygtttgttttttaygygttttattgggagtgtagtttttatttygagygygtagttttaygtagtttttttatattttttttagygtttgtagtattttttagtgygtatagttttgttagtagtttttyggygygtygtttttgtatygtttygggttataattttgttggygattaagtttgaagaattttttgtggttttatttttttttttaggtttagttttagttttgatattttaattaaaaggttataygttaattaaygaggtattaaaggggaagattttagttgaaagaaatgattgtaggaagtgtgttagggaagttaayggaatygttggttygtyggtggtgygttyggtattaggaaagtttttaygatygttgaggtatygggtagttagtgttygttgttaaygyggagggaaygggyggagattgygggtaataygtggtagagtyggygtgagttyg

SEQ ID NO: 6059 - DNA, 1848 bp, synthetic construct
  misc_feature 1..1848: note = Description of Artificial Sequence: Synthetic polynucleotide
  source 1..1848: mol_type = other DNA
aygaygaaggygygtttttttttattygtttatattatattttygtttttygaagtatagttygggttggagaagttttagyggyggyggttttygyggyggaggttttygygygtatttattatgtttttygttttttttygtttatttygagygtygtgygygttygaagttygagtygtagagygttatygygtaaaggaaggagttaggygygtgyggggttygyggagtttttttgaattttttggatgggggyggaggygaggggygtygttattattgyggtaaatttygtttttttttygggaggtgaaattttttaattygttttyggtyggttygygggtyggatttttyggaaaggattttttaggaggagggagygaatgtaagttttgttyggaygttttatyggyggttttttaaatttgggygttttttgatagttatttttattttatttygtttttaygttggggattatttttggtttyggaggygygggygyggtygtaggagygggttgyggggttygygaaataaagaatttygagygggaygtatttgyggyggtagyggttgttaagttttygaattttttatagattygyggayggggygtaggttggyggtttttygtttygygyggtygygggyggttayggttattgygagyggtygggttgggygyggggtgygttygtygygggtatggtgyggygygggyggtygyggggygygyggggaaggygggagagyggygygggtgagtgggagyggygggtgtgygygagtgygagtgtgygagygygtyggtggygttgtttttgttygttttttttygttygtgtagtttyggtattagtttyggggatygtgtaattygattttttttgatttataagttttgagtgatagttttgatttggtttaatygygggagggaggggaaagagaaagaaagaaatttttagtygtaygttttttttggtatttaatygattttttggaaaaaggttttatttyggtttggtgtttygtgttgggtggagaagtttttygtttygatttggtatygtttgtattatttayggggtggaaaagttgtttttyggtttygygtttttttttygygygttttttttttttttttttttttttttttttttttttttttygygtttttttttttttaagttttaatagatgttgtyggatttttttygttttttygtatttttttttttttygtttyggttttygtttagtttttttttttttagttattttygggttyggaggggaygygttgagtagtaggaygtttgtygtygtagggggygaagttgggaaaatttggagtgttgttygttttatttttgttttttygttttttttaggtygygtygggagttttygtttttttygttygtygggtttttaagttyggagtgggttttagttgygaggygggyggyggyggttgggaggyggygygtygygggtyggggtygggggttgggggggagttygggygtygygagttaygygygygtttttttttygtttttygtygtygtygtygtygtygtygtygttttttttttttttttttttttttttttttttttttttttttttgttttttttyggtttttatatagatatatttatgtttgtttttttttttttttttatttgatttygygttttttyggygygtygaagttttatttattyggygaggggaagggggttygggygtgatgttattygygtttttttttttttttttttatatygttaggatattttttaaatgygygttttggtattygtgttgyg

SEQ ID NO: 6060 - DNA, 2119 bp, synthetic construct
  misc_feature 1..2119: note = Description of Artificial Sequence: Synthetic polynucleotide
  source 1..2119: mol_type = other DNA
tygtygtttttttagtatagttttygtagttygtattygtttatagggttttygygattttagagtttagggaagaattgtygaggggyggggggttttttatgygtatggaagggaygtaygttttaggtttttattttttttttgatttyggggatttttggaygtygatttttygtttygtaggggygagggttttgggttygtagttagaygygggttttttttaaatttagtggtttggttttattgagtgggggaaggtatatattttttaagattaattgtttygtaatagggaatttygtaggattttagtattttygattttttaggtgaygttaagagggtgggttttattgtgtayggtggggaaattgaggttyggaggggataaggaaggtattygaggttaygyggttttttyggygggygggaaygtaggaygyggagttggggygygggttgtgygygtttaggttygyggttttyggggttyggttgtygtagygyggtygtygtygaggattayggtyggggygygggygggttttagtgygtaggygyggygggygggaggggaygygtttygggygygygygyggggtagtyggygttttaatttygttygtttygygtttygygtttyggygtttygtygttygtygttygttygtttyggygtygtygttygygtttyggygtttygggtyggygaggggygygttygyggtygyggtygttgtatggygttgagatggygggggygtygygyggyggaggyggyggyggaggyggygygggygagttygggggygtygagygggyggtygggataagtygtyggygygggtttygggygtgygaygaggagttygtttgtttagagttggaggygttgtttygyggttataygttgyggttggagtaggyggttaygttgaaggygttggtygtttttagtttgttggygggygygttggygttggtygagttgttgggygygtyggggttygygttyggtttggttaagggtttatattyggtgtattgygttttttttttggygttgttygtggtaattaaygttyggtttttgtaggtgttttagttgtagtaggtyggttagttggygttgttttttagttttattttygygttgttttgttgttttttygygttgggyggtttygttyggggtttygtyggggtygttggggggttagygatygtygaataaggggtttggtagttttttttggttattttygtgttttatgttttgttgttygtgygtagtttgttggttataggttttgggttygtggtggttgygtygtatttgttggttatagttattttggttttygttaagygtttaygtttttggaggayggtaagtgtagtygygtattttttatttggtttyggatatatttgttgggaygatgttgggaatgttyggagtygggygygtttttttttatgyggygggtggggatattgaggtttygagtgggggtgtgtttaaggttatttttaygagttggggaygtagtyggggttggtatttttyggttagggttttttttagagttataatttaygaagygtttttggygtgaagtgtggagaggggagataggtgtggagagagaaaggtttggttaaggttagggagttgatgagyggttagayggyggttagaggggttygtyggttttttgtygtatttatttttatagagggattgaaagtgggygaggagagtagatttttagggtaagttttaaggtyggttttgygygtagygttgggttttttttttgygtatttagagygygtgttgggttygttttttaattttgyggattygagggtggtatatgggtggtgggaaaggatttyggtttttttagttttgttggttatttttttgtggatatgttttyggtttagaaagagtggggtttgttaaggttaaatatagtttagtttttgtygttgttattyggyggttgttttgattttgttttttttgygttygaattttgttattgtttttttagtygggygggygagatggttgtaaggayggggaygttgtttgtttttygyg

SEQ ID NO: 6061 - DNA, 562 bp, synthetic construct
  misc_feature 1..562: note = Description of Artificial Sequence: Synthetic polynucleotide
  source 1..562: mol_type = other DNA
tygtagggygaaggggtgygttgttagatgtggtattttygttttayggagatatayggtgttttataygttagggagaggtttgagaygtaaagagtygtygagygggttgygggattgtttygttgttattttygtttgtagttattttttygtaygtatttgtgtgtgtatttaggttaatatggaaggygttattttaatttttgtygtgagtaggtgggagggaagagagaygagaggtattttattggttgtttgggaaaatgaattgtattttttttttttttgyggaggattaattttttttattttttygggtgggtattygtattttggggtyggagtttgaattygggagttaaggggttttagttttagggaygtgaagttgagygtatagygggygtttttagatattggggaaagtgttttaygatgtttygagtttttttagtttygttagyggggygagygtgagggtgtttygatygattagyggtttygggtgtagggtggygggttyggyggygygygttttttttttttttttggyggttyg

SEQ ID NO: 6062 - DNA, 1404 bp, synthetic construct
  misc_feature 1..1404: note = Description of Artificial Sequence: Synthetic polynucleotide
  source 1..1404: mol_type = other DNA
tygtttygttygaggygaaatygttgaaagttyggttatttaatttttgtttttataattyggaatttyggatattagyggttttagttgttggygygyggtttttttttagttttttggattttaaagttttttgttatagygyggygttttttttttttgttaatttttttttttgtattgtgayggaggtaaagtaatttagtttaggaggttgaattygagttattagagaaggagaaatagtgtygaaaayggttygtgygttattagggtagtttattaaygtattaattttaggttygttgggtagaagtygggaggaaatattttggggatygtatttttggttaaatgtttagtaygagttaaattyggtttttttaaagygagttaagtttattattataaagagatttttygagtgttttgttttaattatattttagatagttagttttgtggttgttgtttgattttaattttttttttaaatttaaaaggatgtatatttttattagayggaaygtygygatttttyggygaagaaaaaggygtygtttattttttttttaaaaygttataataaaaattattaygtttttttttttttttttttgtttttttttttttttttagattaataaggaaaggagygagygagggygtagatgttttttggttaagtatttttyggatgttttygattaaagygtttttaaatgaatttgtagtttgyggaagtyggggatatatttatagaygttttttgttgtttagattaggaggggtggtgggggaattaggaagttagggagagagtaaagtttttggaygygttttaggaggaaaattttgtgtagtgttgttaggyggaggttygttagaaggtttygtagttgttgaggyggggtgggattgygttttaggggtygygttgaagttggygtygygattattgygtatygatttygtttattttttgttygttttygggagttttttttgttttaggayggttttttattttttaaattatgttygttttttatttyggatttatagttatttttaaatttyggttattttygtttagtatygyggtttttagtatatttttttattggagtagtaggtgatttaaattagatttatttgttgtgaatttttttttttttttttttttttttggtgtttttttagggagaggggaaygggatgtaggttgaggtttagyggygyggtaattyggggtatyggygygygtttttttgagtygtagttttggttgagtaagyggagtygtyggtagttttggtagagtygggaagttgyggtygtaggggttaggtygggaggtagggggygttgttgtttttttygagagtygygttaggataggyg

SEQ ID NO: 6063 - DNA, 819 bp, synthetic construct
  misc_feature 1..819: note = Description of Artificial Sequence: Synthetic polynucleotide
  source 1..819: mol_type = other DNA
gygagaygtgggaaattggygaagttgttattagtygtyggygtaaggagygygagagttttgggtgygygtagggtatttattttttattttttagtaagtatygtygtaagttttttaggtgtagaaattgttggygttgttttygtagttttygtataggaattggyggtagttttgygtgtatttgtygtagtagtaayggagaagtagggttyggtagggttygtagtttaggggtaggagatagattttygygttattttttgaagaaggggtagaaggagagtaaaagagagggaaagtggttaggygtagtttttaggaggaaagaatatttyggggagttttgttttttttygagyggaggggtttttgtagagaaagtgtaaatttgggagygagttttttttgttagyggagygygyggtagggatttggagaaagygaggtttggagggygtttatayggggttttatggttygttgygtttttttygtyggttggggagagaagtttttggagyggttagatatttgttggtttttgagtagtatygtttagtgtagttttygttaggaaaagtagtagaatygatagttttagggggygagyggggtttatggtgtagggggtygggyggttygttgggtaaggygttygagaaagygtttggygggaggaggtgygyggttttttgttttaggyggttygggtgttygttttatgyggggygagygttyggtygattttygtyggggyggagtttgaggggtggttgatttatgtayggggattgttatttygtygttttygyg

SEQ ID NO: 6064 - DNA, 1128 bp, synthetic construct
  misc_feature 1..1128: note = Description of Artificial Sequence: Synthetic polynucleotide
  source 1..1128: mol_type = other DNA
gygttggygggygtattyggyggyggygagygyggaggtgttgyggtatttattatggtatttttgtttyggaaygtagtaggtggggttgttygtaatatgtagggaaatgagtatttygttttgttttttatttttttttagtttttygtggtgggtgtataggaaaaagaagggygaaaagygggggtaatagttagtygtygygygygtttttagygtygtttttagtaatagygttaggaggaaagtttgtygggtttagttattgygttttatgtygtygtygtygtygtygtygtygygygttttaygygtygttygtttatttagttttggagaygtygggayggaggagttaygyggagagaaggygagaagaaggyggaygggagyggaaygggttygggagygggtttgggagygggttttygtygagaagtttygygggagayggyggtttttaaagttattttgggtygygggagygygggatyggggttgygggygtygagagygygtygtttgtygttttygtgygtygtygtygtttttgygygaygtttttyggttaggtttgggaaagygttygtttygttttatatttttttaaagtttygggygtygygtttttttygtygtygttataygtgtttyggtygttttttygttttygygygtygtttygttygtttttygttttttygggttggttyggyggtatttygygyggygaggggygtaygygttttyggagttttyggttagygttyggttygtattygggaggatagggaggggygttygtyggggagygggayggggaygttgtygaggatygttgagttygygatttttttgygagggaygttaaagtttygtagagggtatttttygtttagttgtttgaaggggaaggttagtttttttggtygttagtgtgttttgttttttttgggaggatgygtgagggaaggagaggggyggtagggayggtygttggygtyggtttttttgtttgagtyggttgygtttygygtttttyggggttygtagtttgttagttygggyggttygtattygttttgggaattygttygaggtygygaatygttaggggttttygyg

SEQ ID NO: 6065 - DNA, 1128 bp, synthetic construct; identical to SEQ ID NO: 6064
  misc_feature 1..1128: note = Description of Artificial Sequence: Synthetic polynucleotide
  source 1..1128: mol_type = other DNA

SEQ ID NO: 6066 - DNA, 1128 bp, synthetic construct; identical to SEQ ID NO: 6064
  misc_feature 1..1128: note = Description of Artificial Sequence: Synthetic polynucleotide
  source 1..1128: mol_type = other DNA

SEQ ID NO: 6067 - DNA, 1921 bp, synthetic construct
  misc_feature 1..1921: note = Description of Artificial Sequence: Synthetic polynucleotide
  source 1..1921: mol_type = other DNA
tygyggatttgggtttggygtttattttatygttaggattggatagaaaggttttggtygaggttattaayggagaggttagagyggagtttttggtttagaatggaggtagtagygagttttyggyggtttttaggagtattaaggtggaggyggtggaggagtyggaggyggtttttattttgggtttyggagagtttgggttttaggtttygtygyggaygtygtygtygygtagtttygtttyggttagggttaaggtygagttgtttagttttaygtygggttttagttyggtgttyggygagttgggtttggtyggggttttgtttttttygtagtaygtgttygggttygaygyggygtttttygtttyggagattttggttaagatgttygagttggtgtatagtyggttgtagtagggygygggygygggygtyggyggygygtagatygggttttttttyggggtttttaagggygttaygtgtttygagtgygagattatttttagtaaygttaataattattaygtgtataagygtttttattgtttaggtygtygtgygttygaggaygygtttgtygygygtaggtttaaggygtttttyggttyggttygygygtttttyggttagttygtygaattygaygygtygygttygttttygggtttyggagygygygaggagggggttgggggygyggttaygttygaggayggygygggyggtyggggtagygagggtagttagagttygggtagtttygtggaygaygyggaggaygattttagtygtaygttgtgygaggtttgtaatattygttttagtygttaygagatttatatygtgtataagyggtattattgygtttygygttaygattygtygtygygtygatyggtygygttttygggattttttgggtyggtygygttttyggttttttttttygtygygtttgtgygtaygygtagaygtygtaagttttaygagttgtaygyggtyggygtttygtttttttygtygttyggttaygttttygygttygagtygtygyggttyggaagyggaagyggaagyggtttyggtttygtttttgygygttygttyggtttygyggtygayggttttatygatttgagtaagaagtygyggygttygtttttyggagtttyggtatyggygttggtygattattaygagtgtayggtttgtygygtgagtttttatagtttygaggtttatttggygtataagaagtattygtgtttygttgygttatygttyggygygttyggtttgttygtygtygtttgtttttattgtttttygaayggttyggtgygyggggatttgttggagtattttygtttggygtayggtttgttgttyggygygtttttggtyggttygggggtygaggttyggaygtyggtygatygyggtttttygttygttttygttttygtygttttttygtagttygggtttygtggttttygggayggtttyggttyggagttttaggagtygtygttyggttygttttygttttyggtygtygygttygaggtygtgtygttttygtyggygttttttttttattyggataagggygtttagatttttagtaagggtaygtyggygtygttgtttaayggtaattatyggtattgtygtttttgtaatattaagtttagtagtttgtttatttttatygtttataagaagtattattgtttttygtaygtygtygagtaygtgaagtgagygtttatattatagtygtagaygttttgtaygtttygttgygatgyggggagggggtygtttttaggtygtayggattgtygtttttgggaatttygttaygtataggtttyggyggagggggtygtagggggtagygttyg

(The sequence listing continues in the following parts.)
